United States Patent Application Publication US 2014/0259212 A1 - sequence listing, part 27

SEQ ID NO: 88331 - DNA, 1017 bp, Prochlorococcus marinus str. NATL2A
  CDS (1)..(1017): transl_table=11
ttgattagtaattctcaattggacttaggaatatcctttgttgggagcggaagtgctactccacaaaagataatcaagaatgatcaacttggtcagagagtggatactaatgatgaatggattcaaaccagaacaggtattggtcaaagaagggttattggagaaaatgagtctctgattgatttggctactgatgcagcagtgaatgctgtcaaaatggctgattgggatgtgcaaactatcgatttgataattcttgcaacatctactccagaagatttatttggctcggcgcctaaaattcaatcaaatttgggagcttcaaatgcagtcgcttttgatttaactgcagcttgtagtggctttttatttgctttggtaactgcctcacaatatttagcttctggatctatgaaaagagctttagtgattggagcagaccaattatccaaatgggtggattgggatgatagaaagacctgcgttttgtttggagatggagcaggagcagtagctcttgagagttctggtgatgaaagtggattgattggatatgatttgaagtctgatggaagcaaaggaggttgcttaaatctctctcaatcaaatgtttttttagatttagtgcaaggagctaaccatcaaaaaggggaatatttaccaatcaaaatggagggaaaggaagtttataaatttgcagttaaagaagttccaataattcttggggaaatcttagaaaaatgtcaaatcaagtcagagagtatcgattggcttctgttgcaccaagctaatcaaagaattcttgatgctgtggcttcgagattttcaataccatcagaaaaagtgctttcaaatttgaaatattatggaaatacatctgcagcaacgatcccactcatgcttgatgaggcagttagagataagagaatcaaatcaggcgatttaatagcttgtagtggttttggtgctggcttgagttggggagcagctttgttttattggcatggtccctattaa

SEQ ID NO: 88332 - protein, 338 aa, Prochlorococcus marinus str. NATL2A
MISNSQLDLGISFVGSGSATPQKIIKNDQLGQRVDTNDEWIQTRTGIGQRRVIGENESLIDLATDAAVNAVKMADWDVQTIDLIILATSTPEDLFGSAPKIQSNLGASNAVAFDLTAACSGFLFALVTASQYLASGSMKRALVIGADQLSKWVDWDDRKTCVLFGDGAGAVALESSGDESGLIGYDLKSDGSKGGCLNLSQSNVFLDLVQGANHQKGEYLPIKMEGKEVYKFAVKEVPIILGEILEKCQIKSESIDWLLLHQANQRILDAVASRFSIPSEKVLSNLKYYGNTSAATIPLMLDEAVRDKRIKSGDLIACSGFGAGLSWGAALFYWHGPY

SEQ ID NO: 88333 - DNA, 960 bp, Thiobacillus denitrificans ATCC 25259
  CDS (1)..(960): transl_table=11
ttgacctattcccgcattctcggcaccggcggttacctgccggcgcgcatcttgaccaacgccgaccttgagaagctcgtcgacaccaacgaccagtggatcgtcgaccgcaccggcatccgcgaacggcacatcgcggccgacggcgaattcacgagcgacctcgcgactgcggcagcccgcgcggcactcgaggcggcgaatctcgcggccgacgacatcgacctcctgctggtcgcgacgacgacgccggatctggtctttccaagcacggcctgcatcgtgcagtccaagctcggcatgaccaacggcaagccggccttcgatctacaggccgtctgcagcggcttcgtctacgcgctctcggtggccgaccagttcatcaagggcggcgcggcgaagcatgtgctcgtggtcggcgcggagaccttgtcgcgcatcaccgactggaacgaccgcagcaactgtattctgtggggggacggcgcaggcgccgtcgtcgtcggagcatcgtccgagccggggatcatcgcgacgcatatccacgccgatggccggcacaaggaattgctgcgcacgacgaccggcccttcgagcggctcgaaaacacccgcgctcatgcgcatggagggcaacgcggtgttcaagatggctgtcaacacgctcgatcgcattgttgacgagacgctcgaggcgaacggcctcgccaagaccgacatcgattggctggtgccgcatcaggccaacatccgcatcatctcggcgaccgcgaagaagctcggcatgagcatggacaacgtcgtgacgacggtcgccggacacggcaacacctcggccgcgtcggtgccgctcgcgttcgacgccgccgtgcgggacggccgtatcaagcgcggccagatcgtgctcatggaggcgttcggcggggggttcacctggggctcggcgctgcttaggtattga

SEQ ID NO: 88334 - protein, 319 aa, Thiobacillus denitrificans ATCC 25259
MTYSRILGTGGYLPARILTNADLEKLVDTNDQWIVDRTGIRERHIAADGEFTSDLATAAARAALEAANLAADDIDLLLVATTTPDLVFPSTACIVQSKLGMTNGKPAFDLQAVCSGFVYALSVADQFIKGGAAKHVLVVGAETLSRITDWNDRSNCILWGDGAGAVVVGASSEPGIIATHIHADGRHKELLRTTTGPSSGSKTPALMRMEGNAVFKMAVNTLDRIVDETLEANGLAKTDIDWLVPHQANIRIISATAKKLGMSMDNVVTTVAGHGNTSAASVPLAFDAAVRDGRIKRGQIVLMEAFGGGFTWGSALLRY

SEQ ID NO: 88335 - DNA, 993 bp, Anabaena variabilis ATCC 29413
  CDS (1)..(993): transl_table=11
gtgcaaaacttaggcatcgcaattaccggaagtggttcagcagcacctgaaacttcccttcacaacgaagaattaagccaactggtagagacatcagacgagtggataagtaccagaacgggaatccgccaacggcgtttagccctaccgactgaatcattaagcagtctggcggcggcagctagtagacaggcgatcgcctcggctggaattacagcatccgatatagatttgattttactggcaacttccacacctgacgatctgttcggtactgctactaaaatccaagctgaattgggagctactaaagccgtagcttttgatttaacagcagcctgttccggcttcgtctttggtctagtcacagcagcccaatttatcagaactggcgtatatcagaatgtactgttgatcggggctgatatcctctcccgttgggtagattggcaagacagacgtacttgcgtgctatttggtgacggtgctggggctattgtattgcagtccaaccaaagcgatcgcttattaggatttgccctcaaaagtgatgggacacaaaaccattatctcaacctagcttatcaaggcactgcccaagaaattctccccaacatcaagatcactcaaggcacatatcaacccgtaaccatgaacggcaaagaagtttaccgctttgctgctcaaaaagtcccagaaatcattgataaagctttatttgaagccaatattactgttgaccaaatcgattggctactactacatcaagcaaatcaacgcattcttgatactgtagctcaacgcctaaatattcctgcacacaaagtgattagtaatcttgctaattacggcaatacctccgccgcatccatccccctagccctagatgaagccgtgcgagaaggtaaaataaaacccaacgatatcattgctacatccggctttggagccggtctaacatggggtgcagcaattttccaatggggaagataa

SEQ ID NO: 88336 - protein, 330 aa, Anabaena variabilis ATCC 29413
MQNLGIAITGSGSAAPETSLHNEELSQLVETSDEWISTRTGIRQRRLALPTESLSSLAAAASRQAIASAGITASDIDLILLATSTPDDLFGTATKIQAELGATKAVAFDLTAACSGFVFGLVTAAQFIRTGVYQNVLLIGADILSRWVDWQDRRTCVLFGDGAGAIVLQSNQSDRLLGFALKSDGTQNHYLNLAYQGTAQEILPNIKITQGTYQPVTMNGKEVYRFAAQKVPEIIDKALFEANITVDQIDWLLLHQANQRILDTVAQRLNIPAHKVISNLANYGNTSAASIPLALDEAVREGKIKPNDIIATSGFGAGLTWGAAIFQWGR

SEQ ID NO: 88337 - DNA, 972 bp, Rhodobacter sphaeroides 2.4.1
  CDS (1)..(972): transl_table=11
atgacaatacgcgccgtggtgaggggcgtcgggcactatctgcccgaccgtgtcgtcccgaactccgaactcgaggcgatcgtcgagacgaccgacgaatggatccgcacccggtcgggcatcgaacggcggcatttcgcggcggagggacagacgacctccgacctcgccgcccgcgcggcgcgtgcagcgctcgaggacgcggggcttcagccggacgacatcgacacgctgatcgtcgccacctccacggccgatctcaccttcccctccgccgccaccatggtgcaggcggccttgggcatgacccgcggcttcgccttcgacgtgcaggcggtctgcgcgggcttcgtctatgcgctggccaatgccgatgcgctgatccgctcgggtcaggcgcagcgcgtgctcgtgatcggggccgagaccttcagccgcctgatggactggaacgaccgggccacctgcgtgctcttcggcgatggcgcgggcgcggtggtgctcgagggcaccgagagcgccggcacctccgccgaccgcggcatccttgcgaccgacctgcattcggacggccgcttcaaggacctgctctatgtcgatggcggctcctcgaccggcaccacgggccacctgcggatgcagggacgcgaggttttccgccatgccgttgagaagcttgcagaaacagcgcatacggcactggagaaggcgggcctcggcgccggcgatgtcgactggatcgtgccgcatcaggccaacctgcgcatcatctcggccaccgcccagcggatgcaggttccgatggaccgcgtgatcctgacggtgcaggatcacggcaatacctcggccgcctcgattcccctggccctctcggtcggcaaggcacgcgggcagatcaaggaaggcgaccttctggtcaccgaagcgatcggcggcgggctcgcctggggctcggtggtcctccgctggtag

SEQ ID NO: 88338 - protein, 323 aa, Rhodobacter sphaeroides 2.4.1
MTIRAVVRGVGHYLPDRVVPNSELEAIVETTDEWIRTRSGIERRHFAAEGQTTSDLAARAARAALEDAGLQPDDIDTLIVATSTADLTFPSAATMVQAALGMTRGFAFDVQAVCAGFVYALANADALIRSGQAQRVLVIGAETFSRLMDWNDRATCVLFGDGAGAVVLEGTESAGTSADRGILATDLHSDGRFKDLLYVDGGSSTGTTGHLRMQGREVFRHAVEKLAETAHTALEKAGLGAGDVDWIVPHQANLRIISATAQRMQVPMDRVILTVQDHGNTSAASIPLALSVGKARGQIKEGDLLVTEAIGGGLAWGSVVLRW

SEQ ID NO: 88339 - DNA, 993 bp, Carboxydothermus hydrogenoformans Z-2901
  CDS (1)..(993): transl_table=11
atgtctggaaggattgaaggcattgaaattttaggaacagggtattatgtgccagaaaaggttttaacgaacaaagagcttgagtcaagattggatactaccgatgaatggatagtaacccgaactggaatcagggaaaggcgtattgcctccccggaagaaactaccctatcaatggcatactatgcttcagaaaaggcaatacagaaggcaaaaatcgaaccaggggaaattggtttaataattgtggctaccgctactccggatatgatttttcccgcaacggcggcccagttgcaggaaaagattggggctaccaatgccggggcttttgatttgtctattggttgcactgggtttatttatgctttagttaccggagctttatatactaaagtgctgtatccccaaaaggtacttgtagtgggcgctgaaaagctttcagcaatagttgactggcaggatagaagtaccgctgttttatttggtgatggtgcaggtgctgtgatattgggtgtaaatcctcaaaaagcggggattttggcctttgaacttggagccgacggaagtggtgctgagctattaaaattgcctgctggtgggtctaaacttccagcatcagcagaaactgtcgaaaaaaggctccattttattaaaatgaatggaagtgaagtttttaaatttgctgtaaagaaaattgaagagtcggtaaacggtttacttgaaaaagccaaattacaaccggacgatattgatttatatttatttcaccaagccaatcgtcgaataattgttaactctttggaacgtttagctttagatattgaaaagacctttattaatatcgagctttacggaaatacctcggcggcgtctataccaatagcattggatgaagctattcatgcgggaaaactaaagaaaggtgataagctcttactcagtggttttggagcggggcttgcctggggcggtttaattatggaatattag

SEQ ID NO: 88340 - protein, 330 aa, Carboxydothermus hydrogenoformans Z-2901
MSGRIEGIEILGTGYYVPEKVLTNKELESRLDTTDEWIVTRTGIRERRIASPEETTLSMAYYASEKAIQKAKIEPGEIGLIIVATATPDMIFPATAAQLQEKIGATNAGAFDLSIGCTGFIYALVTGALYTKVLYPQKVLVVGAEKLSAIVDWQDRSTAVLFGDGAGAVILGVNPQKAGILAFELGADGSGAELLKLPAGGSKLPASAETVEKRLHFIKMNGSEVFKFAVKKIEESVNGLLEKAKLQPDDIDLYLFHQANRRIIVNSLERLALDIEKTFINIELYGNTSAASIPIALDEAIHAGKLKKGDKLLLSGFGAGLAWGGLIMEY

SEQ ID NO: 88341 - DNA, 987 bp, Synechococcus sp. CC9605
  CDS (1)..(987): transl_table=11
ttgttccgagggtccggcagcgcgacgcccagccgctcgatcagcaacgctgaacttggccagcgggttgagacgagtgacgaatggatccgcagtcgcactggtattgccgcgcgacgtgtggtcaacagcgacgaatcccttgcagaactgagcggactggcggcggaacgggctttagagatggccggttggtcggctgacagcctcgatctcatcctgttggccacctccactccagacgacttgtttggttcagcgccacggctgcaggctcgcctcggcgccatcaatgccgcggcctttgatctcaccgcagcctgcagcggatttcttttcgccgttgtcaccgccgcccagtacctgcgcagtggggcgatgcgccgcatcctcgtggtgggggccgatcaactcagccgctgggtgaactgggacgatcgacgctcctgtgttctcttcggtgatgcggcaggtgccgtggtgctggaagcgacagagaacggccaggacgatctcgatggattcctgcttcgctccgatggcagccgcggcgaggtgctccagctcccccaggtgagccagcgccagcccttggtgggggacgccagccatcagtgcggcggcttcgaacccatccagatgaacgggcaggaggtctacaaattcgcggtgcgggaggtgccagcgattctcgagaagctgcttgtacaggatggtgtcgccgcagattccctcgattggctgctgctgcatcaggccaaccagcgcatccttgatgcggtggcggatcggttctcggtgccctctgaaaaagtgctgagcaacctggcccactacggcaacacctcggcagccaccatccccctgatgctggatgaagccgtgcgggatggacgcatccaacccggccaccgcatcgccagcagtgggttcggcgcgggattgagctggggtgcagccctcttccgctggagcgggcccgcctaa

SEQ ID NO: 88342 - protein, 328 aa, Synechococcus sp. CC9605
MFRGSGSATPSRSISNAELGQRVETSDEWIRSRTGIAARRVVNSDESLAELSGLAAERALEMAGWSADSLDLILLATSTPDDLFGSAPRLQARLGAINAAAFDLTAACSGFLFAVVTAAQYLRSGAMRRILVVGADQLSRWVNWDDRRSCVLFGDAAGAVVLEATENGQDDLDGFLLRSDGSRGEVLQLPQVSQRQPLVGDASHQCGGFEPIQMNGQEVYKFAVREVPAILEKLLVQDGVAADSLDWLLLHQANQRILDAVADRFSVPSEKVLSNLAHYGNTSAATIPLMLDEAVRDGRIQPGHRIASSGFGAGLSWGAALFRWSGPA

SEQ ID NO: 88343 - DNA, 981 bp, Geobacter metallireducens GS-15
  CDS (1)..(981): transl_table=11
atggccagagcgagaattatcggcacaggttcggccgtgcctgagatgatacggactaatttcgacctggaaaagatggtcgacaccaccgacgactggattaccaccaggactggcatcagggagcggcgcatcgctgctgaaggcgaatatacttcaactttcgcaacccgtgcggctgagcgggctctcgagatggctggtgttactgctgaagaaattgatctcctcattgttgcgaccgtcaccccagattttccctttccatctaccgcatgcatagttcagagcaatatcggagcgaaaagggccgctgcgtttgatgtctccgctgcctgttcggggtttctctatggactctcgttggcggacaatgccattcggtctgggggggcaagtaaagctctcatcatcggcgccgaggttctgagccgagttattgactggaccgacagaaatacctgccttcttttcggtgacggttccggggccgtagtggttgaagcatgcgaaagtgaacagggagttctttcaacgcacctgcatagcgacggttcctattgggaactcctttatcagcccggttgcggcaatcgaaaccccgccgttcagaagaccctggatgagaggaagaactttctccgaatgcaggggaatgaggtgttcaagcttgccgtgcgggctatggaagacgctgcccttcaagcactggaaaagaatggcctcactccctcggatatcagtatttttataccccaccaggctaatcgtagaatcatcgatgccatcggcaagcgtcttggtttaagcgatgacaaagtctacgttaatcttgatcgatatggaaacacctcttctgcttcaatcccgcttgcgcttgatgaagccaaccgtggtgggcggataaacgagggggatattgtcctctttgatgccttcggcggtggcctcacgtgggcctctgttctgctgcgctggtaa

SEQ ID NO: 88344 - protein, 326 aa, Geobacter metallireducens GS-15
MARARIIGTGSAVPEMIRTNFDLEKMVDTTDDWITTRTGIRERRIAAEGEYTSTFATRAAERALEMAGVTAEEIDLLIVATVTPDFPFPSTACIVQSNIGAKRAAAFDVSAACSGFLYGLSLADNAIRSGGASKALIIGAEVLSRVIDWTDRNTCLLFGDGSGAVVVEACESEQGVLSTHLHSDGSYWELLYQPGCGNRNPAVQKTLDERKNFLRMQGNEVFKLAVRAMEDAALQALEKNGLTPSDISIFIPHQANRRIIDAIGKRLGLSDDKVYVNLDRYGNTSSASIPLALDEANRGGRINEGDIVLFDAFGGGLTWASVLLRW

SEQ ID NO: 88345 - DNA, 993 bp, Desulfovibrio desulfuricans G20
  CDS (1)..(993): transl_table=11
atgaccacaaaaagctacattctcggattcggctcccacgcgccggagcggattctcaccaacaccgacatggaagcgttcgtggacaccacggacgagtggatcaccacgcggaccggcataaagcagcgccacatagccgccgaaggcgaaacgacatccgaccttggcgcaaaagccgcgctgcaggctctggcaaatgccggactgcatgccgacgcactgacccacattcttgtggccacctgtacccccgacgccatgtgccccagcacagcctgcctcatcgagcacaagctcggtgtttccggcctgatggcgctcgatctaaacgccgcctgttccggctttctgtacgctctcaacatggcacagggcatcgtggctctgacccccgacgccaaggtgcttgttgtggctgcagaagtgctgagcaggcgcatcaactggaacgaccgctcgacatgcgttctgttcggcgatggcgccggcgccgtcatcgtgggcagtcaccccaacgagggacgtgccgtggaagtggcagacagcctgctttcttcagacggtgcgttgggtgatcttctgctcatcagcggtggcggaaccagcgttccctacaaacacggccagcccgtgggtgacgaatttttcgtccgcatggaaggccgtgaaatattcaaacacgccgtgcgcagcatggcacgcgtgtgcgaagaactgcttgagcgcaacggcatagcccgcgaagacgtggatatgctgctgccccatcaggcaaacctgcgcattatcgaagcggtgggaaaaaaactgggtatccctgccgataaagtatttgtgaatcttcaggaatacggcaacacttccgccgcatcggtgcctctggcactggccgatgcggacagtaaaaacctgctgccccccgggcgcacggtactgctgaccacattcggaggcggattcacatggggtgcagtgctgctgcgcacctga

SEQ ID NO: 88346 - protein, 330 aa, Desulfovibrio desulfuricans G20
MTTKSYILGFGSHAPERILTNTDMEAFVDTTDEWITTRTGIKQRHIAAEGETTSDLGAKAALQALANAGLHADALTHILVATCTPDAMCPSTACLIEHKLGVSGLMALDLNAACSGFLYALNMAQGIVALTPDAKVLVVAAEVLSRRINWNDRSTCVLFGDGAGAVIVGSHPNEGRAVEVADSLLSSDGALGDLLLISGGGTSVPYKHGQPVGDEFFVRMEGREIFKHAVRSMARVCEELLERNGIAREDVDMLLPHQANLRIIEAVGKKLGIPADKVFVNLQEYGNTSAASVPLALADADSKNLLPPGRTVLLTTFGGGFTWGAVLLRT

SEQ ID NO: 88347 - DNA, 1008 bp, Prochlorococcus marinus str. MIT 9312
  CDS (1)..(1008): transl_table=11
ttggaaggaataaagtttaatcagattggagtctcatttaaaggtagtggaagttatgtacccgatcaaatactaaccaatgaaacaattagtcaaaaagtagatactagtgatgaatggataaaatctagaactggcatttctgagaggagaatttctggcttaggagataatgtcaatgatatggcttatgaggcggcactatcagcgattgaaatgactaattgggatattaaaacgattgatttaattgtcttagctacttctacacctcatgatttatttggttcagcgccatctatacaagctaaattgggtgcccataatgctgtagctttcgatttaactgcagcatgtagtggttttttattcgccttaataacagcctcacaatttttaaaaggaggtagttttaagagagctattgttataggagcggatcaattatcaagctttgttgattggaatgatagaagaagttgtattctatttggagacggtgcgggtgcattggcaattgaagccacaaatgaatttgataatttccttggttttgatatgagaacagatggggaaagaggttctttcctaaatcttccatcaaaaaataataaggatttaataattgataacattgattttttaaatgggggtttttctccaattcagatgaatggtcaggaagtctataaatttgcggttagagaagttccgataattcttgataatttgtttagaaaaacgaattatacttctgacgaagttgattggctcatactgcatcaagctaatcaaagaatattggattctgtaggagacagattaaaaattcctagagaaaaaattcttagcaatttagcaaaatatggcaatacctcagcagcaacaattccactagtgatggatgaggctattagaaataatagaattaaacaaaatgatattattgccacaagtggttttggtgctgggctaagttggggtgcagccctcattaaatggggttaa

SEQ ID NO: 88348 - protein, 335 aa, Prochlorococcus marinus str. MIT 9312
MEGIKFNQIGVSFKGSGSYVPDQILTNETISQKVDTSDEWIKSRTGISERRISGLGDNVNDMAYEAALSAIEMTNWDIKTIDLIVLATSTPHDLFGSAPSIQAKLGAHNAVAFDLTAACSGFLFALITASQFLKGGSFKRAIVIGADQLSSFVDWNDRRSCILFGDGAGALAIEATNEFDNFLGFDMRTDGERGSFLNLPSKNNKDLIIDNIDFLNGGFSPIQMNGQEVYKFAVREVPIILDNLFRKTNYTSDEVDWLILHQANQRILDSVGDRLKIPREKILSNLAKYGNTSAATIPLVMDEAIRNNRIKQNDIIATSGFGAGLSWGAALIKWG

SEQ ID NO: 88349 - DNA, 1008 bp, Synechococcus elongatus PCC 7942
  CDS (1)..(1008): transl_table=11
ttgactcgacctggcgttggcgttgcaatcactggcagtgggtccgctgttccttctacaaccctcagtaatgaccaactctcccagttggttgaaacctcggatgaatggatccgaagccggactgggattggtcagcgccgagtcgcacagcctcaaattgaaagtctctcttccttggcggcggcggcaggtcagtcagctctcgaagctgcagggctagaagcgacatcggttgatttgattttgctggcgacgtcaacccccgacgatctgttcggcagtgcctgccaagtgcaagccgccttgggcgcgacccaagccgtagcctttgacctgaccgctgcttgttccggcttcttgtttgccctcgtaaccggcgctcagtttatccgcagtggagcctaccgcaccgttttggtgattggggcggatgtgctgtcgcgctggacagactggagcgatcgccgcacctgtgtgctgtttggggatggcgccggggccgttgttctgcaggccagcgagattgatcaactgctcggctttgaaatgcgcagtgatggcagcctcaacggctgtttgaccctggcttatcaagctgataaccagtcgctgctctcggatattgagattgctcagggcacttatcagccggtagcaatgaatggccaagaggtctatcgttttgcggtgaagcgggttcccgagatcctcgagaagacgctgttccacgccgggatcgatcgccaagaagtcgattggttactgctacaccaggccaaccaacgcattctcgatgcagtcgccgatcgccttgatatttcccgtgatcgcgtacttagcaacttggtgaactacggcaatacctcctccgccacgatccccttggttttggatgaggccgtcaaagctgggaagattcaatcgggcgacttaatcgctgcttcagggtttggagcagggttgagctggggcgcagcgctgttccgttggggcacggtggtttag

SEQ ID NO: 88350 - protein, 335 aa, Synechococcus elongatus PCC 7942
MTRPGVGVAITGSGSAVPSTTLSNDQLSQLVETSDEWIRSRTGIGQRRVAQPQIESLSSLAAAAGQSALEAAGLEATSVDLILLATSTPDDLFGSACQVQAALGATQAVAFDLTAACSGFLFALVTGAQFIRSGAYRTVLVIGADVLSRWTDWSDRRTCVLFGDGAGAVVLQASEIDQLLGFEMRSDGSLNGCLTLAYQADNQSLLSDIEIAQGTYQPVAMNGQEVYRFAVKRVPEILEKTLFHAGIDRQEVDWLLLHQANQRILDAVADRLDISRDRVLSNLVNYGNTSSATIPLVLDEAVKAGKIQSGDLIAASGFGAGLSWGAALFRWGTVV

SEQ ID NO: 88351 - DNA, 975 bp, Rhodospirillum rubrum ATCC 11170
  CDS (1)..(975): transl_table=11
atgtggcgttccgtgatcgcgggatgcgggtcctacctgcccgcgaacaaggtgaccaacgccaatttggcggagcgggtggagaccaccgatgcttggatccgcgaaaggaccggcattctggtgcgccacttcgccgccgagggggaaaagacctctgatctggcgatggccgccgctagggccgccctggccgatgccggggtcgacgccgccgaggtcgatctgatcgttctggcgaccgccacccccgaccagaccttcccggccaccgccacccgggttcaggccggactgggctgtcggcccggcgcgccggccttcgatatccaggcggtctgttcgggttttctctatgccctcagcgtcgccgacgccctgatcaaggccggtcaggcgcgtaccgcgctggttatcggcgccgaaaccttctcgcgcattcttgatttcaccgaccgcaccacctgcgtgctgtttggcgatggcgccggggcggtggttttgcgggcgacgccctcgaccggcgacggcggcgagcgcggcatcttgtcgacccatctgcatgccgatggccgccaccatgatctgctctatgtcgatggcgggccgtcgtcgaccggcaccgtgggccatctgcggatgcagggccgcgaggttttccgccatgcggtgaccaatctttacgaggtcgtccttgaagccctggcggccaatggccttcaggccgacgccatcgactgggtggttccccatcaggccaatcagcgcatcctcgatggcaccgccaagaagctgggcatcgatccggccaaggtgatcagcaccatcgcccttcacgccaacacctcggccgcctcggtgccgctggcgctttgcgaggcccggcgcgatggccgcattcagcccggtcagttgattttgctcgaagccatgggcggcggtttcacctggggctcggccctggtccggctgtaa

SEQ ID NO: 88352 - protein, 324 aa, Rhodospirillum rubrum ATCC 11170
MWRSVIAGCGSYLPANKVTNANLAERVETTDAWIRERTGILVRHFAAEGEKTSDLAMAAARAALADAGVDAAEVDLIVLATATPDQTFPATATRVQAGLGCRPGAPAFDIQAVCSGFLYALSVADALIKAGQARTALVIGAETFSRILDFTDRTTCVLFGDGAGAVVLRATPSTGDGGERGILSTHLHADGRHHDLLYVDGGPSSTGTVGHLRMQGREVFRHAVTNLYEVVLEALAANGLQADAIDWVVPHQANQRILDGTAKKLGIDPAKVISTIALHANTSAASVPLALCEARRDGRIQPGQLILLEAMGGGFTWGSALVRL

SEQ ID NO: 88353 - DNA, 1017 bp, Moorella thermoacetica ATCC 39073
  CDS (1)..(1017): transl_table=11
gtgccagtccaattaagatcagccgccattaccggtaccgggtcctgcctgccggagagggttctcaccaaccatgaactggagcaaatggtggataccagtgatgaatggattcgtacccgaaccggcatccgggaacgccgcctggccgccgccggcacggctgcttccgacctggctgtaccggcagcatccagggccctggccactgccgggataacagctgcagacgtggatttgatcatcgtagctacggtgacgccggataccctctttccggctaccgcctgcctggtgcaggaacgcctgggcgccaggggggcggcagcctttgacctttcagctggctgcagcggtttcgtctatgccttgggggtcgccagccagtttattgctgccgggatttaccataccgccctggtgatcggggtggaagtcctcagtaaaatcattaactggcaggaccggaatacctgcgtccttttcggtgacggcgccggggccgtcgtcctgcgggctgtcccggcaggcaggggcatcctgggcttagatctgggagccgatggcagcggcggttccctgttaacaatgccggccgggggttcccgcctgccggccagcccggctaccgtccgggagcaactgcataccattcatatgaacggatccgaggtctttaaattcgccgtccggatcatgggcgaagcttccctcaaggccctgcaaaaagcgggtctggcgaaggaagacgttgactttttaattccccaccaggccaatatccggattatcgaggcggccaccaaacgcctggggctggccccggaaaaggtttacgtcaacctggaccgctatggcaacatgtcaagcgcctcgattccggtagcccttgatgaggcctaccgggccggattgttgcagcgggaccataaagtggtcatggtggcctttggagccggcctgacctggggagcagtcgtagttaactgggagctggatccgccgaaaggagattga

SEQ ID NO: 88354 - protein, 338 aa, Moorella thermoacetica ATCC 39073
MPVQLRSAAITGTGSCLPERVLTNHELEQMVDTSDEWIRTRTGIRERRLAAAGTAASDLAVPAASRALATAGITAADVDLIIVATVTPDTLFPATACLVQERLGARGAAAFDLSAGCSGFVYALGVASQFIAAGIYHTALVIGVEVLSKIINWQDRNTCVLFGDGAGAVVLRAVPAGRGILGLDLGADGSGGSLLTMPAGGSRLPASPATVREQLHTIHMNGSEVFKFAVRIMGEASLKALQKAGLAKEDVDFLIPHQANIRIIEAATKRLGLAPEKVYVNLDRYGNMSSASIPVALDEAYRAGLLQRDHKVVMVAFGAGLTWGAVVVNWELDPPKGD

SEQ ID NO: 88355 - DNA, 921 bp, Frankia sp. CcI3
  CDS (1)..(921): transl_table=11
atggaagatcgcctcggtctcgaccgtggcaagatcttcgagaagaccggcatccgcgaacgccgtgtggcagcaccgcacgaggccacctcggatctggctgcccacgccgcacgacaggcgctcgccgcggcaggcatgcaggcccgggacatcgatctgatcgtgcttgccacatccacacccgaccagcccatgcccgccaccgcatgccacgttcaagcatccatcggcgccactcgagcgttcgccttcgatattcaagcggtctgcaccggcttcatctacgcgctgaagtgcgccgactccctacttgccgcggacccggattactccaccgccttggttattggcgccgacacctattcgcgcattcttgactacaccgactaccgcacctcgactcttttcggagacggtgctggcgcggtcgtcctcggcaaggtacctgacggacaaggcctgttggcgagcaccctgtactcggacgggcgcaacaaggacttgatccagatcccaggcggaggcagtcgaatacctccgagccatctcagcatcgagaaacatcagcactacttcatgatgaacggccgggaggttcgtcgcctggcaaccgagaagttggcagcagtcgtgacggaactgtgcacgactgtgggtataacgctgcccgacgttgatctcatcgtgtctcatcaggcgaacggcgtgatgctggccgacctggctgagaacctggggctcgcctcgggaatgttgcatctcaccgtcggcaagtacggcaacaccggtgccgcttccgtgccgatcacactggatgacgctgtacgggccagtcggctccagcgggactccctgctccttatcgtggctttcggcggcggcgcgacgtggggtggagtcgccttgcgctgggcgtag

SEQ ID NO: 88356 - protein, 306 aa, Frankia sp. CcI3
MEDRLGLDRGKIFEKTGIRERRVAAPHEATSDLAAHAARQALAAAGMQARDIDLIVLATSTPDQPMPATACHVQASIGATRAFAFDIQAVCTGFIYALKCADSLLAADPDYSTALVIGADTYSRILDYTDYRTSTLFGDGAGAVVLGKVPDGQGLLASTLYSDGRNKDLIQIPGGGSRIPPSHLSIEKHQHYFMMNGREVRRLATEKLAAVVTELCTTVGITLPDVDLIVSHQANGVMLADLAENLGLASGMLHLTVGKYGNTGAASVPITLDDAVRASRLQRDSLLLIVAFGGGATWGGVALRWA

SEQ ID NO: 88357 - DNA, 978 bp, Novosphingobium aromaticivorans DSM 12444
  CDS (1)..(978): transl_table=11
atgagcgtgcggtccgtaatccgtggcagcggttcggccctgccgcgtcgcgcggtatcgaatgccgaaatgaccaccatggtcgacacgaccgatgaatggatcgtcgagcgcaccggtatccgcaaccgctacatcgcgggcgaaggtgaaaccacctcgacgcttgccaccgaagcggcgcgcaaggcgctcgaagccgccggcgtagacgcctcgcgcatcgaccttatcgttctggcaacggcgacgcccgaccagaccttcccggcgaccgcaacgatcgtccagcacaacctcgggtgcaacggcggcatcgcctttgacgtggcggcggtctgctcgggcttcctttatgcgctcgccactgcggattcgatgatccgttccggcatggcgcgctgcgcgctggtgatcggcgccgagaccatgagccggctgctcgactgggaagatcgcacgacctgcgtccttttcggcgatggtgccggtgcggtcgtgcttgaagctgtcgatgtcgacgaaacggacccgaaggcgcccggcattctggcaacgcgcctccacgccgacggcgcgcacaacgagctgctctatgtcgatggcggtccctccacgacggggacggtcggcaagctgcgcatgaagggccgtgaggtcttccgtcacgccgtcaccaaccttgcgaatgtcctgaaggaagttcttgagacgacggggcatgacgcggaagaaatcgattgggtcgtaccacatcaggcgaacttccgcattctcgacgctaccgcgcgcaagctcgatcttcccgcggacaaggtgatcgtcacggtcgaccatcacgccaacaccagtgctgcctcggttccgctcgcctatgacaccgctgtgcgggacgggcggatcaagcccggcgacctcgtcatgttcgaggcgatgggcggtggattcacctggggcgccagtttggcccgggtgtga

SEQ ID NO: 88358 - protein, 325 aa, Novosphingobium aromaticivorans DSM 12444
MSVRSVIRGSGSALPRRAVSNAEMTTMVDTTDEWIVERTGIRNRYIAGEGETTSTLATEAARKALEAAGVDASRIDLIVLATATPDQTFPATATIVQHNLGCNGGIAFDVAAVCSGFLYALATADSMIRSGMARCALVIGAETMSRLLDWEDRTTCVLFGDGAGAVVLEAVDVDETDPKAPGILATRLHADGAHNELLYVDGGPSTTGTVGKLRMKGREVFRHAVTNLANVLKEVLETTGHDAEEIDWVVPHQANFRILDATARKLDLPADKVIVTVDHHANTSAASVPLAYDTAVRDGRIKPGDLVMFEAMGGGFTWGASLARV

SEQ ID NO: 88359 - DNA, 960 bp, Anaplasma phagocytophilum HZ
  CDS (1)..(960): transl_table=11
atgaaagctgtattgtgtggagtagggtcctttttgccgcataaggctgttacgaatgaggatttgtcgctgattgttgatactacagatgagtggatatttcgtaggactggtataaagcgcaggtatttggtaagtgagggagaagctacgtccgatatggctgtgaaggcggcggaagctgcgctcagtgatgcaggagtttctgcggaggaagtggatcttattgttgttgcgacttctactccggattctactttgccgagttgtgccactatggtgcagggaaagcttggctgtacgaaggcgtttgcttttgacatgaacgctgcgtgctcgggttttgtatatgcgatttctgttgttgatagtttgataaaaactggtcaagttggggttgctttgctaataggcgccgagtctatgtctaagatagtggattggcatgataggtccacttgtgttttgttcggtgatggtgcgggggcatgtgtcttcaagggagatggaaaagcctcaaataggggtattgtcgatacagcgctgtatacggatgggacactgggtgatattctgtacacggatggaggggttgcttctacctgtacggcaggccatatacgcatgaagggaacggttttatttgagcacgctatcttgaaattgtcatcatcagttgaagggttgcttaaaaagaatgctataggcattgatgcgattgattggtttattcctcatcaggcaaatgtgagaattgtagacttggttgccaaaaggctcggtatttctcaggataaggttgtgcttggaataggtgatcacgcaaatacttcagctgcgtcaattcctttggctatgagtgatgcaaggagagatggtaaattgcaggaagggcagcttgtattacttgcggctataggcgcgggggtgacttggggtgctagtttgataaggctgtaa

SEQ ID NO: 88360 - protein, 319 aa, Anaplasma phagocytophilum HZ
MKAVLCGVGSFLPHKAVTNEDLSLIVDTTDEWIFRRTGIKRRYLVSEGEATSDMAVKAAEAALSDAGVSAEEVDLIVVATSTPDSTLPSCATMVQGKLGCTKAFAFDMNAACSGFVYAISVVDSLIKTGQVGVALLIGAESMSKIVDWHDRSTCVLFGDGAGACVFKGDGKASNRGIVDTALYTDGTLGDILYTDGGVASTCTAGHIRMKGTVLFEHAILKLSSSVEGLLKKNAIGIDAIDWFIPHQANVRIVDLVAKRLGISQDKVVLGIGDHANTSAASIPLAMSDARRDGKLQEGQLVLLAAIGAGVTWGASLIRL

SEQ ID NO: 88361 - DNA, 972 bp, Francisella tularensis subsp. holarctica
  CDS (1)..(972): transl_table=11
atgtttgcacaaatattaggtacaggaagttacttgcctgaaaaaatcttaactaatgaagatataagtaaatttgttgatacttcagatgagtggatcaaacaaagagtcggcatagaaagacgccattgcgccagtgaagcagaaacgacaagttacatggctacacatgcagctaaaaaggctcttgaagcggcacaattaactgctaacgatattgatatgataattgttgcaacaagtactcctgatttcataatgccttcaacagcgtcaatggttcatcagaatctacaaatagataatttcaaggtacgttgttttgatatatcagctgcttgtagtgggtttgtttatgctttggatatcgctaaacaatatatagagacaggtgtttcaaaaaacattctcgtaattggtgctgaaaaaatgacgcgggtcctagattggaatgaccgttcaacatgtgtactttttggtgatggtgctggtgctgttgtaatttcaacaagccaagaaaaaaagatattatcatctttactttttacagatggttcatgcttagatatgcttaatgtcccaaataatttaccaacttcaagaggacaagctataaatattgatccttacttaataatggaaggtaataaggtttttaaatttgctgtttcacgcttatcttcattagctgatgagttaatacaagaagctggaataaaagctagtgatattgattggcttgtacctcatcaagcaaactatagaatactaaactcaactgccaaaaaaattgacatgccaatgtctaaagttgttacaacactacaagatcatggtaacacttctgcagcatctatcccattagccttagatcatgctgtaagaacacatcaaattaaacctggcgatacaattatctctgaagcattcggagctggatttgtctggggtggttttatcgcgaagatataa

SEQ ID NO: 88362 - protein, 323 aa, Francisella tularensis subsp. holarctica
MFAQILGTGSYLPEKILTNEDISKFVDTSDEWIKQRVGIERRHCASEAETTSYMATHAAKKALEAAQLTANDIDMIIVATSTPDFIMPSTASMVHQNLQIDNFKVRCFDISAACSGFVYALDIAKQYIETGVSKNILVIGAEKMTRVLDWNDRSTCVLFGDGAGAVVISTSQEKKILSSLLFTDGSCLDMLNVPNNLPTSRGQAINIDPYLIMEGNKVFKFAVSRLSSLADELIQEAGIKASDIDWLVPHQANYRILNSTAKKIDMPMSKVVTTLQDHGNTSAASIPLALDHAVRTHQIKPGDTIISEAFGAGFVWGGFIAKI

SEQ ID NO: 88363 - DNA, 996 bp, Desulfitobacterium hafniense Y51
  CDS (1)..(996): transl_table=11
atggttagtgttggaatcgtgggcacaggttcctatgtacccgataaggttttgacgaattttgatctggagcagatggtggacaccaatgatcaatggatagtgagcaggacggggattaaggaacggcacattgccgagcctgagactccggtatccgagctttgctaccaggcggcggtgcgggccttagaggatgccaaactcgctccggaagagctggatttagtgatcgtcgctactataacccctgattttgtcttcccagccacagcttgcctggtggcggaacgcctgggagccaaaaaggcggccggttttgacctgcaggccgcctgcacgggatttttgtacggagtagccactgccgctcaattcatcgctaccggtatctataaaaatgccctggtgattggcggggaaaccttaagcaagatcttaaactgggaagaccgggggacctgcatcctgtttggagacggagccggtgcggcagtgctgcagcaggtggaagaggggtacggattcctaggctatgacctgggtatggatggtgcgggaggcagccttttgaccatgccgggagggggctccatgcaccctgcttccgcggaaaccgtggccaagaaaatgcacactatccagatggccggcagtgaagtgttcaaatttgccgtccgcatcatgggggagaccgccttaaaagctctggacaaggcaggtttagggatcggcgatgtggattgcctgattccccatcaggccaacacccgcattgtggatgcggcagtcaaacggctggggattgatgccgggaaagtcgtggtcaacctggaccgctatgggaatatgtcggcggcctccatcccggtggctctggatgaagcagcacggagcggccgtttaaactatggagatattatggtcatggtgggcttcggcggaggcttaacctggggagccgctgttgtgaagtggtccaagagaggggtttag

SEQ ID NO: 88364 - protein, 331 aa, Desulfitobacterium hafniense Y51
MVSVGIVGTGSYVPDKVLTNFDLEQMVDTNDQWIVSRTGIKERHIAEPETPVSELCYQAAVRALEDAKLAPEELDLVIVATITPDFVFPATACLVAERLGAKKAAGFDLQAACTGFLYGVATAAQFIATGIYKNALVIGGETLSKILNWEDRGTCILFGDGAGAAVLQQVEEGYGFLGYDLGMDGAGGSLLTMPGGGSMHPASAETVAKKMHTIQMAGSEVFKFAVRIMGETALKALDKAGLGIGDVDCLIPHQANTRIVDAAVKRLGIDAGKVVVNLDRYGNMSAASIPVALDEAARSGRLNYGDIMVMVGFGGGLTWGAAVVKWSKRGV

SEQ ID NO: 88365 - DNA, 957 bp, Methylobacillus flagellatus KT
  CDS (1)..(957): transl_table=11
atgaccatctattcgcgcatcttgggaacgggcagctacttgcctgagaaaatactgaccaatgctgacctggagcgcatggttgacacaacggatgagtggatttatgcccgcactggcatccgccagcgccatattgctgcagagaaccagtttaccagtgacctggcttttcatgccgcacagcgtgcattggaagccgcgggtgtcgaagttgacgccatagacctgattattgttgccactacgacgcctgatcacgtattcccaagtacggcctgcctgttgcagcataaactgggtaatcgtggtgcgcctgcattcgatgtgcaggcggtatgcagcggcttcatttatgcggttgccactgccgacagctttatacggagtggtgcagcacgcacggcgcttgtggtgggcgccgaaaccatgtccaggatcactgactggactgaccgtagcaactgtatcctttggggagatggtgccggcgcggtagtgatgggggccagtgaccagcccggaatcatttccactcacctccatgccgatggcagctatacgcaattgcttaatgtgccaagcggtgtttcgaatccgggggcggagcggaccatccatatggaaggcaacgccgtgttcaagattgccgtgaatacattggatgccattgtcgatgaaaccctggcggctaacggcatgcaaaaatcggacatcgattggctggttccgcaccaggccaatatccgcattttgcaatcgaccgcacgcaagctcggtatggacatggcccgagtggttgtgaccgtggataagcacggcaatacttcagctgcatctgtacccctggccctggatgttgccgtacgtgatggtcgcatcaagcatggtgaaacggtcttgatggaagcctttggtggcggcttcacctggggctccatactcctcaagttttaa

SEQ ID NO: 88366 - protein, 318 aa, Methylobacillus flagellatus KT
MTIYSRILGTGSYLPEKILTNADLERMVDTTDEWIYARTGIRQRHIAAENQFTSDLAFHAAQRALEAAGVEVDAIDLIIVATTTPDHVFPSTACLLQHKLGNRGAPAFDVQAVCSGFIYAVATADSFIRSGAARTALVVGAETMSRITDWTDRSNCILWGDGAGAVVMGASDQPGIISTHLHADGSYTQLLNVPSGVSNPGAERTIHMEGNAVFKIAVNTLDAIVDETLAANGMQKSDIDWLVPHQANIRILQSTARKLGMDMARVVVTVDKHGNTSAASVPLALDVAVRDGRIKHGETVLMEAFGGGFTWGSILLKF

SEQ ID NO: 88367 - DNA, 1002 bp, Acidobacteria bacterium Ellin345
  CDS (1)..(1002): transl_table=11
ttgacttctgtacgtcgcgccaagattacggcgcttggaacctacgttccaccccgcgtcctctcaaactttgaccttgaaaagatggtggataccaccaaccagtggatcctcgaacggaccggcattcgcgaacgtcatctcgtggataagggcgttgctgccagcgacttagccgtcgaggccgcgaagaagtgtctggccaaccgcggcatagaggccgcggaagtcgaatgcatcgttgtcggcaccgtgaccccggacatgatgtacccctccaccgcttgcctggtgcagcacaaactcggcattcccaatgcctggggcttcgacgtatccgccggatgctcgggatttcttttctcgctgaccaccggagccaagttcattgagagcggccagtacaagaaggtccttgtgatcggctccgacgtgaactcctcgatgatcgactacaccgaccgcgccacctgcatcatcttcggcgacggcgccggagcggtcctgctggaaccgacggaagacggcgaagacgtcggcgtcatggaccacattcatcaggtcgaaggtgtcggtggacagtacctctacatgcccggcggcggcagtttgaacccggcatcgcacgaaacgattgaccagaaaatgcattatgttcatcaagatggacaaaatgtcttcaagtatgccgtgaagaaaatgtcggagatgaccgagaaggtcctaaagcgcaacagcttgaccggcaccgatgtggactgcttcatcgcccatcaggccaacaagcgaatcattgtcgccaccgctgagcgcctgaaaatgcccatggagaaggtcatcatcaacatcgagaagtacggcaacactacggctggaaccattcctttggccatgcagacggcactcgatgaaggcaaactgaagaagggcagcaacgttctacttgccgccgtcggtgcgggattcaccagcggcgccacgctcctgcgctgggcgttctaa

SEQ ID NO: 88368 - protein, 333 aa, Acidobacteria bacterium Ellin345
MTSVRRAKITALGTYVPPRVLSNFDLEKMVDTTNQWILERTGIRERHLVDKGVAASDLAVEAAKKCLANRGIEAAEVECIVVGTVTPDMMYPSTACLVQHKLGIPNAWGFDVSAGCSGFLFSLTTGAKFIESGQYKKVLVIGSDVNSSMIDYTDRATCIIFGDGAGAVLLEPTEDGEDVGVMDHIHQVEGVGGQYLYMPGGGSLNPASHETIDQKMHYVHQDGQNVFKYAVKKMSEMTEKVLKRNSLTGTDVDCFIAHQANKRIIVATAERLKMPMEKVIINIEKYGNTTAGTIPLAMQTALDEGKLKKGSNVLLAAVGAGFTSGATLLRWAF

SEQ ID NO: 88369 - DNA, 972 bp, Mesorhizobium sp. BNC1
  CDS (1)..(972): transl_table=11
atgatcagatccaccgtgcgtggtgtaggcgcggccctgccacgccgagtcgtgacgaacaaggacttggagacgcggctggaaacgtccgacgaatggatcgttcaacggaccgggatccgccagcgacatattgcatcggacgacgagacgacagcctcgctcggcgaggctgcggcactccgcgccttggatgccgcgggtcttgcccctgctgatatcgatttgatcgtggtggcgacgtcgacgcccaacaacaccttccccgccaccgcggtggaaattcaggagcggctcggtatacgccagggcttcgccttcgacatgcaggcggtctgcagcggtttcgtctacgcggtcaccacggccgacctttacattcgcggcggtatggccaagcgcgcgctggtcatcggggcggaaacgttctcgcgcatcctggactggacggatcgtacgacctgcgttctgttcggcgatggagccggggctatcgtcctggaagcggaggaagggcagggggacataagcgatcgcggcatacttgccgaggcgttgcgctccgacggatcacacaaggaaaagctttatgtggacggggggccctcgaccacacgtaccgtggggcacctgcggatgcaggggcgtgaggtgttcaaacatgctgtcggaatgatcacggatgtgatcgaggacgttttcggtcaggccggaatcacggccgaagacatcgactggtttgtctcccaccaggcaaacaagcgaatcatcgacgcttccgcgaagaaactgggcattgcggaagaaaaggtggttatcaccgtagatctccacggcaacacttccgcagcttccgttccgctggcgctcaaccacgcggtatcacagggcaagatccagaagggggatctggtgcttctggaagccatggggggcggcttcacctggggcgcggtgctgctgcggtggtag

SEQ ID NO: 88370 - protein, 323 aa, Mesorhizobium sp. BNC1
MIRSTVRGVGAALPRRVVTNKDLETRLETSDEWIVQRTGIRQRHIASDDETTASLGEAAALRALDAAGLAPADIDLIVVATSTPNNTFPATAVEIQERLGIRQGFAFDMQAVCSGFVYAVTTADLYIRGGMAKRALVIGAETFSRILDWTDRTTCVLFGDGAGAIVLEAEEGQGDISDRGILAEALRSDGSHKEKLYVDGGPSTTRTVGHLRMQGREVFKHAVGMITDVIEDVFGQAGITAEDIDWFVSHQANKRIIDASAKKLGIAEEKVVITVDLHGNTSAASVPLALNHAVSQGKIQKGDLVLLEAMGGGFTWGAVLLRW

SEQ ID NO: 88371 - DNA, 999 bp, Cytophaga hutchinsonii ATCC 33406
  CDS (1)..(999): transl_table=11
atgcaactacattcacaacttttaggaacgggacattacgtacccgaacagatcgtaacgaacaacgaccttactgctttcatggaaacctccgatgcctggatccaggaacgcacaggaattaaggaacgccgcttctttaaagaaggtgttgatacggtttccaacatgggcgcaaaagctgcgcagatggcgttagcaaacgcaaagattgaagcgaaagaaattgacctgattgtgttcgcaaccttaagtccggattatgcattccccggtgcaggtgttttattgcagtgcgaattaggtgtgccgaacattccggcgctggatatccgtcagcagtgcgccggctttatctatgccctctctgtggccgaccagttcattaaaacaggcatgtataaaacggtgctggttgtaggaagtgaaattcaatccaacatcatggaactgtctgatcgtggccgcaatatggcggtgatctttggtgacggtgcgggcgcggttgtattaaaagcaacaacggaaaacaagggcgtcctttcaacgcatttacatgccgatggtacgcatgcagaagaactcatgctggaacacccgggcagcagaagcaaaacgcgtgtaaccactgaaatgattgagaatggagcgctgctacctgtgatgaacggacaaggtgtattcaaacaggcggttcagaaattccccgaagtaattaaagaagcgttggatgcaaataatttacaaacaaccgatatcagtttattgatcccgcaccaggccaatctgcgcatcgcagagtatgtgcagaagcaattgaagctggaagaccatcaggtattcaataacattcagaaatacggcaatacgacggcagcatctatcccgattgcattgagcgaagcggtacaggaaggcagattgaaatccggtgacctgctttgtttggcagcattcgggagcggctttgtttgggcgagtgcattggtgcggtattaa

SEQ ID NO: 88372 - protein, 332 aa, Cytophaga hutchinsonii ATCC 33406
MQLHSQLLGTGHYVPEQIVTNNDLTAFMETSDAWIQERTGIKERRFFKEGVDTVSNMGAKAAQMALANAKIEAKEIDLIVFATLSPDYAFPGAGVLLQCELGVPNIPALDIRQQCAGFIYALSVADQFIKTGMYKTVLVVGSEIQSNIMELSDRGRNMAVIFGDGAGAVVLKATTENKGVLSTHLHADGTHAEELMLEHPGSRSKTRVTTEMIENGALLPVMNGQGVFKQAVQKFPEVIKEALDANNLQTTDISLLIPHQANLRIAEYVQKQLKLEDHQVFNNIQKYGNTTAASIPIALSEAVQEGRLKSGDLLCLAAFGSGFVWASALVRY

SEQ ID NO: 88373 - DNA, 975 bp, Clostridium perfringens ATCC 13124
  CDS (1)..(975): transl_table=11
atgaaaaatgctaaaatgataggctttggcttatatacacctaaaaacttagtagaaaatgaaagattacaagaatttttagagactagcgatgagtggattagaactagaaccggaatagaaagaagatatatttcattagatgaaaacacttctgatttagcagtagaggctagtaagaaagctttaaatcaagcagggttaagtgctgaagatatagatttaataatattagctactgtaactccagataacttcactccatctacagcttgtattgtgcaagataagttaggagctaaaaatgcatgggcctttgatataaatgcggcatgcactggatttatatatgcacttaaactaggcagatctttaataagatcaggtgaggctaagaatgccttaataataggtgcagaaactttatcaaaagcactaaactgggaagatagaggaagttgtgttcttttcggagatggagcaggagctactgttcttacaagtacagaagaagattgtggaataaaatgtgtaaatgtaaaatctgatggttctaagggagattcccttgttattcaggggttacctctaaatagtccatttaaagatggaagagaagtttctgaaaattacataaacatgaatggaagagagatatttaagtttgcaacaaaagtaatggaagaaagtatagtagagattttagaaaaagaaaacataaaaatagaagatatagatgctataattcctcatcaagcaaatttaagaattatagattacgtagttaaaagattaggaataccaagagaaaagttcataacaaatttacagaattatgggaatacatcaggggcaagcattccaatagccctttgtgaatcaattaatgaaggtaatttgaaaaaaggagataacataataatggttggctttggtggaggacttacttggggagccgctttaattaagttataa

SEQ ID NO: 88374 - protein, 324 aa, Clostridium perfringens ATCC 13124
MKNAKMIGFGLYTPKNLVENERLQEFLETSDEWIRTRTGIERRYISLDENTSDLAVEASKKALNQAGLSAEDIDLIILATVTPDNFTPSTACIVQDKLGAKNAWAFDINAACTGFIYALKLGRSLIRSGEAKNALIIGAETLSKALNWEDRGSCVLFGDGAGATVLTSTEEDCGIKCVNVKSDGSKGDSLVIQGLPLNSPFKDGREVSENYINMNGREIFKFATKVMEESIVEILEKENIKIEDIDAIIPHQANLRIIDYVVKRLGIPREKFITNLQNYGNTSGASIPIALCESINEGNLKKGDNIIMVGFGGGLTWGAALIKL

SEQ ID NO: 88375 - DNA, 951 bp, Haemophilus somnus 129PT
  CDS (1)..(951): transl_table=11
atgtacagtagaattttagcaaccggtagttatataccggctaatatcaggactaatgctgatttagaaaaaatggtagagacatctgatgaatggattactactcgttccggtataaaagagcgtcgtatcgccggtgaaaatgaaacagttgccacaatgggatttaaggccgctaaaaatgcacttcagttagccaatatttgccctaacgatatcgatttggttttggttgcgactaccagccactcctatgcttatccaagtgctgcatgccaaattcaaggtatgttggacattgatgatgcaatttctttcgatttggcggcagcttgcacggggtttatctatgctttaagtgttgcagatcaattcattaaaacaggtaaagtaaaaaaagctttagtgattggtgcagatattaattctcgtaagttagatgaaacggatcgtagcactgttattttatttggtgacggtgctggtgccgtgatcttggaaagcagcgatattgaagggattatttctactcatttacatgcttctttagataaaagtaacgccttaattcttcctcaaactcaacatggtgaagcacaatccggttatatccaaatgcaagggaatgcaacttttaaacttgcagtacgagaattatctaatgtagtagaagaaactttacgtgataatcacttagacaaagctgatttagattggttggtacctcatcaagcaaacttacgtattatcacggcaactgctgaaaaattgaatatgtctttagatcaagtggtaattactttagacaagtacggtaatacaagtgcggcgacagtgcctgtagcattggatgaagctgtacgtgacgggcgtattaagcgtggtcaattattattattagaagcatttggtggcggttggacttggggttctgcgttggttcgtttctaa

SEQ ID NO: 88376 - protein, 316 aa, Haemophilus somnus 129PT
MYSRILATGSYIPANIRTNADLEKMVETSDEWITTRSGIKERRIAGENETVATMGFKAAKNALQLANICPNDIDLVLVATTSHSYAYPSAACQIQGMLDIDDAISFDLAAACTGFIYALSVADQFIKTGKVKKALVIGADINSRKLDETDRSTVILFGDGAGAVILESSDIEGIISTHLHASLDKSNALILPQTQHGEAQSGYIQMQGNATFKLAVRELSNVVEETLRDNHLDKADLDWLVPHQANLRIITATAEKLNMSLDQVVITLDKYGNTSAATVPVALDEAVRDGRIKRGQLLLLEAFGGGWTWGSALVRF

SEQ ID NO: 88377 - DNA, 990 bp, Trichodesmium erythraeum IMS101
  CDS (1)..(990): transl_table=11
atgacaaatataggcgtttctataattggaagtggttctgcaataccaaaaacatctctagataatcaacaattatcccaaatagtagagacttctgacgaatggatcatttctcgcactggaattaataagcgacagctagtagatacaacagaatcattatgtagccttgctactcaagcatctctagcagctcttaaccaagcaaatattactcctaaagatattgacctaattattctggctacatctactcctgatgacttatttggtactgcatgtaaaattcaatgggagttgggcgcacagaaagcagttgcttttgacataactgtggcttgttctggttttctctttgctctggttacaggagcgcaatttattcgtaatggagtttatcaaaatgttttgttaattggggcagatattctctcgcgttgggtagactgggaagaccgacggacttgtgttttatttggagatggggcaggggcagtacttttacaagcttcagaaagcgatcgcctgctgggttttgaacttggtagtgatggtagtcaaaatagctgtttaagtctttcttaccaaccccaagaaaagagaataattgagggagtaactgttagtcaaggtacttatcaaccaatagctatgaatggtaaagaagtctatcgttttgtagtacaaaaagtaccggaagctatagaaaaagctttattaaaagctaatattgatattgataaacttgactggttgctattacaccaagctaaccaaagaatccttgatgctgttgctaatagattgaatattccaccagaaaaagttattagtaatctacgaaattatggcaatacttctgctgcttctataccgctagctttagatgaagttgttagggaaggacttgttaaatcaggagacattattgctgcttctggctttggggctggattaagttggggtgcagtaatttttcaatggaactga

SEQ ID NO: 88378 - protein, 329 aa, Trichodesmium erythraeum IMS101
MTNIGVSIIGSGSAIPKTSLDNQQLSQIVETSDEWIISRTGINKRQLVDTTESLCSLATQASLAALNQANITPKDIDLIILATSTPDDLFGTACKIQWELGAQKAVAFDITVACSGFLFALVTGAQFIRNGVYQNVLLIGADILSRWVDWEDRRTCVLFGDGAGAVLLQASESDRLLGFELGSDGSQNSCLSLSYQPQEKRIIEGVTVSQGTYQPIAMNGKEVYRFVVQKVPEAIEKALLKANIDIDKLDWLLLHQANQRILDAVANRLNIPPEKVISNLRNYGNTSAASIPLALDEVVREGLVKSGDIIAASGFGAGLSWGAVIFQWN

SEQ ID NO: 88379 - DNA, 1050 bp, Synechococcus sp. CC9311
  CDS (1)..(1050): transl_table=11
ttgactgacgccactgacagcgcttccacattggctggatctcccccacccttccgtggcatggctctggtcgcaagtggcagcgcccaggcgaaccaaaccatcagcaatgctgccctcagcgagcgggtggagaccagtgacgaatggattcgcacccgcaccggaattcagtctcggcgcgtcagcactccggacgaatcgctgaacgatctggcgatccgggctgggcaacaggccctggccatggcccagtgggaacctgacagcctcgacctggtgttactcgccacgtccacccctgatgacctgtttggatcagcaccaagagttcaggccggattaaaagcgcacaacgccgttgcgtttgacctcacggctgcctgcagcggctttctatttgcgctcgtgacagccgcccagtacctgcgaacaggcgccatgcaacgggtgctggtgatcggcgccgaccagttaagccgctttgtcgactgggacgacagaagcacctgtgtgctcttcggtgacggggctggcgctgttgccctcgaagccacctctgcagagtccgatggcttactgggtttccggttgcgcagcgacggcagccgcggccattctctgaccttgccgcagatccctaccagtcttcctctggtcaacaccacccgccatcaatgcggcggctatctgccgattcagatgaatggacaagaggtatacaaatttgccgtgcgcgaagtgccagccatcctcaagacgctgctagagcaaacagccacaaccccagaccaattggactggctgctgcttcatcaagccaaccagcgcattttagatgcagtagcggatcgattttccatccctcactccaaggtcttgagcaacttggcgaactacggcaacacctcagcctccacgatcccgctcatgcttgacgaagccgtgcgcgacgggcgcgtagcacctggtcatcttttagcgagtagtggctttggggctggcctcagttggggggctgcattgttgcgttggcaaggtcccgcctag

SEQ ID NO: 88380 - protein, 349 aa, Synechococcus sp. CC9311
MTDATDSASTLAGSPPPFRGMALVASGSAQANQTISNAALSERVETSDEWIRTRTGIQSRRVSTPDESLNDLAIRAGQQALAMAQWEPDSLDLVLLATSTPDDLFGSAPRVQAGLKAHNAVAFDLTAACSGFLFALVTAAQYLRTGAMQRVLVIGADQLSRFVDWDDRSTCVLFGDGAGAVALEATSAESDGLLGFRLRSDGSRGHSLTLPQIPTSLPLVNTTRHQCGGYLPIQMNGQEVYKFAVREVPAILKTLLEQTATTPDQLDWLLLHQANQRILDAVADRFSIPHSKVLSNLANYGNTSASTIPLMLDEAVRDGRVAPGHLLASSGFGAGLSWGAALLRWQGPA

SEQ ID NO: 88381 - DNA, 960 bp, Shewanella sp. MR-7
  CDS (1)..(960): transl_table=11
atgcatacaaaaattctcggaactggtagttatctgccagtgcaggtgcgtagcaatcaagatttggaaaaaatggtggaaaccagtgaccaatggattgttgaacgtacaggtatttcagaacgtcgcatcgcggcgcaagacgaaactgtctcaactatgggctatcaggcggcattaaaggcgctcgagatggcaggcatagaagcatcagagttagatatgatcatttgtggcaccaccagtgcggcaaatgcgttccctgcggcggcctgcgaaatccaagccatgctcggcgtacataccattccagcctttgatattgcggcggcttgttcaggtttcgtgtatgccttatctgtggcggaccaattcgttaaaaatggtaccgcgaaaaaagtattagtgattggtgctgacgtattatcccgtctgtgtgagccagaagatcgtactactatcattctgtttggggatggtgcaggtgctgcggttatcggcgcttccgatgaaccagggattatttcaacccatatttatgccgatggtcgtcaaggtgacttactcaagtgtgccttcccacctcgtcagggggagacctctgaagcggttggctttatgaccatgaaaggtaatgacgtctttaaagtggcggtgactcagttatcccatgtcgttactgaaacattgcgcctgaataatatcgataagtcggaaatcgactggttggttccccatcaggctaacttccgcattattaatgccacagcgaaaaagctagatatgagcttagataaagtggtgttaacccttgccaaacacggtaatacctcggcggcttcggtaccgattgccttagacgaagccgtgcgtgatggccggatccaacgtggccagctattgctgcttgaagccttcggtgccggttttgcgtggggcagtgcgctcgtccgtttttaa

SEQ ID NO: 88382 - protein, 319 aa, Shewanella sp. MR-7
MHTKILGTGSYLPVQVRSNQDLEKMVETSDQWIVERTGISERRIAAQDETVSTMGYQAALKALEMAGIEASELDMIICGTTSAANAFPAAACEIQAMLGVHTIPAFDIAAACSGFVYALSVADQFVKNGTAKKVLVIGADVLSRLCEPEDRTTIILFGDGAGAAVIGASDEPGIISTHIYADGRQGDLLKCAFPPRQGETSEAVGFMTMKGNDVFKVAVTQLSHVVTETLRLNNIDKSEIDWLVPHQANFRIINATAKKLDMSLDKVVLTLAKHGNTSAASVPIALDEAVRDGRIQRGQLLLLEAFGAGFAWGSALVRF

SEQ ID NO: 88383 - DNA, 972 bp, Alkalilimnicola ehrlichei MLHE-1
  CDS (1)..(972): transl_table=11
gtgagctacgcgcgtatcatcggcaccggcagctacctgccggacgaagtgattaccaatcacgatctcgagcggctcatcgacacctccgatgagtggatccgcgagcgcaccggtatcaccgagcgccgccgcgtggcgccggatcaaacctgcggtgacttggccgaggaggccgcccggcgtgccctggaggcggccgatgtctcgctgagcagcatcgatctggtgatcgtcggcacctgcacccccgatcgggtcttccccagcaccgcctgcctgctgcaggagcggctggggatgcggcacgggtcgctggccttcgacctgtccgccgcctgctccggtttcgtctatggcctcggtgtcgccgatcagttcttccggaccggtgccgtgcgccgcgccctggtgatcggcgccgagaccatgacccggatcctggactggaacgatcgcgccacctgtgtgctgttcggtgacggggccggcgccgtcgtcctggaccgcagtgaggaaccgggcattctctccacccatctgcactcggacgggcgctatcaggacctcctcggggtgccgtgggggccggggcaggggtatgagaagcgcgacgccctggggccctacatcaccatgcagggcaacgaggtcttcaaggttgcggtgcgcaccctcagccgtattgtcgatgagagcctcgccgccaacgggctggagaagcgcgacatcgactggctggtgccccaccaggccaacatccggatcatccaggccactgcccgcaagctggagatgcccatggagcgggtggtggtcaccgtggacaagcagggcaacacctcggcggcctccatccccatggccttggacacggccatccgtgacggccggatcaagcggggcgatttgctcctgctggaggccttcggtggcggctttacctggggctccgccctgatccggtactaa

SEQ ID NO: 88384 - protein, 323 aa, Alkalilimnicola ehrlichei MLHE-1
MSYARIIGTGSYLPDEVITNHDLERLIDTSDEWIRERTGITERRRVAPDQTCGDLAEEAARRALEAADVSLSSIDLVIVGTCTPDRVFPSTACLLQERLGMRHGSLAFDLSAACSGFVYGLGVADQFFRTGAVRRALVIGAETMTRILDWNDRATCVLFGDGAGAVVLDRSEEPGILSTHLHSDGRYQDLLGVPWGPGQGYEKRDALGPYITMQGNEVFKVAVRTLSRIVDESLAANGLEKRDIDWLVPHQANIRIIQATARKLEMPMERVVVTVDKQGNTSAASIPMALDTAIRDGRIKRGDLLLLEAFGGGFTWGSALIRY

SEQ ID NO: 88385 - DNA, 972 bp, Hyphomonas neptunium ATCC 15444
  CDS (1)..(972): transl_table=11
atgggaaggcgcagctttatccgtggaaccggcagctacctgcctgagcgcgttctgacgaatgacgaactctcggaaatggttgagaccaccgatgcgtggattcaggaacgcaccggcatcaagaagcgccatgtggcagccgatggcgagctgacgtccgacattgccgtgcacgcagcgcggcgcgcgctggaggcggcgggcatgcaggccagcgagatcgacctgatcgtgctggcgacgacgacgccggaccagaccttcccggcaacggcgacggcggttcaggcaaagctcggcaccgggccgggcgcagcgtttgatgttcaggcggtgtgttcgggcttcctgttcgcgctggcgacagctgactcgctgatgaagcaggggctgttccacaaggcgctggtgatcggcgcggagacgttcacgcgcatcatcgactggtcggaccggggcacctgcgtgctgtttggcgatggcggcggggcgatcgtgctggaatgcgtggaatgggacggggccgatgacgccggcgtcatcacccaccatgtacgcacggacgggacgaaatcgaacctgctctatgtggacgggggcgtcagctccaccggcaccatcggccatgtgcggatggaagggaacaaggtgttcaagcacgcggtgaccaacatctccgcagccatcgaggcggtgttgacggaaaccgggctgacctcggcggacatcgactggttcgtgccccaccaggccaacaagcgtatcctcgacggggttgccaaaaagatgagcattccggaggagaaggtggtcatcacggtgagcgagcatgccaacacctcggcagcctcgatcccgctggcgctggaccatgtggtgcgctcaggccgtgcaaaaccgggcgatctgatcctctccgaggcgatgggcggcggcttctcctggggtgccagcctgttccggctttga

SEQ ID NO: 88386 - protein, 323 aa, Hyphomonas neptunium ATCC 15444
MGRRSFIRGTGSYLPERVLTNDELSEMVETTDAWIQERTGIKKRHVAADGELTSDIAVHAARRALEAAGMQASEIDLIVLATTTPDQTFPATATAVQAKLGTGPGAAFDVQAVCSGFLFALATADSLMKQGLFHKALVIGAETFTRIIDWSDRGTCVLFGDGGGAIVLECVEWDGADDAGVITHHVRTDGTKSNLLYVDGGVSSTGTIGHVRMEGNKVFKHAVTNISAAIEAVLTETGLTSADIDWFVPHQANKRILDGVAKKMSIPEEKVVITVSEHANTSAASIPLALDHVVRSGRAKPGDLILSEAMGGGFSWGASLFRL

SEQ ID NO: 88387 - DNA, 972 bp, Rhizobium leguminosarum bv. viciae 3841
  CDS (1)..(972): transl_table=11
atgatccgttcagtggttcgcgggttcggagccgcacttccgaagcgcgtgatgaccaatcgtgacatggaggccatcgtcgacacatcagacgaatggatcgtccagcgcaccggcatccgccagcgttatgtcgccggcgatgacgaaacgacggcgtcactcggcgaggccgccgcacgcgcagcccttgccaatggcggcctgacgcctgccgatatcgatctcgtcatctgtgccacctcgacgccggataacacctttccggcaacgtcggtcaacatccagaaccgcctcggcatgagccacggcttcgccttcgacgtccaggccgtatgcaccggtttcgtctatgcggtgacgactgccgatgcctatatccgcggcgggcttgccaagcgcgttctcgtcatcggcgctgaaactttttcgcgcattctcgactggaacgaccgcaccacctgcgtgcttttcggcgacggcgccggcgcgatcatactcgaagcgacagaaggcgagggtaccgttgccgatcgcggcgtgctgaccgcacatctgcgttccgacggctcgcacaaggaaaagctttatgttgacggcggaccgtcgacgacgggcactgtcggcaagctgcgcatggaaggccgcgaggtcttcaaatatgccgtcggcatgatcaccgacgtcatccaggcggctttcgattcaaccggcaccaccgccgatgacctcgactggctggtgccacatcaagctaatcgccgcatcatcgacgggtcggcgaagaagctgaacatcgatgccgcgaaggtcgtcatcaccgtcgacctgcacggcaatacatcggctgcctcgatcccgttggcgcttgcgaccgctgccggcgacggccgcatcaagaagggcgacctggtgatgctcgaagcaatgggtggcggctttacctggggtgcggttctgctgcgctggtag

SEQ ID NO: 88388 - protein, 323 aa, Rhizobium leguminosarum bv. viciae 3841
MIRSVVRGFGAALPKRVMTNRDMEAIVDTSDEWIVQRTGIRQRYVAGDDETTASLGEAAARAALANGGLTPADIDLVICATSTPDNTFPATSVNIQNRLGMSHGFAFDVQAVCTGFVYAVTTADAYIRGGLAKRVLVIGAETFSRILDWNDRTTCVLFGDGAGAIILEATEGEGTVADRGVLTAHLRSDGSHKEKLYVDGGPSTTGTVGKLRMEGREVFKYAVGMITDVIQAAFDSTGTTADDLDWLVPHQANRRIIDGSAKKLNIDAAKVVITVDLHGNTSAASIPLALATAAGDGRIKKGDLVMLEAMGGGFTWGAVLLRW

SEQ ID NO: 88389 - DNA, 972 bp, Leuconostoc mesenteroides subsp. mesenteroides ATCC 8293
  CDS (1)..(972): transl_table=11
atggaacaattgaaaatcgttgcttcagcacgtcaaattccagatcgacaagtgacgaatcaagagctcagcacaatgatggaaactgatgatgaatggatctatactcggacaggtattcatcagcgtaatgtcgtgacaacggaaaacactagtgatttagccagtgaagtggcaaagaaaatattggcgaaaagtggtgtttcaccagacagtattgactttatcattgttagcacgatgtcaccagacagcctatcaccaagcacggcagcaattgtccaggctaacattggtgccactaatgcattcgcattcgacttaagcgcagcttgttctggttttgtttatggattgagtgtcgcctcgagtctgttaatgtcacgctatcaacgtggattgattattggtgcagaagtgttatcgaaattagttgattggaaagatcgaactacggcagttttgtttggtgatggagctgcaggggtacttgtggaacgaacacaggataatgttggacttttaggtgaagaacttaggacttttggtgaaaagggtgacaatttagtagctggtaggtttgcgaacacaaacccattttcggaaaatattagcccgttagacccttattttcatcaaaatggtcgggaagtatacagctttgcaactcgtgaggttcccgaagcactccaagcagccttagagacagctcaagttacggctgacgatgttgattattatctattacatcaggcaaacgcacgtattgtatcttccattgctaaacggtttgggcagcccgtatctaagttcccaaccaacatggcttcaaatggtaacactagtgcagcaagtatcggtattttattagatgaattgatagagtctaatacaattcatgctggtcaaacgattgcctttgctggttttggtggtggtttaactgtcggcgcacaaatttggaaaatttaa

SEQ ID NO: 88390 - protein, 323 aa, Leuconostoc mesenteroides subsp. mesenteroides ATCC 8293
MEQLKIVASARQIPDRQVTNQELSTMMETDDEWIYTRTGIHQRNVVTTENTSDLASEVAKKILAKSGVSPDSIDFIIVSTMSPDSLSPSTAAIVQANIGATNAFAFDLSAACSGFVYGLSVASSLLMSRYQRGLIIGAEVLSKLVDWKDRTTAVLFGDGAAGVLVERTQDNVGLLGEELRTFGEKGDNLVAGRFANTNPFSENISPLDPYFHQNGREVYSFATREVPEALQAALETAQVTADDVDYYLLHQANARIVSSIAKRFGQPVSKFPTNMASNGNTSAASIGILLDELIESNTIHAGQTIAFAGFGGGLTVGAQIWKI

SEQ ID NO: 88391 - DNA, 1041 bp, Magnetococcus sp. MC-1
  CDS (1)..(1041): transl_table=11
atgagcaccctgcgttcccgtattatcggaaccggaagctacctgccagagcgtcgcctgaccaatgacgagttggcggccatggtagagaccaccagtagctggatagaagagcggactggtattcaagagcggcgcattgccgcccccggtgaaatgacctccgatctggcggtcaaagccgccgaacaggccttgcaagctgcgggcattgcagcttgggagttggacctgatcttggtggcgaccacaaccccagacctgatttttccctctaccgccaccatcgtgcagaaacgtttgggggcagataaaacgcgtatccctgccttcgatatccaagcggtttgtaccggttttatctatgccctgaccacagccgaccaatttatccgggccggtagtgctaaacgggtgttggtgattggggcagagaccttttcgcggattatcaattggcaagaccgggggacttgtattctctttggcgatggcgcaggagcggtggtgttggaggcccatgaagcggtggatcaggggattctctccacccatatctatgccgatggcagctatctggatctgttgcgctgtaccactggggtttcagatggcggtagccgcgtgccagggggcgatgctcaaccccaatcgacggatgcgcgtggggtgcaggccatgctggagggctttggttatgtcaccatgcgcggaaatgaggtgtttaaacgcgcggtgatggctctggaacagatcgtggatgagaccttagaggcaaataatctgagtaaatccgatgtggattggttggtgccgcaccaagccaatatacggatcattaacagcaccgccaagcggctgggaatgagtatggatcaggtcgtcgtgacggtagaacgccatggtaatacatccgctgccagtgtgcctttagcgctagacgaagcggtgcgggatggacgtattaaaccgggtcagttggtgttgatggaagcctttggcgggggctttacctggggtagtgtgctggtgcgctggtaa

SEQ ID NO: 88392 - protein, 346 aa, Magnetococcus sp. MC-1
MSTLRSRIIGTGSYLPERRLTNDELAAMVETTSSWIEERTGIQERRIAAPGEMTSDLAVKAAEQALQAAGIAAWELDLILVATTTPDLIFPSTATIVQKRLGADKTRIPAFDIQAVCTGFIYALTTADQFIRAGSAKRVLVIGAETFSRIINWQDRGTCILFGDGAGAVVLEAHEAVDQGILSTHIYADGSYLDLLRCTTGVSDGGSRVPGGDAQPQSTDARGVQAMLEGFGYVTMRGNEVFKRAVMALEQIVDETLEANNLSKSDVDWLVPHQANIRIINSTAKRLGMSMDQVVVTVERHGNTSAASVPLALDEAVRDGRIKPGQLVLMEAFGGGFTWGSVLVRW

SEQ ID NO: 88393 - DNA, 966 bp, Azoarcus sp. BH72
  CDS (1)..(966): transl_table=11
atgatccacgcacgtatcgccgggacaggcagttatctccccggcaatccggtgagcaacgacgatctcgtcgcccgtggcatcgacacctccgacgattgggtggtatcgagaaccggcatccgcacccgctatctcgcgccgcccgacgtgggctccagcgatctcgcgctcgtcgcggcgcagcgcgcaattgaagcggcgggctgtgcggccaacgacatcgacctcatcatcgtggcgacctcgacgcccgattacatctttcccagcaccgccacgctgctgcagtccaagctgggcatcggcaacaacggtgcggcattcgatgtgcaggcggtgtgcagcggctttgtctacgcactgagcatcgctgagaaattcatccgttcgggcagtcacaagcgcgcgctcgtcgtcggggcggaagttttttcccgcattctcgactggaccgatcgcgctacctgcgtgctgttcggagatggcgccggcgcggtggtgctcgaagcctcggagcggcccggcgtgctgacgaccgcgctccacgccgatggtagccaccatccaattctctgtgttcccggcaacgtggctaccgggcaggtggtaggcgacccctttctgcgcatggacggtcaggcggtgttcaagtttgccgtgaaggtgctcggcgacgtcgcgcacgaggtgctcgacgcggccggcgtggcggcggacagcgtggactggctgattccccaccaggcgaacatccgcatcatccaggccacggcgaagcgcctgggcctgtcgatggagaaggtcgtggccacggtggatcgccatggcaacacctcggcggcatcgattccgcttgcactcgatctcgcggtgcgggatggccgtatccgccccgggcagcgcgtcgtggtcgagggtgtaggcggcgggttcacctggggcgcagccctgatcgacttctga

SEQ ID NO: 88394 - protein, 321 aa, Azoarcus sp. BH72
MIHARIAGTGSYLPGNPVSNDDLVARGIDTSDDWVVSRTGIRTRYLAPPDVGSSDLALVAAQRAIEAAGCAANDIDLIIVATSTPDYIFPSTATLLQSKLGIGNNGAAFDVQAVCSGFVYALSIAEKFIRSGSHKRALVVGAEVFSRILDWTDRATCVLFGDGAGAVVLEASERPGVLTTALHADGSHHPILCVPGNVATGQVVGDPFLRMDGQAVFKFAVKVLGDVAHEVLDAAGVAADSVDWLIPHQANIRIIQATAKRLGLSMEKVVATVDRHGNTSAASIPLALDLAVRDGRIRPGQRVVVEGVGGGFTWGAALIDF

SEQ ID NO: 88395 - DNA, 975 bp, Magnetospirillum magnetotacticum MS-1
  CDS (1)..(975): transl_table=11
atgatcgtgcgctcccaaatcatcggatgcgggtcctatcttccgtcgcgtctggtcactaatgccgaattggcggccaaggtggacaccaccgacgagtggatcgtcgaacgctccggcatccgtcagcgccatatcgccgccgagggggagaccacctccgatctggccaccaatgccgcgctccgcgccctggaggctgccggtatcgccggttccgccgtggatctggtcattgtggccaccgccaccccggacaatacctttcccgccaccgctaccaaggtccagagccgcatcggcatgaagcatggcttcgccttcgacgttcaggcggtgtgttcgggcttcgtctatgccctgtccgtggccgataacttcatcaagtcggggcaggtgcagaccgccctggtgatcggtgcggaaaccttctcgcgcatcctcgactggaatgaccgcaccacctgcgtgctgttcggcgatggggcgggtgccgtggtactgcgcgccaatcgcggcaagggcagcagcgccgatcgcggtatcttgtccacccatctacattccgacggcagccactacgacctgctttacgtggatggcggtccctccagcacccagaccgtgggccatgtgcacatggaaggccgcgaggtgttccgccacgccgtcatcaacctcgcctcggtggtgggtgaggcgctgtcggccaatgacctcaaggcctccgatatcgattgggtggtgccccaccaggccaaccgccgcatcatcgagggcaccgccaagaagctgggttttcccttggacaagatggtgatgaccgtggaccgccacgccaacacctcggcagcctccattcccctggcgcttaccgaggcggtgagcgatggccgcatcaagccgggccaactggtcctgctggaagccatgggtggcggattcacctggggttcagccctggtgcggatgtaa

SEQ ID NO: 88396 - protein, 324 aa, Magnetospirillum magnetotacticum MS-1
MIVRSQIIGCGSYLPSRLVTNAELAAKVDTTDEWIVERSGIRQRHIAAEGETTSDLATNAALRALEAAGIAGSAVDLVIVATATPDNTFPATATKVQSRIGMKHGFAFDVQAVCSGFVYALSVADNFIKSGQVQTALVIGAETFSRILDWNDRTTCVLFGDGAGAVVLRANRGKGSSADRGILSTHLHSDGSHYDLLYVDGGPSSTQTVGHVHMEGREVFRHAVINLASVVGEALSANDLKASDIDWVVPHQANRRIIEGTAKKLGFPLDKMVMTVDRHANTSAASIPLALTEAVSDGRIKPGQLVLLEAMGGGFTWGSALVRM

SEQ ID NO: 88397 - DNA, 1002 bp, Nostoc punctiforme PCC 73102
  CDS (1)..(1002): transl_table=11
atgaaatccttagtaagacaaggtattgttttgacagggactggctctgcggttccagatcagtgcttagataatcatcaactcaatcaaatggtggttacttgtgatgattggatcaaatctcgcacaggaattcaccgtcgccatcttcttccagccaaaaactcgctcacaactatggctactgaagcggctcaaaaagccatagatatggcaggtataacagcacaagacttagatttaattatcttagctacatctactcctgatgatttgtttggtaatgccagtcaaatccaagctcgactcggagctacccaagctgtagcttttgatttaacagcagcttgctctggttttgtttttggtttggtaactgctgcccaatttatgcggactggtacttatcaaaatgttcttctcattggtgctgaagttctttcacggtgggtagattggtctgaccgacgtacctgcattctatttggtgatggagcaggagcagtggttttacaagcaagtgaatatgattatctccttggttttcaacttcatactaatggcacgcaaaatcagcatttgaaattggaattccaggaggaagagaaagtacttgttgataatattagcgttggtcaaggtacatataaacctattgcaatgaacggacaagaagtttaccgatttgctattcaaaaagtccctgaagttattgaaaaggcactattccgggcaggtctggatgttaaacaggtagactggctattgatgcatcaggccaatcagcggattttagaggctgtggctcaacgtttaggaattcctgatgaaaaaatcattagcaatttagcaaattacggaaatacttctgctgcttcaattcccctagctttggatgaagctgttcggcgagggcaaattaaagcgcacgatgttgttgctttagctgggtttggagcaggactttcttggggtgctgctatttttgagtggggtctatag

SEQ ID NO: 88398 - protein, 333 aa, Nostoc punctiforme PCC 73102
MKSLVRQGIVLTGTGSAVPDQCLDNHQLNQMVVTCDDWIKSRTGIHRRHLLPAKNSLTTMATEAAQKAIDMAGITAQDLDLIILATSTPDDLFGNASQIQARLGATQAVAFDLTAACSGFVFGLVTAAQFMRTGTYQNVLLIGAEVLSRWVDWSDRRTCILFGDGAGAVVLQASEYDYLLGFQLHTNGTQNQHLKLEFQEEEKVLVDNISVGQGTYKPIAMNGQEVYRFAIQKVPEVIEKALFRAGLDVKQVDWLLMHQANQRILEAVAQRLGIPDEKIISNLANYGNTSAASIPLALDEAVRRGQIKAHDVVALAGFGAGLSWGAAIFEWGL

SEQ ID NO: 88399 - DNA, 996 bp, Crocosphaera watsonii WH 8501
  CDS (1)..(996): transl_table=11
ttgaaagcgatcggggtaagcatcataggttgtggttcggctgcaccagagcaggtgatgaccaacgacgatttaagtcttttggttgaaacatctgacgaatggattcgcacccgaaccggaattagtaagcgacatttggccagcacagatttatccttgagtgaactctcggcacaagcaggcacccaggcgatcgctatggcgcaactcactcctggcgatattgatttgattattttagccacatctaccgccgatgatctctttggcagtgcagctaaagtacaggccattttacaagcgaatcgggcagtagcttttgatttaaccgcagcttgttcgggttttgtctttgcattaatcaccgccagtcaatttttgcgcacaggagtctacaaaaatgtcttagtgatcggggccgatattctttcccgttgggttgattggtcagatcgtaccacctgcgttctctttggagatggtgccggtgccgttgtctgtcaaggcattacagaggaggataatttgttaggttttgccatgtacagcgatggaaaacaacacgatgctctcaaccttggttatcacggtacagataagggcttaaaagaaggtataaaggtcaatcaaggcacttatcaacccattaccatgaagggacgagatgtttatcgttttgccgtggaaaaggtgccagaagtcatcgaaaaagcactctttaacgcccaattaaccaccgatgacattgactggttaattctacaccaagccaatcaaagaattatcgattctgtagccaaacgtctgaaaattccaggagagaaagtgattgctaatttagatgaatatggcaatacctctgctgcttctattcctttagccctcgatgaagccgttagacaaggaaaaatcaaaccaggggatattgtggctagttctggttttggtgctggtttaacttggggtgctgccgtattccgttggggtagttag

SEQ ID NO: 88400 - protein, 331 aa, Crocosphaera watsonii WH 8501
MKAIGVSIIGCGSAAPEQVMTNDDLSLLVETSDEWIRTRTGISKRHLASTDLSLSELSAQAGTQAIAMAQLTPGDIDLIILATSTADDLFGSAAKVQAILQANRAVAFDLTAACSGFVFALITASQFLRTGVYKNVLVIGADILSRWVDWSDRTTCVLFGDGAGAVVCQGITEEDNLLGFAMYSDGKQHDALNLGYHGTDKGLKEGIKVNQGTYQPITMKGRDVYRFAVEKVPEVIEKALFNAQLTTDDIDWLILHQANQRIIDSVAKRLKIPGEKVIANLDEYGNTSAASIPLALDEAVRQGKIKPGDIVASSGFGAGLTWGAAVFRWGS

SEQ ID NO: 88401 - DNA, 945 bp, Exiguobacterium sibiricum 255-15
  CDS (1)..(945): transl_table=11
atgaatatcggaattgtaggactcggtacatcattacccgaacatcggatgacaaatgatgatttagcagcgacactcgatacgagtgatgaatggattcggtcacgtacaggaatcggggcgcggcggattgcagatgatgcagttgatgtcacggatttagcgacggaagcagcgcaaaaagcattagcggatgccaatttgacagcagacgacatcggattgattgttgtcggaacggcaaccggacgtgctttcccgtcgactgcctgtatcgttcaggagcgaatcggcgcactcggagcgacagcttttgatatcagcgcagcctgcagcggattcatttttgccctacagacggcttcgagtatgatgacggcaacgggatcgaaacacgcactcgtcatcggagcagagaagatgtcaagcatcgttgactggtcagaccggtcgacggccatcttgttcggtgacggtgccggagcagttgttctcggtccaaccgagcaacaaggattgaatgcctttgaattgggcacggatggccgcggagcacatctgttatttaaaaacttggatggtccaattgaaatgaacggtcgggaagtctttaagttcgcagtccgcaagttaccggacatcgtggagaaagtcattcaaaaagcggacggaaccctggacgaacttgatttactgattccgcatcaagcgaatttacggattattgatgcagcacgtgaacggcttgggattgcagaagagaaagtgatcgtgacgattgacgaacatgcgaatacatctgctgcgtcaataccacttgcactagaagaggcacggcgacaaggaagattgtcaccggggacgacacttgtcctcgccggattcggcgcaggtttgacatggggagcagcttacattacttggactaaaggggagaacacataa

SEQ ID NO: 88402 - protein, 314 aa, Exiguobacterium sibiricum 255-15
MNIGIVGLGTSLPEHRMTNDDLAATLDTSDEWIRSRTGIGARRIADDAVDVTDLATEAAQKALADANLTADDIGLIVVGTATGRAFPSTACIVQERIGALGATAFDISAACSGFIFALQTASSMMTATGSKHALVIGAEKMSSIVDWSDRSTAILFGDGAGAVVLGPTEQQGLNAFELGTDGRGAHLLFKNLDGPIEMNGREVFKFAVRKLPDIVEKVIQKADGTLDELDLLIPHQANLRIIDAARERLGIAEEKVIVTIDEHANTSAASIPLALEEARRQGRLSPGTTLVLAGFGAGLTWGAAYITWTKGENT

SEQ ID NO: 88403 - DNA, 1047 bp, Kineococcus radiotolerans SRS30216
  CDS (1)..(1047): transl_table=11
gtgaccgcactgaccgccgcccccacccgcgaggcccgcatcctcggggtgggcgcgcaccgcccgccccgggtcatcgacaacgaggaggtgtgcacctggatcgactcctccgacgagtggatccagcagcgcaccgggatccggacccgccgctgggccgctcccgacgtctcggtcgtcgacatgagcgaggacgccggcgccaaggcgctggccgcggcggggctgaccgggtccgacgtcgacgcggtggtcctggcgaccgtctcctaccccttccagaccccggcggccgcggccgtcgtggcccaccgcctgggcgcgacccccgcggcggccttcgacgtctccgccggctgcgccggcttctgccacggcgtcgccctgggcagcgacctcgtccggggcggcacggcgcgcaacgtgctcgtcatcggcgccgagaagctctccgacttcaccgaccagcacgaccgctccacggcgttcctcttcgccgacggcgcgggcgcggtcgtcatcggcgcctccgacgaacccggcatcggtcccacggtgtggggttccgacggcgggcaggccgacctcatcaagtcgaagttctcctggctggacctgcgctcctcctcaggggacgccgcgctggccgccgaggaccccgccgaggtcggcgaggacgtcgagcgctggcccttcctggagcagcaggggcagtcggtcttccgctgggcggtgtggcagatggctcccgtcgcgcaggccgcgatggacgcggccggggtcaccgccgaggacctcgacgtgttcgtcgcgcaccaggccaacggccggatcatcgacgcgatggtcaagcagctcaagctgcccgagagcgtccacgtggcccgcgacatcgtcgacatgggcaacacctcggccgcctcggtcccgctggcgatggagcgcgcggtcgccgacggccacgccccctccgggggtctggcgctgctcatcggctacggcgcgggcctgtcctacgccgcccaggtcgtccggctcccgtag

SEQ ID NO: 88404 - protein, 348 aa, Kineococcus radiotolerans SRS30216
MTALTAAPTREARILGVGAHRPPRVIDNEEVCTWIDSSDEWIQQRTGIRTRRWAAPDVSVVDMSEDAGAKALAAAGLTGSDVDAVVLATVSYPFQTPAAAAVVAHRLGATPAAAFDVSAGCAGFCHGVALGSDLVRGGTARNVLVIGAEKLSDFTDQHDRSTAFLFADGAGAVVIGASDEPGIGPTVWGSDGGQADLIKSKFSWLDLRSSSGDAALAAEDPAEVGEDVERWPFLEQQGQSVFRWAVWQMAPVAQAAMDAAGVTAEDLDVFVAHQANGRIIDAMVKQLKLPESVHVARDIVDMGNTSAASVPLAMERAVADGHAPSGGLALLIGYGAGLSYAAQVVRLP

SEQ ID NO: 88405 - DNA, 975 bp, Roseovarius nubinhibens ISM
  CDS (1)..(975): transl_table=11
atgaccctgcgcgccgttgtcgaaggtgtcggccattacctgcccgatcggattgtcgagaacgcctggttcgaggagtttctcgacacgtcggacgaatggatcagaacgcgctcgggcatcgaacggcgtcatttcgccgccgaacatgaaaccacctccgatctggcgctcgccgcctccaaggccgcgctcgccaatgccgggctcgagcctgacgatatcgattgcgtactcgtcgccacctcgaccccggacctgacctttccctcggtcgccaccatggtgcaaaaccgcctcggcatgacccagggctttgccttcgacgttcaggccgtctgcgccgggttcatctatgcgctgtgcaacgccaacgcgctcattgtctcgggtcaggcccgccgcgtgctggtcatcggcgccgaaaccttcagtcgaatcatggattgggaagaccgctccacctgcgtgctcttcggcgatggcgccggcgcgctgatcctcggcgccgaagagggcgtcggcaccaaggaagaccgcggcattcttgccaccgatctcaattccgacgggcgctacaaggacatgctctatgtcgatggcggcgtctccaccaccggcaccgcgggcaagctgcggatgcagggcaatcagctcttccgccaagccgtggaaaagctcgcctccaccgccgaaacctcgctggaaaaggctggtctgctgagctcggaagtcgactggatcgtaccgcatcaggccaatatccgcattatttccggcaccgcgcgcaagctcggcctgtcgatggaccgcgtcgttctgacggtgcaggaccatggcaacacctccgccgcgtcgatcccgctggcgctgtcggtgggcgtggccgagggccggatcaaacgcggcgatctggtgctgtccgaggcgattggcggcggtttggcttggggttccgtggttctgcgctggtaa

SEQ ID NO: 88406 - protein, 324 aa, Roseovarius nubinhibens ISM
MTLRAVVEGVGHYLPDRIVENAWFEEFLDTSDEWIRTRSGIERRHFAAEHETTSDLALAASKAALANAGLEPDDIDCVLVATSTPDLTFPSVATMVQNRLGMTQGFAFDVQAVCAGFIYALCNANALIVSGQARRVLVIGAETFSRIMDWEDRSTCVLFGDGAGALILGAEEGVGTKEDRGILATDLNSDGRYKDMLYVDGGVSTTGTAGKLRMQGNQLFRQAVEKLASTAETSLEKAGLLSSEVDWIVPHQANIRIISGTARKLGLSMDRVVLTVQDHGNTSAASIPLALSVGVAEGRIKRGDLVLSEAIGGGLAWGSVVLRW

SEQ ID NO: 88407 - DNA, 1020 bp, Prochlorococcus marinus str. MIT 9211
  CDS (1)..(1020): transl_table=11
ttgactggcaagcaaaaaagtacttatggaatctctcttgtaggcagtgggagtgcaacacctctgcagttggtgacgaatgacgagatgtcattacgggtcgagacaaatgatgagtggattagtactaggactggtattcgtgaaagacgtgtgattgggcctaacgaatctttttcgcaactttgtataaaggcaggttcctctgctttgcaaatggctcaatggaaggcagatactcttgacttgattattcttgcaacatctactccagacgatctctttggctctgctccaaaaatccaggccaaactaggtgctacaaaggcagttgcatttgatctcactgctgcttgtagtggatttctttttgccttagttactgcagctcagtttatacgcagtggctcgatgaagagagtcctagtaataggtgcagatcaattatctagctgggtggattggaacgatagaaaaagttgtgtgctttttggggatggtgctggtgcaattgctatagagtcttcggaagctgaagatgacttaattgggttcaagctgagatctgatggtactaggggtgattgtttaaatttgatcgaaaaaagaaattttcaacctttaattggcagcactatgcatcaacaaggagggttcttgaatatccagatgaatggtcaagaagtttataaatttgcggttagagaggttccttgtatccttcaagagttattaaaaactcatcaaataggttcagattccttggattggctattactgcaccaagctaataaaagaatcttagatgctgtagcagacaggctgaaggttcctcgttccaaagttttaagtaatcttgcaagttatggcaatacttctgctgcgactattccacttatgcttgatgaagcggtaagagatggcaaggttttgcctggaaatttaatagctagtagcggatttggcgctggtttaagttggggagcggctttatttcgttggcatgggccttgctcataa

SEQ ID NO: 88408 - protein, 339 aa, Prochlorococcus marinus str. MIT 9211
MTGKQKSTYGISLVGSGSATPLQLVTNDEMSLRVETNDEWISTRTGIRERRVIGPNESFSQLCIKAGSSALQMAQWKADTLDLIILATSTPDDLFGSAPKIQAKLGATKAVAFDLTAACSGFLFALVTAAQFIRSGSMKRVLVIGADQLSSWVDWNDRKSCVLFGDGAGAIAIESSEAEDDLIGFKLRSDGTRGDCLNLIEKRNFQPLIGSTMHQQGGFLNIQMNGQEVYKFAVREVPCILQELLKTHQIGSDSLDWLLLHQANKRILDAVADRLKVPRSKVLSNLASYGNTSAATIPLMLDEAVRDGKVLPGNLIASSGFGAGLSWGAALFRWHGPCS

SEQ ID NO: 88409 - DNA, 978 bp, Erythrobacter sp. NAP1
  CDS (1)..(978): transl_table=11
gtgacaggctcgagaattgttggatcgggctctgcgctacctcagcgcatcgtcaccaacaatgagctggcagagcgggtcgacacctcggacgaatggataatcgagcgcaccggcatccgccagcgtcacattgcgggcgcaggtgagaccacggccacgcttgcaaccgccgcggcacgcgccgcgcttgccgatgcggggctgaaagctggcgatatcgacctcatcgttctcgcaaccgcaactcccgacaacacctttcctgcaaccgcaacaaaggtgcagcatgctctcggctgcaagaacggccccgcattcgatgtcggcgcggtgtgttcgggttttctctacgcgctcacaacagccgattcgctgctcgcaaccggctctgcgaaccgtgcattggtgataggcgccgaaactttcagcagaattctcgattgggaagatcgaacgacctgcgttcttttcggagacggcgcaggcgcggttgtgcttgaagcgcctgatgcagcgaacccagcaaaggccggtggtccgggcgttctcgcaagccggcttcacgccgatggcgcgcagcatgatctgctttatgtcgacggtggtccgtcaagtacgcagactgtcggacatctgcgcatgaaaggccccgaagtcttccgccacgcggttgtcaatctctccagcgttctgaaggaagtgattgaagacgcagacgtttctgcgtccgatatcgactggatcgtccctcatcaggcgaacaagcgcatcctcgatgcgaccgccagaaagctcggaattcccgatgaaaaggttgtcgtaacagtcgacaagcacgccaacacctcggctgcatctgtaccgttagccttcgatgttgcgcgcaaggacgggcggatcaaagctggcgatctggtgatgttcgaggccatgggcggcggcttcacatggggtgcaagtctcgtccgcatgtag

SEQ ID NO: 88410 - protein, 325 aa, Erythrobacter sp. NAP1
MTGSRIVGSGSALPQRIVTNNELAERVDTSDEWIIERTGIRQRHIAGAGETTATLATAAARAALADAGLKAGDIDLIVLATATPDNTFPATATKVQHALGCKNGPAFDVGAVCSGFLYALTTADSLLATGSANRALVIGAETFSRILDWEDRTTCVLFGDGAGAVVLEAPDAANPAKAGGPGVLASRLHADGAQHDLLYVDGGPSSTQTVGHLRMKGPEVFRHAVVNLSSVLKEVIEDADVSASDIDWIVPHQANKRILDATARKLGIPDEKVVVTVDKHANTSAASVPLAFDVARKDGRIKAGDLVMFEAMGGGFTWGASLVRM

SEQ ID NO: 88411 - DNA, 990 bp, Synechococcus sp. RS9917
  CDS (1)..(990): transl_table=11
gtggccctggtggccagcggcagcgccaggggtgagcagacgatccgaaacgatcagctcgggctgcgggtcgacaccaatgatgaatggatccgcagccgcactggcatccgtgagcgctgcatctgcggaccgcagcagagcctggccgacctgagccacgaggccggcgatgcagcgctgaccatggctggctggtcgcccgagagtgtcgacctggtgctgctggccacctccactcccgacgacctgttcggcacagcgcccaaagtgcaggcgctgctcggcgccaagcaggccgtggcctttgacctcacggccgcctgcagcggttttctgttcgcgctggtcaccgccgcccagttcctgcgcgcgggggcgatgcgcagggtgctggtgatcggggcggatcaattgagccgctgggtcgactgggatgaccgccgcacctgcgtgctcttcggtgatgcggccggcgcggtcgcgctcgaagccaccacagccgccgaggatgggttgctcggctttgccttgcgcagcgatgggctgcggggcgactgtctcaacctctcccagcatcaggagcgccaagcgctggtgggtggcaccagccatcaggtgggcggctttgcgccgatcagcatgaacgggcaggaagtgtataagttcgcggtgcgcgaggtgccggcgattcttcatcacctcctgcaaagcacggaaacggcagccgacagcctcgactggctgctgctgcatcaggccaaccagcgcatcctcgatgcggtggccgatcgcttcaaacttccccacgccaaggtgctcagcaacctggcccactacggcaacacctccgccgccacgattccgctgatgctcgatgaagcggtccgtgacgggcgcatccaacccggccatcggatcgccagcagtggctttggcgcaggactcagctggggcgcggccctgttccgctggcaaggcccctcgtag

SEQ ID NO: 88412 - protein, 329 aa, Synechococcus sp. RS9917
MALVASGSARGEQTIRNDQLGLRVDTNDEWIRSRTGIRERCICGPQQSLADLSHEAGDAALTMAGWSPESVDLVLLATSTPDDLFGTAPKVQALLGAKQAVAFDLTAACSGFLFALVTAAQFLRAGAMRRVLVIGADQLSRWVDWDDRRTCVLFGDAAGAVALEATTAAEDGLLGFALRSDGLRGDCLNLSQHQERQALVGGTSHQVGGFAPISMNGQEVYKFAVREVPAILHHLLQSTETAADSLDWLLLHQANQRILDAVADRFKLPHAKVLSNLAHYGNTSAATIPLMLDEAVRDGRIQPGHRIASSGFGAGLSWGAALFRWQGPS

SEQ ID NO: 88413 - DNA, 1017 bp, Synechococcus sp. WH 5701
  CDS (1)..(1017): transl_table=11
atggccctggtgggtagcggcagcgccctgccgctggtcagcgtcagcaatgagcagctcagccgtcgggtcgacaccaacgacacctggatccgcagccgcaccggcatcgccgcccgccggatcgccggtcccggcgaaaccctcaccagcctggccaccgctgccgcccaggccgccctggagcaggccggctgggacgcggaggatctcgacctgatcctgctggccacgtccagcccggatgatctgttcggcaccgccccccgggtgcagggggccattggtgccaggcgggcggcggccttcgatctcaccgccgcctgcagcggctttctctttgccctgatcaccgccggccagtacatccggggggggacggtggggcgggccctggtgatcggagccgatcagctcagccgctggatcgactgggatgaccgcagcacctgcgtgctcttcggtgacggtgccgccgcggtggcggtggaggcctgcgaggagccgcgcaacggcctgctgggcttcaagatgcactccgatggtcgccgggccgactgcctgtccctgcgccagcgcgacgatcacgtccccctgctggaaggtcacttgagccagaaaggcggcttcgagaccatccacatgaatggccaggaggtctacaaattcgccgtgcgggaggtaccggcggtgctgcaggaactgctgaacatcacaggcacgaccgctgagcagctcgactggctgctgctgcaccaggccaaccagcgcatcctcgatgcggtcgctgaccgcttcgccatcccccatgagcgggtgctcagcaacctggcccgctacggcaacacctccgccgccaccatcccgctgatgctggatgaggcggtcagggatggccgggtgcgcccgggtgatctgatcgccagcagcggcttcggggccggactcagctggggtgcggccctgctgcgctggggtggccccggcggcgctcagacgcccgctgaccccggctga

SEQ ID NO: 88414 - protein, 338 aa, Synechococcus sp. WH 5701
MALVGSGSALPLVSVSNEQLSRRVDTNDTWIRSRTGIAARRIAGPGETLTSLATAAAQAALEQAGWDAEDLDLILLATSSPDDLFGTAPRVQGAIGARRAAAFDLTAACSGFLFALITAGQYIRGGTVGRALVIGADQLSRWIDWDDRSTCVLFGDGAAAVAVEACEEPRNGLLGFKMHSDGRRADCLSLRQRDDHVPLLEGHLSQKGGFETIHMNGQEVYKFAVREVPAVLQELLNITGTTAEQLDWLLLHQANQRILDAVADRFAIPHERVLSNLARYGNTSAATIPLMLDEAVRDGRVRPGDLIASSGFGAGLSWGAALLRWGGPGGAQTPADPG

SEQ ID NO: 88415 - DNA, 1044 bp, Synechococcus sp. WH 7805
  CDS (1)..(1044): transl_table=11
ttgactgacgccacccgcttggatcttctcttggctggacaatcaccgcaggtccttggcgtggccctgatcggcagcggcagcgcacaggcagcgcaggtgatcagcaacgatcagctcagccaaagggtcgataccaacgatgaatggatccgcacacgcacgggcatcggtcgtcgcagggtcagcgatgcaggtcagaccctggtcgatcttgctgcggaggcaggtcgaaacgccctgaccatggccggtcgatctcccgaggatcttgacctcattctcctggccacctccacacccgatgatctgttcggttcagcaccaagagtgcaggccgacctcggcgcgaccaatgctgttgccttcgatctcacggccgcatgcagcggttttctgtttgcactggtcacggcagcgcagtatctgcgaacgggggcgatgcgccgtgccctggtgatcggtgcagaccagctcagccgcttcgttgactgggacgaccgccgcagttgcgtgttgtttggcgatggcgccggagccgtcgttctggaagcctcggatcaggatggacttctcggttttcttctaaacagcgacgggtcgcgcggcgccgttctcaatctgcctgccatcgacacctcctctcccctcgtcgatgaggccgtgcaccgtgcaggtgggtttcagccgatcgtgatgaacggccaggaggtgtataagttcgcggtccgtgaggttcccgccgtcctccagtcactcttgaagcgctgcgacgtctctcccgatcaactggactggctcctgctccatcaagccaaccaacgcatcctcgatgcagtcgctgatcgactgtcggttcccagcgccaaggttctgagcaacctggcggaatacggaaacacctcggcagcaaccatcccgttgatgctcgatgaagctgtgcgcgacggacgggtccgctccggcgatctcctcgccagtagcgggttcggtgctggtctgagttggggggcggccctgcttcgctggcaggggcccgcgtag

SEQ ID NO: 88416 - protein, 347 aa, Synechococcus sp. WH 7805
MTDATRLDLLLAGQSPQVLGVALIGSGSAQAAQVISNDQLSQRVDTNDEWIRTRTGIGRRRVSDAGQTLVDLAAEAGRNALTMAGRSPEDLDLILLATSTPDDLFGSAPRVQADLGATNAVAFDLTAACSGFLFALVTAAQYLRTGAMRRALVIGADQLSRFVDWDDRRSCVLFGDGAGAVVLEASDQDGLLGFLLNSDGSRGAVLNLPAIDTSSPLVDEAVHRAGGFQPIVMNGQEVYKFAVREVPAVLQSLLKRCDVSPDQLDWLLLHQANQRILDAVADRLSVPSAKVLSNLAEYGNTSAATIPLMLDEAVRDGRVRSGDLLASSGFGAGLSWGAALLRWQGPA

SEQ ID NO: 88417 - DNA, 1074 bp, Pseudoalteromonas tunicata D2
  CDS (1)..(1074): transl_table=11
atgttatacggcaaaattactggctggggtaaatgtttaccccctgcaattctcacaaatcaagcaattagtgacgtagttgatactaacgatgaatggatcacgtcgcgtaccggcatttctgaacgtcgggtcagtcatgtctccaccgcagaattagcaactgctgcggcaaaaaatgcacttgcgtgtgcaggcattgatggcagtgatattgatttagtgctgcttgcaacctgcagtccatcaacaatggtggccaataccgcttcattggtacaaaaaaatattggtgccgttggtgccgcagcctgtgatgttaatgctgcatgttctggttttttatatgcattacaaaatgccacagcgcaaattcaggctggaatgatcaaaaaagcggtggtgattggtgcagaacgcatgacttggtacgttaactgggcaagacgcgacagcgccgtattatttggtgatggcgcaggtgcagtggtcattgaagcctgtgatgagccatgtggcctaatggcaaccaaaacaggttgtgatagcaccgacagagacatattacatatcaccaattttggtaccgacatcaataaatacgatgcccctgtagggccttctgatttattatttgaaggacgtgaaatattcaaacgtgccgttaaaggcatgagcgacgcctgtgatgatgtattgcaaaaggctgatttagcgttaacagatattgatgtgcttattccgcatcaagcaaatttacggatcatccaagcgattgctcaacgtcttgatgtttcagatgacaaaatcatggtcaatatcaacaaatatggcaatacctcggcagcaactgtgcctattgcattgtgtgaagctgttgaacaagggcttattcaacctgattcgaatattatgtctgccgcatttggtgcaggcttaacctgggctgcctcttatatcaaatggggtgagcgtattacccctatcaaccagccaacagcaaagctacctcaaaacactaaaacagcgctcgaactgcttgatggcgcaatcaaagcctgccaatcagcgtaa

SEQ ID NO: 88418 - protein, 357 aa, Pseudoalteromonas tunicata D2
MLYGKITGWGKCLPPAILTNQAISDVVDTNDEWITSRTGISERRVSHVSTAELATAAAKNALACAGIDGSDIDLVLLATCSPSTMVANTASLVQKNIGAVGAAACDVNAACSGFLYALQNATAQIQAGMIKKAVVIGAERMTWYVNWARRDSAVLFGDGAGAVVIEACDEPCGLMATKTGCDSTDRDILHITNFGTDINKYDAPVGPSDLLFEGREIFKRAVKGMSDACDDVLQKADLALTDIDVLIPHQANLRIIQAIAQRLDVSDDKIMVNINKYGNTSAATVPIALCEAVEQGLIQPDSNIMSAAFGAGLTWAASYIKWGERITPINQPTAKLPQNTKTALELLDGAIKACQSA

SEQ ID NO: 88419 - DNA, 975 bp, Xanthobacter autotrophicus Py2
  CDS (1)..(975): transl_table=11
gtgagcggaatcaggtccgtcgcccggggatccgggtcctatctccccgagagggtgctctcgaacgacgatctcgcgcggcgcatcgacacgaccgacgactggatcgtgcagcgcaccggcatccgccagcgccatatcgccgccgagggcgagttcacctcgcatctcgcgctgaaggcggccgagcgggcgctcgccgacgcaggctttgccgcgcgcgacattgacctcatcatcctcgccaccgccacgccggaccagactttccccgccacctcggtgacggtgcaggcggagctgggcatcacccgcggcgccgccttcgacgtgcaggcggtgtgctccggcttcgtgttcgcccttgccaccgccgatgcctatctgaagaccggcgccttcgaccgggcgctggtgatcggggcggagaccttttcccgcatcctcgactgggaggatcgcggcacctgcgtgctgttcggcgacggggcaggggccatggtgctggaagcggtgcgggaggacgacgcccacggcgccggccttctcacctcgcacctgcgctcggacgggcggcaccgcaccaagctgttcgtggacggcggcccctccaccacgggaaccgtgggccacctgcgcatggagggccgcgaggtgttcaagcatgcggtgggcatgatcaccgacgtgatcgaggacgccttcgccgccaccggcgaaagcgccgcgagcatcgactggttcgtgccccatcaggccaatcgccgcattatcgacgccagcgcgctgaagctgggcatcgcccccgaaaaggtggtgaccacggtggaccagcacggaaatacctcagccgcctccattccgctggccttcgaccttgcggtcagggacgggcgcatcaagcggggcgatctggtgctgctggaggccatgggcggaggtttcacctggggatcggccctcctgcgctggtaa

SEQ ID NO: 88420 - protein, 324 aa, Xanthobacter autotrophicus Py2
MSGIRSVARGSGSYLPERVLSNDDLARRIDTTDDWIVQRTGIRQRHIAAEGEFTSHLALKAAERALADAGFAARDIDLIILATATPDQTFPATSVTVQAELGITRGAAFDVQAVCSGFVFALATADAYLKTGAFDRALVIGAETFSRILDWEDRGTCVLFGDGAGAMVLEAVREDDAHGAGLLTSHLRSDGRHRTKLFVDGGPSTTGTVGHLRMEGREVFKHAVGMITDVIEDAFAATGESAASIDWFVPHQANRRIIDASALKLGIAPEKVVTTVDQHGNTSAASIPLAFDLAVRDGRIKRGDLVLLEAMGGGFTWGSALLRW

SEQ ID NO: 88421 - DNA, 1050 bp, marine gamma proteobacterium HTCC2207
  CDS (1)..(1050): transl_table=11
atgaccaacgatgatatggccaagattgtagataccagtgatgagtggattttctctcgctccggtatccgtcaacgccaatacagtcatgtctccaccggtgaaatgggttggctctctgcagagcgtgcactggcgactgctggcgtcgatgcagatgatatagatctgattattctcggctccaccactcccgaagaaatttgtcccaatacggccagttacatcaaaaataaactcggcgccaaaaatgcggccgcctttgatcttaactccgcctgtaccagctggttctatgccctgaatacggccacggacatggtcaagtcaggctccatcaacaaggctttggtgattggctcagagcgcctttctctggcgatggattggcaaaagcgcgagtcctgtttcctgtttggcgatggcgccggttccgtagtgatcgaagcggctgagcaagagggtggtttgttagccggcaaaatgagttgtgttcccgacagtcgcgaatgcttgcgactgcctaactggggtatgtctccggcccatttgaccggtgacctgtatgtctcgctggactttgatggtgcagaaatttttaagagtgcggttaaaggcatgtcagatgcaatcagcgatgtgcttgagaaagagggtttgactgcagctgatatagatctgtttgttccccatcaggccaatattcgaattattcaatcactggccaagcgcctggattttcctatggaaaaagtggtggtggcaattgataagtatgccaatacctctgcggcttcgattccattggcgctctgtgatgcactggaagatggccgagttaaaccgggcatgactattttaacggcaacctttggcgcaggactgtcctgtggcgcgggtatcatcaaatggggcgaccgaattgagccagtggcaatctcggataagtcgattcccgaatttgaaggcactgtttttgatctgatgaaagacagcttcactcactacggtgttgatgccgatcatctgttaaccaaaagcgaagggtaa

SEQ ID NO: 88422 - protein, 349 aa, marine gamma proteobacterium HTCC2207
MTNDDMAKIVDTSDEWIFSRSGIRQRQYSHVSTGEMGWLSAERALATAGVDADDIDLIILGSTTPEEICPNTASYIKNKLGAKNAAAFDLNSACTSWFYALNTATDMVKSGSINKALVIGSERLSLAMDWQKRESCFLFGDGAGSVVIEAAEQEGGLLAGKMSCVPDSRECLRLPNWGMSPAHLTGDLYVSLDFDGAEIFKSAVKGMSDAISDVLEKEGLTAADIDLFVPHQANIRIIQSLAKRLDFPMEKVVVAIDKYANTSAASIPLALCDALEDGRVKPGMTILTATFGAGLSCGAGIIKWGDRIEPVAISDKSIPEFEGTVFDLMKDSFTHYGVDADHLLTKSEG

SEQ ID NO: 88423 - DNA, 1041 bp, delta proteobacterium MLMS-1
  CDS (1)..(1041): transl_table=11
atggctgccatgcatcagccgcagccaaccgcgccggtcaccttgccgggccggggtttgcgggtcatcggtaccggttcggccctgccccggcgggtgctcagcaatgccgagctggaagggatggtggaaacctccgatgactggatcaccacccgcaccggcatcaaaacccggcggatcgccggtcataatgaggagacttcgcaactggccgccgccgccgcccgtaacgccctggccatggccggagtggcggccggcgagctggacatgatcgtggtcggtactatcacccccgacatgaccatgccctcctgcgcctgtctggtacaacgggaactgggggccaccggggctttcgccttcgatcttaatgccgcctgttcaggctttctctatgcccttgatctggccgataagtatatccgttgtcaccctgcctggaaaatcctggtaattggcgccgagaccctttccgcccgggtggactggcaggatcgcaacacctgcgtgctgtttggcgatggggccggggcctgcgtggtcaccggaccggagccgggctcgccggatgacggccggggctatctgctcgcttccctgttcgccgatggctccctctgggagttgctgcacctggaaggggcacccaaacataacgccgagctgcaagccaaccgggaggccgccccctgtatcaagatgtacggccgtgaggtcttccgtcacgcggtgcgggccatgaccgatgccgttggccgggtactggccgccgccggttgctcccccgcccaactcagcctggtggtgccccatcaggccaatatccggattatccagagcctggccgaacacctggccctggcgtcggaaaaagtctatgttaacgtggacaaatatggtaatacatcggccgccaccatccccattgctttggatgaagccaatcggcagggcaggctggcggcgggtgatttggtgttgctctgttccttcgggggtggtttcacctggggcgcttctctgctcaggtggtag

SEQ ID NO: 88424 - protein, 346 aa, delta proteobacterium MLMS-1
MAAMHQPQPTAPVTLPGRGLRVIGTGSALPRRVLSNAELEGMVETSDDWITTRTGIKTRRIAGHNEETSQLAAAAARNALAMAGVAAGELDMIVVGTITPDMTMPSCACLVQRELGATGAFAFDLNAACSGFLYALDLADKYIRCHPAWKILVIGAETLSARVDWQDRNTCVLFGDGAGACVVTGPEPGSPDDGRGYLLASLFADGSLWELLHLEGAPKHNAELQANREAAPCIKMYGREVFRHAVRAMTDAVGRVLAAAGCSPAQLSLVVPHQANIRIIQSLAEHLALASEKVYVNVDKYGNTSAATIPIALDEANRQGRLAAGDLVLLCSFGGGFTWGASLLRW

SEQ ID NO: 88425 - DNA, 951 bp, Rickettsiella grylli
  CDS (1)..(951): transl_table=11
atgaaatattcacgtattgcaggcacgggaagctatttacctgaaaaaatactcaccaatgctgaacttgagaaaaaagtggcgaccacgaatgaatggatagtcgcacggaccggtattcgtgaacgccgtattattggtcccgacgatagcacggcgagtatggcggtcgcggctgctcaacacgcgttgctcgcggcttccatatcccctaaaaatatacaacttattattgtcgccaccagtacaccggataaattttttccaagcaccgcctgtttagtacaagcgggtttgggttacgatgggtgtcctgcgtttgatatcgttgcagcctgcgctggatttaactatgccttaagcgttgctgacaaatttattcgcagcgggactgttgaaacggccttagtgatagggagtgaaagcatgtcaacaattattaattgggaagatcgttccacatgcgttttatttggtgatggtgccggtgccgttgtccttcaagcggcaaaagaacctggaattatttccgcacatttgcatgcggcgggttcctataaagatttattatcactcgataccggattaaaaaagggagatttaccacagcttaaaatgcaaggaagtgaggtgtttaaaattgcagtgaataaattaagttccgttttagaggaaacgttagcatcgaataaaatagataaagaagatatcgattggttcattcctcatcaagctaatttacgaattattaaagcgatggcgaataaacttaaaatgacgttagaccaagttgttatcaccttggatcaacagggcaatacgtcagcggcatcgattcctttagcattagatagagctgtgcgtgatggtcgcatccaacgtggacagttattactgatggaaagttttggtgcaggtttagcgtggggttccgctttagtacgttactaa

SEQ ID NO: 88426 - protein, 316 aa, Rickettsiella grylli
MKYSRIAGTGSYLPEKILTNAELEKKVATTNEWIVARTGIRERRIIGPDDSTASMAVAAAQHALLAASISPKNIQLIIVATSTPDKFFPSTACLVQAGLGYDGCPAFDIVAACAGFNYALSVADKFIRSGTVETALVIGSESMSTIINWEDRSTCVLFGDGAGAVVLQAAKEPGIISAHLHAAGSYKDLLSLDTGLKKGDLPQLKMQGSEVFKIAVNKLSSVLEETLASNKIDKEDIDWFIPHQANLRIIKAMANKLKMTLDQVVITLDQQGNTSAASIPLALDRAVRDGRIQRGQLLLMESFGAGLAWGSALVRY

SEQ ID NO: 88427 - DNA, 996 bp, Desulfitobacterium hafniense DCB-2
  CDS (1)..(996): transl_table=11
atggttagtgttggaatcgtgggcacaggttcctatgtacccgataaggttttgacgaattttgatctggagcagatggtggacaccaatgatcaatggatagtgagcaggacggggattaaggaacggcacatcgcagctcctgagactccggtatccgagctttgctaccaggcggctttgcgggccttagaagatgccaaactcgctccggaagagctggatttagtgattgtcgccaccataacccctgattttgtttttccggccacagcttgcctggtggcggaacgcctgggagccaaaaaggcggccggttttgacctgcaggccgcctgcacgggatttttatacggagtagccactgcggctcaattcatcgctaccggtatctataaaaatgccctggtgattggcggggaaaccttaagcaagatcttaaactgggaagaccgggggacctgcatcctgtttggagacggcgccggtgcggcagttctgcagccggtggaagaggggtacggattcctgggctatgacctgggtatggatggtgcggggggcagccttttgaccatgccgggagggggctccatgcaccctgcttccgcagaaaccgtggccaagaaaatgcacaccatccagatggccggcagtgaagtgttcaaattcgccgtccgcattatgggggagaccgccttaaaagcgctggacaaggcaggtttagggatcggagatgtggattgccttattccccatcaggccaacacccgcattgtggatgcggcagtcaaacggctggggattgatgccgggaaagtcgtggtcaatctggaccgctatgggaatatgtcggcggcttccatcccggtggccctggatgaagcagcacggagcggacgtttaaactatggagacattatggtgatggtgggctttggcggaggcttaacctggggagccgctgttgtgaagtggtccaagagaggggtttag

SEQ ID NO: 88428 - protein, 331 aa, Desulfitobacterium hafniense DCB-2
MVSVGIVGTGSYVPDKVLTNFDLEQMVDTNDQWIVSRTGIKERHIAAPETPVSELCYQAALRALEDAKLAPEELDLVIVATITPDFVFPATACLVAERLGAKKAAGFDLQAACTGFLYGVATAAQFIATGIYKNALVIGGETLSKILNWEDRGTCILFGDGAGAAVLQPVEEGYGFLGYDLGMDGAGGSLLTMPGGGSMHPASAETVAKKMHTIQMAGSEVFKFAVRIMGETALKALDKAGLGIGDVDCLIPHQANTRIVDAAVKRLGIDAGKVVVNLDRYGNMSAASIPVALDEAARSGRLNYGDIMVMVGFGGGLTWGAAVVKWSKRGV

SEQ ID NO: 88429 - DNA, 1029 bp, Synechococcus sp. RS9916
  CDS (1)..(1029): transl_table=11
ttggctggatcagcaccactctccggaccctccggcggcgtggccctggtggccagcggaagtgcccgcggtgagcaacagatcagcaacgatcaactcgggcaacgggtcgacaccaacgacgaatggatccgcacccgaaccggcattcaggcccgtcgcatctgcgggcctgatcaatcgctctccggcctggctgccgatgctgggcgagaagccctgtccatggcgggatgggacgccgacagcctcgacctggtgctgctggccacctccacccccgatgacctgttcggctcagcgccgaaagtgcaggctctgctgggcgcccgcaacgccgtggccttcgatctcaccgctgcttgcagtggctttctgttcgcgctgatcacggcatcgcagttcctgcgcaccggagccatgcggcgggtgctggtgatcggggccgaccaactgagcagctgggtcgactgggacgaccggcgcagctgtgtgctgttcggcgatggcgctggagccctggctctggaggcgtgtccagcggatcaagatggcctgctcggcttccagatgcgcagcgatggcagtcgcggcgaatgtctgaacgtgccccaaagccgcgatcgccgacccctagtggatggcagcagccatcagggcggccactacgaaccgatccagatgatcggccaggaggtctacaaattcgccgtccgggaagtgccggcgatcctcaaggcgctgctgcaagacacagccaccagtgccgatcaactcgactggttgttgctgcatcaggccaatcaacgcatcctcgatgccgtcgcggatcggtttgccattccccacagccaggtgctcaccaacctggccaactacggcaacacttcagcagccacgatcccgctgatgctcgacgaggccgtgcgcgacggacgcattcagcctggtcatcgcatcgccagcagcggcttcggtgcgggcctcagctggggtgcagctctcttgcgctggcagggcccctcgtag

SEQ ID NO: 88430 - protein, 342 aa, Synechococcus sp. RS9916
MAGSAPLSGPSGGVALVASGSARGEQQISNDQLGQRVDTNDEWIRTRTGIQARRICGPDQSLSGLAADAGREALSMAGWDADSLDLVLLATSTPDDLFGSAPKVQALLGARNAVAFDLTAACSGFLFALITASQFLRTGAMRRVLVIGADQLSSWVDWDDRRSCVLFGDGAGALALEACPADQDGLLGFQMRSDGSRGECLNVPQSRDRRPLVDGSSHQGGHYEPIQMIGQEVYKFAVREVPAILKALLQDTATSADQLDWLLLHQANQRILDAVADRFAIPHSQVLTNLANYGNTSAATIPLMLDEAVRDGRIQPGHRIASSGFGAGLSWGAALLRWQGPS

SEQ ID NO: 88431 - DNA, 1074 bp, Alteromonadales bacterium TW-7
  CDS (1)..(1074): transl_table=11
atgccatacgcacatatcactggttggggcaaatgcataccaccagcaagtattagcaacgatgaaattagcgaaatagttgataccaccgacgagtggatcaccacgcgtactggcatcaaatctcgccgtgtaagccatgtaagcacggcagagctggcaactgttgcagcaaaacacgcacttgcttgcgcaggtattgacgcaaaagacatagatcttgtcatacttgcaacctgtacgccttcaacagttgttgcaaatacggcatcccaagtgcaaaaaaatattggcgcaacaggcgcagccgccatggatacgaatgctgcgtgttctggctttttatacgcattacaagctgctactgcgcaaattcaagcaggcatgatcaaaaaagctgtcgttattgctgctgaacgaatgacttggtatgtaaactgggcgcgccgcgacagtgcagtgctatttggtgatggcgctggtgctgttgtactagaagctgcagaaacaccggcaggtttacttggcactaaaacagggtgcgatagtgaagaccgcgacattcttcatattactaactttggtagtgatttgaacaaatatgaacccattggcccgtctgatctgctatttgaaggccgagagatattcaagcgtgccgtaaaaggtatgagtgaagcctgtgacgacgttctcgagcaagctaatttaagcctagacgacataaacgtactagtaccacatcaggctaatttacgcataattcaggcaatccagcaccgtttaaaagtacctgatgaaaaagtaatggttaacattgcagattatggcaacacatcagctgcaaccattgctattgcgctatgtgaagcagttgaacaagggttaataaagcctcattcaaatattatgtctgcggcttttggcgcgggtttaacatgggctgcaagctacataaaatggggcgaacgtgtaactccaattagcgttagcgacgcacagttagcaccttgcacccaaacaggtttagagcttgtggcgccagctgtaaaagcatgtaaagacgctgaataa

SEQ ID NO: 88432 - protein, 357 aa, Alteromonadales bacterium TW-7
MPYAHITGWGKCIPPASISNDEISEIVDTTDEWITTRTGIKSRRVSHVSTAELATVAAKHALACAGIDAKDIDLVILATCTPSTVVANTASQVQKNIGATGAAAMDTNAACSGFLYALQAATAQIQAGMIKKAVVIAAERMTWYVNWARRDSAVLFGDGAGAVVLEAAETPAGLLGTKTGCDSEDRDILHITNFGSDLNKYEPIGPSDLLFEGREIFKRAVKGMSEACDDVLEQANLSLDDINVLVPHQANLRIIQAIQHRLKVPDEKVMVNIADYGNTSAATIAIALCEAVEQGLIKPHSNIMSAAFGAGLTWAASYIKWGERVTPISVSDAQLAPCTQTGLELVAPAVKACKDAE

SEQ ID NO: 88433 - DNA, 1456 bp, Allium porrum
  CDS (83)..(1291)
cgacagctcaatccattcaaacctattccattgtagtcccattagtttcagaccctgcaacatttacaaaactcagtttataatggctgctgcttcgatcggatttacaacaccgtctgctaatccgaggattagagcgagaaactttggaaattttggtgctttaggatttttatgtttcaaatctgagcggagtttcaagaggaattgggttggatgctgttctgtttctgaatcttcttcttctttgtcctattcgacaaatcgtacaaaaagattagttggcatgggttccaagctaatcggaagtggttcggctgttccaaagcttcaaatttcaaatgatgacatggcaaaaattgttgaaacttcagatgagtggatatcggttcggacagggattcgtaatcgccgtgttcttacaggaaatgaaaatttaaatggcctggctgtcgaggctgcaaagggggctcttcgaatggctgaagttgaggcggagaacgttgaccttgttatattttggtcttccacaccggatgatctctttggtggtgcttctcggatccaaggcgatctaggctgcaaaagtgccttagcatttgacatcacagctgcatgcagtgggtttgttgtaggattgatcactgccactcgctttataaagggtggtggctacaagaatgttctggtgattggagcagatgctttatcccgctttgttgattggactgatagaggaacgtgcattctattcggtgatgctgctggagcagtcttagttcaggcgtgtagtgaagatgaagatgggttgcttggctttgatttgaacagtgatggttctggtcaaaggcatttgaatgctttcgtatcagatgctgagcatgaagccatctcaaacacaaatggtgcgcctttattccctcctaaaaggtcaacatactcttgtataaaaatgaacggaaatgaggtattccgttttggttggcgttgtgtaccacagactattcaagcctcgcttgatgatgctggtttatcaagttccaatatcgactggcttctacttcaccaggcaaaccaaaggataatagatgcagtatcgacccgcttagaaattccatcggagaaagtaatatcaaatctagcaaactacggaaacacaagtgctgcatcgattcctttagcgttagatgaggctgttaggaacgggaaagtcaaagcaggcgatactattgctactgctgggtttggggctggtcttacgtggggatccgcaatcgtcaaatggggctgagaaatcgggagtctacatgcgtggaggatctatcatacttgaagcaaatgctttttgttcttgtttgtgtaatattattttgtttctttgttagtaaattttggttaatttggtgttatgtaagtgtaactatataacacatgtatggttcagtgcttttggatt

SEQ ID NO: 88434 - protein, 402 aa, Allium porrum
MAAASIGFTTPSANPRIRARNFGNFGALGFLCFKSERSFKRNWVGCCSVSESSSSLSYSTNRTKRLVGMGSKLIGSGSAVPKLQISNDDMAKIVETSDEWISVRTGIRNRRVLTGNENLNGLAVEAAKGALRMAEVEAENVDLVIFWSSTPDDLFGGASRIQGDLGCKSALAFDITAACSGFVVGLITATRFIKGGGYKNVLVIGADALSRFVDWTDRGTCILFGDAAGAVLVQACSEDEDGLLGFDLNSDGSGQRHLNAFVSDAEHEAISNTNGAPLFPPKRSTYSCIKMNGNEVFRFGWRCVPQTIQASLDDAGLSSSNIDWLLLHQANQRIIDAVSTRLEIPSEKVISNLANYGNTSAASIPLALDEAVRNGKVKAGDTIATAGFGAGLTWGSAIVKWG

SEQ ID NO: 88435 - DNA, 1906 bp, Perilla frutescens
  CDS (331)..(1536)
aaaagtagaatcgttatagagacacaattttctgtatctatccatctactagcttaacgtgcatttgcatgcgcttatctgtgtctgtgataaaaaagagggaaaaaagtttttgcatcggaattttcatcaattcttctaattcaatctccggaaaccccaaaggattttagtaaagatcccttgttctttccgcctctgcttctaataatttctctcaatttaactccattgttacttgcttcaaattaacccgataataattgtataaataaagcttaaagatttcaactttattgtatccatagcaaatatttaaatttctaattcatggcgaatgcatctggactgttcactccggcggcgcccagtgtgaggaggagatgttcgccatgtataggcatttatcgatctgggttttggttctccgagggcgtgtccaggagaatagtgtgctccagcactactcagggagcggagaagctttccccttctgaatctagagcttccaggcttgttagcagaggctgcaagttagttggatgtggctctgcagtaccaagtcttcagatatccaatgatgatctatccaaaattgttgatactaatgatgaatggatatcagtgcgaactgggattcgtaatcggagaatactttctggaaaagatagtttaacagatctggctgtagaggccgcaaggaaagctctcgagatggcagaagttgatcctgatgaggtggaccttgtgttgatgtgtacttcaactccggaggatttatttggtagtgctccacagattcagaaagcccttggatgtaaaaacaatccattagcttatgacattactgctgcctgtagtggttttgtgttgggcctcgtttcagctgcttgctacattaaagggggtggattcaaaaatgttctggtgatcggggctgatgccctatcccgctatgttgattggactgacagaggatcctgcatcctctttggtgatgctgcaggtgctgttttagtacaggcctgtgagagtgacgaggatggtttatttgcttttgacatgcatagtgatggtgaagggcaaagacacttaaatgccaccatgaaggaaaaggagaaagaaaatcatgaagtaggtacaaacggttctctcttgggacttcttccaaaaggctcctcatactcgtgtatccagatgaacggtaaagaggtcttccgctttgctgttcgtgtcgttccacagtcaattgaattagctctggctaaggcaggtctaaccgggtcgagtatagactggttgcttcttcatcaggcgaaccaaaggattatagatgcagtagcaacacgtttagaactcccaccggaacgtgtcatatcaaacttggcaaactatgggaacacgagtgcagcatcgattccgttggcgttggacgaagctgttaggagcggtaaggtgcaggcgggtcatactatagctgctgctgggtttggagctgggcttacatggggatctgctatcgtcagatggggatgatcaatggcaatgcatttgattctgcaattttgtgagtttgtaatttcaacgtagccccgtttccatttgtgtaatcacacaatcttatcccaaactcctcttctctattttgtgtttacatctcctggatttcactgacaacagtaatatttttttcttttttccttttccatagtctctgattatgtttcttttagtttattttatttttggcgggcaattctcactcatcaggttaatgtattgatttgtgtatgactttatagattatgtattcggggatgcataatctcaattgcagtcttacattagagcaactgcttttgactaataatattgtatttaaaaatgttaaaaaaaaaaaaaaaaa

SEQ ID NO: 88436 - protein, 401 aa, Perilla frutescens
MANASGLFTPAAPSVRRRCSPCIGIYRSGFWFSEGVSRRIVCSSTTQGAEKLSPSESRASRLVSRGCKLVGCGSAVPSLQISNDDLSKIVDTNDEWISVRTGIRNRRILSGKDSLTDLAVEAARKALEMAEVDPDEVDLVLMCTSTPEDLFGSAPQIQKALGCKNNPLAYDITAACSGFVLGLVSAACYIKGGGFKNVLVIGADALSRYVDWTDRGSCILFGDAAGAVLVQACESDEDGLFAFDMHSDGEGQRHLNATMKEKEKENHEVGTNGSLLGLLPKGSSYSCIQMNGKEVFRFAVRVVPQSIELALAKAGLTGSSIDWLLLHQANQRIIDAVATRLELPPERVISNLANYGNTSAASIPLALDEAVRSGKVQAGHTIAAAGFGAGLTWGSAIVRWG

SEQ ID NO: 88437 - DNA, 1904 bp, Perilla frutescens
  CDS (271)..(1473)
tgcatgttctgtgtgtgaaaatatatgtacagagagagatagagagggagacggtgaatatatttgcatcggttgttccatcaaaaaaaaaaaaggattttcttcttcggaaataccgaggattagtaaattcgttgtggtctccctttcttgtttttctgggattcatcctttcttgaaattcactttttcgggctcctatttttggtacaaataagctttagataataaagattcaatcctttttcagtctctaataaaataaattgaatggcgaatgtatctgggttggttgttccaacagttcccagtttgaggagaagattttctccttcatcagacatttatcgatctgggttttggttctacgacggcgtttcgagacgaacagtgtgttccagtgctgctcagggtgcggagaagctttcccctgctgaatctaaagtgcccagacttgccagcaaagggtgcaagttagttggttgtggttctgcagtaccaagtattcaaatatcgaatgatgacctctcaaaaattatcgatacttctgatgaatggatatctgtccggaccgggatacgaaatcggagaatactttctcgaaaagacagcttgacggctctggctacagaggctgctcagaaagctctccagatggctgaggttgatcctgatgacgttgacctcgtgctgttgtgtacttcaactccagaagatttatttgggagtgctcctcagattccaaaagcacttggctgcaaaaacaatccattggcttatgatattacggctgcctgcagtggcttcttacttggactagtttcagctgcttgctatattcgagggggtggcttcaataatgttcttgtgattggggctgatgctctatctcgctacgttgactggaatgaccgaggatcttgtattctctttggcgatgctgctggtgctgttttagtacagtcctgtgatagtgaagaagacggtttattttcatttgacatgcacagtgatggtggaggtcagaggcacttaaacgccagcatgaaggaaaataaaatagatcatgagttgggttcaaatggttcattccttggacttctgcctaaaggttcctcgtattcctgcatccagatgaacggtaaagaggtgttccgctttgctgtccgtgttgttccacactcgatcgaactggctctagagaaggcgggtcttgctgcgtccaatatagactggctgctactgcatcaggcgaaccagagaataatcgatgcagtagccacgcgcctggaggttccaccggagagagtcatatctaacttggcgaattatggcaatacgagtgctgcctcgattccattggcattggacgaagctgtaagaagtggcaaggtgcaagctggtcacaccattgcaactgctggttttggagctgggcttacatggggctcagctatcgttcgttggggatgatcgatacattcgtatccaattttgtgagttctgtttgaatgctcattcccacctcatgttacgcttaaggcactcgcgattctctctctctctctctctctctcgctagtagttttttccaacttcttgacctcattcaattactagtttatgacttggttagccatggaagatggagaaattgtgaaacgagtctctctctctctctctctctctctctctctctctctctctctctctctctctctctctctcccccccctaattttatgactttgttggccatggaagatggaggagattggtacgagttgatgttgatctggtgttatttaatttgttgggcagtgtaaactgcaactgtaaattaacaatctatttttctgatatggaaaaattccctcttttgtagcaaaaaaaaaaaaaaaaaa

SEQ ID NO: 88438 - protein, 400 aa, Perilla frutescens
MANVSGLVVPTVPSLRRRFSPSSDIYRSGFWFYDGVSRRTVCSSAAQGAEKLSPAESKVPRLASKGCKLVGCGSAVPSIQISNDDLSKIIDTSDEWISVRTGIRNRRILSRKDSLTALATEAAQKALQMAEVDPDDVDLVLLCTSTPEDLFGSAPQIPKALGCKNNPLAYDITAACSGFLLGLVSAACYIRGGGFNNVLVIGADALSRYVDWNDRGSCILFGDAAGAVLVQSCDSEEDGLFSFDMHSDGGGQRHLNASMKENKIDHELGSNGSFLGLLPKGSSYSCIQMNGKEVFRFAVRVVPHSIELALEKAGLAASNIDWLLLHQANQRIIDAVATRLEVPPERVISNLANYGNTSAASIPLALDEAVRSGKVQAGHTIATAGFGAGLTWGSAIVRWG

SEQ ID NO: 88439 - DNA, 1453 bp, Jatropha curcas
  CDS (21)..(1223)
ataggttgttcatagtatagatggcaaatgcatccggtttctttagtccttcagttccaagcctaaggagaaaggttaagccttcaatagagatgactggatctgggtttttctcttgcggaagaatatccagaagggtattctgctccagctccattgaaggtgcagagaagctttccacttctcaatctcaaatacccaggctcattagtaatggttgcaagttagttggtagtggttcagcagtacctgctcttcagatttcaaatgatgaccttgcaaaggtagttgatacttctgatgaatggatatcagttcgaactgggattcgcaatcgacgagttcttacaggaaaagatagtttgatttccttagccactgaggcagcaagaaaagctcttcagatggcagaggttgaacctgatgatgtggacctggtgttgatgtgcacatctacaccagaggatctttttggtagtgctcctcagatcccaaaggcacttggctgcaaaacaaatcctttggcttatgatattacagctgcttgtagtggatttgtattgggcctagtttcagctgcttgtcacattaggggaggtgggtttcgaaatgtactggtaatcggtgctgatggtctttctcgatatgttgactggacggatagaggaacttgtattctctttggggatgctgctggtgctgtgcttgtacaggcctgtgacagtgaggatgatggtttatttagttttgatttgcatagtgatggtgatggccagagacatttgaatgccggcattacagaaagtgaagtggatcatgcattgggatctaatggttcagttttaggcttccctcccaggcgtgcctcatattcctgcattcagatgaacggaaaagaggtcttccgctttgctgttcgatgtgtcccacaatctatagagtctgctcttgagaaggccggtctcacaggatctagcattgattggttactgctccatcaggcaaaccagaggatccttgatgcagttgcgacacgattagaagttccaccagaaagggtcatatcaaacttagcaaattatgggaacacgagtgctgcttcgattccattggcattggatgaagcggttcgaagtgggaaagtgaaggcgggccacactattgcaactgcaggttttggagctggtctaacttggggttctgcaattattagatggggctgaaggttttcaatgactagtataaaagaagaatgagaattactttgtaacgtgaagtcaaaccattcttgccctccctttctttctatatgtattacagataatcagagatttcgctaacgcaaaatctctcaacagctcccttttgtttgcttggtttctgttgtcacatatatttttgcagctttaattaattattctttttccttttaaaaaaaaaaaaaaaaaaaaaa

SEQ ID NO: 88440 - protein, 400 aa, Jatropha curcas
MANASGFFSPSVPSLRRKVKPSIEMTGSGFFSCGRISRRVFCSSSIEGAEKLSTSQSQIPRLISNGCKLVGSGSAVPALQISNDDLAKVVDTSDEWISVRTGIRNRRVLTGKDSLISLATEAARKALQMAEVEPDDVDLVLMCTSTPEDLFGSAPQIPKALGCKTNPLAYDITAACSGFVLGLVSAACHIRGGGFRNVLVIGADGLSRYVDWTDRGTCILFGDAAGAVLVQACDSEDDGLFSFDLHSDGDGQRHLNAGITESEVDHALGSNGSVLGFPPRRASYSCIQMNGKEVFRFAVRCVPQSIESALEKAGLTGSSIDWLLLHQANQRILDAVATRLEVPPERVISNLANYGNTSAASIPLALDEAVRSGKVKAGHTIATAGFGAGLTWGSAIIRWG

SEQ ID NO: 88441 - DNA, 1149 bp, Ostreococcus tauri
  CDS (1)..(1149)
atgctcccgtcgtcatcgctcgccaccgcgcgcgccgcgcgcgtcgtcgtcgttcgcgagcgcgcgctcgggcgctcgagcgcctcgcgtgcgtcggtggtgaatcaaagaggtcgagcgacgacgacgcggacgagcgtgcgcgcgagcgcgtccttctccaccgcgggggcgcggatttctggcacggggaaggctttgccggagaagtacctgacgaacgacgacctgtcgaggctggtggagacgaatgacgagtggattacggctcggacgggcatacggaagcgacacgtgataagcggcgatgaaaccctgacgtcgctgtgcgcgaaggcggcgatgcaggcgctggatagggcgaacgtgaaggcggaggatgtggacctgatcatactggcgacgtcgagtccggatgatatctttggaagcgcgtgcacggtgcaggcagcgattggggcgaaaaaggcgctcgcgttcgatctcacggcggcgtgcagtggattcgtgattgggttggtgaacggcgcgcaatacatccgcgcgggggggtttaaaaacgtgctcgtgatcgggggcgacgtattgagccggtacgtggactggcgcgatcgagggacgtgtattttattcggagacggcgctggggcggtggtgttgacggcgaccgacgcggacgcatgttcgctcaagggattcgatatgcactccgacgggagtcaaaaccatcacttgatagcacaatacatgggggagaagggtaagcccatgagcgagggcgcgtcgagctcggcgtcgttttgcaacatctccatgaacgggcaagacgtcttcaagtttgccgtgcgaacggtcccgatgacggtgaacaaatccctcgaagccgcgggcatgtccgccgaagatatcgataagttagtcttacaccaagccaatcagcgcatcatcgacagtgctgcgcagcgatttggcttgactgaagacaaggtagttagcaacattgccgagtatggcaacacctccgccggctctgtgcccatcgcgctctgcgaagctgttgagcagggcgccatcaagaccgacgatgttatcgccttcgccggtttcggcgccggtctcacctgggccagctgcatctggaagttttaa

SEQ ID NO: 88442 - protein, 382 aa, Ostreococcus tauri
MLPSSSLATARAARVVVVRERALGRSSASRASVVNQRGRATTTRTSVRASASFSTAGARISGTGKALPEKYLTNDDLSRLVETNDEWITARTGIRKRHVISGDETLTSLCAKAAMQALDRANVKAEDVDLIILATSSPDDIFGSACTVQAAIGAKKALAFDLTAACSGFVIGLVNGAQYIRAGGFKNVLVIGGDVLSRYVDWRDRGTCILFGDGAGAVVLTATDADACSLKGFDMHSDGSQNHHLIAQYMGEKGKPMSEGASSSASFCNISMNGQDVFKFAVRTVPMTVNKSLEAAGMSAEDIDKLVLHQANQRIIDSAAQRFGLTEDKVVSNIAEYGNTSAGSVPIALCEAVEQGAIKTDDVIAFAGFGAGLTWASCIWKF

SEQ ID NO: 88443 - DNA, 1872 bp, Elaeis oleifera
  CDS (266)..(1492)
agtagttgagttgtagtttcggggactactcctctcgtttcggcctcattgcccctcggcggagcttcccaagctgtgggcggagccagagaaagagaacgagaacgagacttcctctccaagctattaatctcgtcgccatgcgctccaattcacagtattcacttctatagtcccctccttcgcttcacctgctcttctgagatctcgaggcgatccatcccattttcgatcttgttttccctttctcctgtcgccgatctcgatgtctaacgctcccgggctcgtttctccgtccaccccctgcttccgcgggagagatctggcgccttcgggcctcgtccgatcaggtctcttcatggtggcgaggaatgcgaggagggcgccgctcaggtgctgcgcccccaccgtgggtggcggtgtggaggaccacgtcctaggagccgccgctacctcttccaagcctcgtcttccaagagttgttggaatgggctcaaagcttgttggatgtggatcggctgtgccaaagctaacgatttctaacgatgacctgtcacaaattgtcgaaacttcagatgaatggatttctgttcgtacagggattcgtaatcgacgtgtcctcacagggaatgaaacactgagtgggttggctgtggaagcagcaaagggggctcttcaaatggctcaagtagagcctgatgatgtcgaccttgtaattatgtgcacatctactccagatgacctttttggatgtggtgctcgggtacagagagacttaggatgcaaaaatgcttgggcttttgatgctacagcagcttacagtgggtttgttgtgggcctggtcacagcaactcgttttattaaaggtggtgggttccaaaatgtcctagtaattggtgcagatgctctctcacgatatgtagactggacagatagaggcacatgcatactttttggtgatgctgctggtgctgtgctagtccaagcctgcagtagtgaggaagatggcttgcttggctttgatttccacagtgatggtcatggccagaagcacctaaatgcaacagtcaaggatggggaaactgagctcatctcaaacaataatggtgcacctcttttccccccaaagagatcatcattttcttgcatccaaatgaatggcaaggaggtcttccgctttgcagtgcggtgtgggccacagtctattgaagctgcacttctagaagctggcctcacaagttccagcattgactggctgctgcttcatcaggcaaaccaaaggatcatcgatgctgtggccacacggttgcagatgcccccgaacaaggtcatttcgaatttggctaactatggaaatacaagtgctgcatccattcctttggcattagatgaggcagttcggagtggaaaggtgcaggccggcaataccattgccgctgcaggttttggagctggagttacatggggctgtgcaatattaaggtggaaatgaaactttcacctcaaaatcgatggagggaaaagttgaaaagagttattagggagggtggatcattaagctatagcccagtttggctttccctcatgagatcagggtgaaagaggggtttcgctatgttttaggccaagcttttgttatcagttttccaagtttcctcttattttatttcaagtggaactatgagctgccaagtatttatttatttttccctaggtcataatgggtgctgaaccatttgtgtaatggaatggcgatcaaaagcctttgctgctgtcttcccttgactactctcaaacaatgctgcctgtaactttgatcttctggcatatacatcgtgatacaatcagctttttcaaaaaaaaaaaaaaaaa

SEQ ID NO: 88444 - protein, 408 aa, Elaeis oleifera
MSNAPGLVSPSTPCFRGRDLAPSGLVRSGLFMVARNARRAPLRCCAPTVGGGVEDHVLGAAATSSKPRLPRVVGMGSKLVGCGSAVPKLTISNDDLSQIVETSDEWISVRTGIRNRRVLTGNETLSGLAVEAAKGALQMAQVEPDDVDLVIMCTSTPDDLFGCGARVQRDLGCKNAWAFDATAAYSGFVVGLVTATRFIKGGGFQNVLVIGADALSRYVDWTDRGTCILFGDAAGAVLVQACSSEEDGLLGFDFHSDGHGQKHLNATVKDGETELISNNNGAPLFPPKRSSFSCIQMNGKEVFRFAVRCGPQSIEAALLEAGLTSSSIDWLLLHQANQRIIDAVATRLQMPPNKVISNLANYGNTSAASIPLALDEAVRSGKVQAGNTIAAAGFGAGVTWGCAILRWK

SEQ ID NO: 88445 - DNA, 1032 bp, Streptomyces echinatus
  CDS (1)..(1032): transl_table=11
atgtcgaagatcaagcccagcaagggcgccccgtatgcgcgcatcctcggcgtcggcggctaccggccgacccgggtggtgccgaacgaggtgatcctcgagaagatcgactcgtccgacgagtggatccgctcccgctccggcatcgagacccggcactgggccggtcccgaggagacggtcgccgcgatgtccgtggaggccgccggcaaggcgatcgccgacgcgggcatcgacgccgagcagatcggcgcggtggtcgtctcgaccgtctcgcacttcagccagaccccggccgtcgccaccgagatcgccgacaggatcggcaccgacaaggccgccgccttcgacatctcggccggctgcgcgggcttcggctacggcctgaccctcgccaagggcatggtggtggaaggttccgccgagtacgtgctcgtcatcggtgtggagcggctgagcgacctgaccgacctggaggaccgcgcgaccgcgttcctgttcggtgacggcgccggcgcggtcgtggtcggcccctcgaaggagccggcgatcggcccgaccgtgtggggctccgagggcgacaagtccgggaccatcaagcagaccgtcccctgggaccgcttccacgtcggcgacgtctccacgctgcccctcgacagcgagggcaacgtcaagttccctgcgatcacgcaggagggccaggcggtgttccgctgggccgtgttcgagatggcgaaggtcgcccagcaggcgctggacgcggccggaatcagcccggacgacctggacgtcttcatcccgcaccaggccaatgtgcggatcatcgactcgatggtgaagacactgaagctgccggagcacgtcacggtcgcccgtgacatccgcaccaccggcaacacctcggccgcctcgatcccgctcgcgatggagcggctcctggcgaccggggaggcgaagagcggcgacaccgcgctcgtcatcggattcggggcgggtctcgtctacgccgccacggtcgttaccctcccctag

SEQ ID NO: 88446 - protein, 343 aa, Streptomyces echinatus
MSKIKPSKGAPYARILGVGGYRPTRVVPNEVILEKIDSSDEWIRSRSGIETRHWAGPEETVAAMSVEAAGKAIADAGIDAEQIGAVVVSTVSHFSQTPAVATEIADRIGTDKAAAFDISAGCAGFGYGLTLAKGMVVEGSAEYVLVIGVERLSDLTDLEDRATAFLFGDGAGAVVVGPSKEPAIGPTVWGSEGDKSGTIKQTVPWDRFHVGDVSTLPLDSEGNVKFPAITQEGQAVFRWAVFEMAKVAQQALDAAGISPDDLDVFIPHQANVRIIDSMVKTLKLPEHVTVARDIRTTGNTSAASIPLAMERLLATGEAKSGDTALVIGFGAGLVYAATVVTLP

SEQ ID NO: 88447 - DNA, 1284 bp, Oryza sativa
  CDS (1)..(1284)
atggtcaccgcctccggcctcgcgccaccgcggctggcggtctcctgcccgcgtgcggcggggcgcggctgcggcggacaccaccgggttggcttcctccgatccgctcccgtggcgttggcggggcccgcggccgcgcagctccggtgctgcgcctccaccgtcgacgacggcgtcgtctccgccgcggcggcccccaagccccgcctccccaggagtctaaattattttcgactgtggaatgaactcataaaattaatgggaacctgtagggtcgtcggtatgggttcaaaactcattggatgcggatcggccactccatcgcttagcgtttcaaatgatgacctttctaaaatagttgaaacatcagatgaatggatcgcagcacggactgggattcggaataggcgagttctttcaggaaatgagacactgcgcgagctttcagtacaggcagcaaaaaaagctcttgagatggctcaagtaaatgctgatgatgttgaccttgttctcctttgcacgtctaccccagatgatctgtttggaggtgctgctcaggtgctggcggaggtgggatgcgcaaatgcatttggctttgatatcactgctgcatgtagtgggtttattattggtttaattacggctactcgttttatcaaaggtggaggcatccggaatattctagtaattggtgccgatgctctttcacaatttgtggattggacagacagaggtacatgcatcctctttggtgatgctgctggtgctgttttggttcaggcatgcagtgctgatgaagatggcttgctaggtttttgcgttcaaagtgatggcaacggacaaaagcacttaaattgtgtctcgtcgcatgttgagtctatcctgtcgaagaccaatggtgtccctagcttcccacctaaaaaggcaaccttctccaacattgaaatgaatggaaaggaggtttttcgctttgctgtgcgatgtgtgccacaatctattgagaaggcattggaagaggctggtttacctgcttccagtattgattggttgttgctgcatcaagctaatcagcggattattgatgctgctgccagtaggttggatatcccatctgacaaagttatttcaaatcttgctaattacggaaacaccagtgcggcctcaattccattagcattagatgaggctgttcgagctggcaaggtgaaggcaggcgatgttattgcagcatcaggttttggtgctggacttacatggggttcagctattgtcaaatggtgctaa

SEQ ID NO: 88448 - protein, 427 aa, Oryza sativa
MVTASGLAPPRLAVSCPRAAGRGCGGHHRVGFLRSAPVALAGPAAAQLRCCASTVDDGVVSAAAAPKPRLPRSLNYFRLWNELIKLMGTCRVVGMGSKLIGCGSATPSLSVSNDDLSKIVETSDEWIAARTGIRNRRVLSGNETLRELSVQAAKKALEMAQVNADDVDLVLLCTSTPDDLFGGAAQVLAEVGCANAFGFDITAACSGFIIGLITATRFIKGGGIRNILVIGADALSQFVDWTDRGTCILFGDAAGAVLVQACSADEDGLLGFCVQSDGNGQKHLNCVSSHVESILSKTNGVPSFPPKKATFSNIEMNGKEVFRFAVRCVPQSIEKALEEAGLPASSIDWLLLHQANQRIIDAAASRLDIPSDKVISNLANYGNTSAASIPLALDEAVRAGKVKAGDVIAASGFGAGLTWGSAIVKWC

SEQ ID NO: 88449 - DNA, 1678 bp, Pisum sativum
  CDS (180)..(1373)
gaattccgtttttcttgtctttcatatgttcaggcttatgtctctttccacttcattttcttcttcattcttctcttcaatataatataatttcttaacatatacatataaatttctctgcttgtatttgtatttgtatagcataatttgtagcactttggtaggtgttgttgttgtaaatggcaaatgcatctggcttgttttctactccttccgttcctaacttcactctaagggttcgtcctttctcttcaattcatcgattccaaggtttctccaccaaagttttttgctctggaactatcgaaggagctcaaaactatgcttccccaacccaatctcgaatacccaggcttgtaagtcaagggtgcaagttggttggatgtggttctgctgtgcctgctcttcagatttcgaacgacgagctttcgaaaattgttgatactaatgatgaatggatatctgttcgaaccgggattcgaaggcgacatgttctttccggtggagatagcttgataacattagcggcagatgcggctaagaaagcacttgagatggcaaaggttgatcccgatgatattgaccttatattgatgtgcacgtcgacaccggaggatctttttgggagtgctccacagattcaaaaacaacttggctgcacgaaaaacccgttgtcttatgatattacggctgcttgtagtggatttgtgttgggtctattatcagcagcttgtcacattagggggggtggatttcgcaacgttctagttattggagctgatgctctttcacgatatgttgattggacagacagaggaacctgtattttgttcggtgatgctgctggtgctgtagtggtacaggcatgtgacagcgaggaagatggtttattcggttttgacgtgcatagtgatggtaatggtataagacatttgaatgctggtattaaagaaaacgagtcaaataacgcattggattcaaatggttctgtgcggagttttcctcccaagaagtcgtcgtattcatgcattcaaatgaacggaaaagaagtctttcggtttgctgtgcgatgtgttccacagacgatcgaatccgcccttaaaaaggctggtctccctgcatctagcattgattggttacttctccatcaggcaaaccaaaggattatcgatgcagttgcgacacggttagaaatcccttccgaacgggtcatatcgaatttagctaactacggtaacacaagtgcagcttccattcctctcgcattagatgaagcagttagaagtggaaaagttaaagcaggccaaactattgccgctgctggtttcggcgctggtcttacttggggttcggcaattgttcgttggggctgaatcgccgaatcgcggcaacattgcattagcagatagagaagattttcaagtgcatgtgcatgtgaagctctctaagtaaaccagatttctaaaacatattggtgagttagcacaaggataataaccagaacatcctgcactgccacaacatcaacattgttccttttttttttgtcttcaattcatatattattattggtcatgttttttcaaataccatttttttgggatgtgtatctgttattgagatttatttgaagttaaaaaaggcttattatttggtatgttaaaaaaaaaaaaaaaaa

SEQ ID NO: 88450 - protein, 397 aa, Pisum sativum
MANASGLFSTPSVPNFTLRVRPFSSIHRFQGFSTKVFCSGTIEGAQNYASPTQSRIPRLVSQGCKLVGCGSAVPALQISNDELSKIVDTNDEWISVRTGIRRRHVLSGGDSLITLAADAAKKALEMAKVDPDDIDLILMCTSTPEDLFGSAPQIQKQLGCTKNPLSYDITAACSGFVLGLLSAACHIRGGGFRNVLVIGADALSRYVDWTDRGTCILFGDAAGAVVVQACDSEEDGLFGFDVHSDGNGIRHLNAGIKENESNNALDSNGSVRSFPPKKSSYSCIQMNGKEVFRFAVRCVPQTIESALKKAGLPASSIDWLLLHQANQRIIDAVATRLEIPSERVISNLANYGNTSAASIPLALDEAVRSGKVKAGQTIAAAGFGAGLTWGSAIVRWG

SEQ ID NO: 88451 - DNA, 1778 bp, Glycine max
  CDS (135)..(1328)
attcatttcttcgttcttctccaccatttaatacatattattatactacaaaaacataacctccagaacacatttatatattcccttgttgcatatatactttgttgttgttgttgttgttgttcttcttgtaaatggcgaatgcatctgggttcttcagcccttcggttccccacttcaaagtgagggttaagcctctcaccactgccattggattctccgccaaagtcgtttgcgttggaaacatcgaaggagctgaaaaacatgcttccaccgtttccccttcttcccaatctccaatacccaggcttgtcagcaaagggtgcaagttagttggatgtggctctgctgtgccagctcttcagatttctaatgacgatctttcgaaaatggttgatactaatgatgaatggatatctgttcgcaccgggattcgtagacggcgtgttctttcaggcaaagataacttgacaggtttagcagtagaggcagctaggaaagctcttgagatggcaaaggtagaccctgatgatcttgacctaatattgatgtgcacatctacgccagaggatctttttggtagtgctccacagattcaaaaacaacttggctgcaaagcaaatccattgtcttatgacattacagctgcatgtagtggatttgtgttgggtttaatatcagctgcttgtcacattaggggaggtggatttaataatgttctagttattggggcggatgctctctcacgatatgttgattggacagacagagggacctgtattctttttggggatgctgctggtgctgtactagtacaggcctgcaacagtgaagaagatggtttatttggttttgatttgcatagtgatggcagtggtcaaaggcacttgaatgcttccattaaagaaaatgagtcaaataatgcattggattcaaatggttctgtgtttggctttcctcccaagcagtcctcatattcatgcattcaaatgaacggcaaagaagtctttcgctttgctgtacgatgtgtaccacagtcaattgaatctgcccttgaaaaggctggtctccctgcatctagcattgattggctacttctccatcaggcaaaccagaggattattgatgcagttgccactcggttagaactcccctcagaacgggtgatatcaaacttagctaattatggtaacacaagtgcagcttccattcccttggctttagatgaagcggttcgaagtggtaaggttaaggcaggccaaactattgcaacggccggcttcggtgccggtcttacttggggttcagcaattattcgttggggctgaatgcttttcttttacggcagaattgcaaatagagaagaatcagttgcaagtgcagctgtccaaataccccacattcttacacaattgtagaaaatggggtttggggaatttgcaaaaggattgatatcattaacatccagcactccctgaaattgtccctttcttttgtcttaaatttattttgtcttaaatttacattttccttgggcttcctttctcaattaccaatttttctttttccgagtcatgtatttgtcattcagatttattttaaacgaggcttactatttatgtttgtcaatggtacttgtaattaaaaatgcagcatgccaactgtttgcttgcttgtacttcaaacaaccttgtcaacactaagccaccactttgttttagttatttgttttttgatctaatgaattaaaatgggaagcaaaaaaaaaaaaaaaaaaa

SEQ ID NO: 88452 - protein, 397 aa, Glycine max
MANASGFFSPSVPHFKVRVKPLTTAIGFSAKVVCVGNIEGAEKHASTVSPSSQSPIPRLVSKGCKLVGCGSAVPALQISNDDLSKMVDTNDEWISVRTGIRRRRVLSGKDNLTGLAVEAARKALEMAKVDPDDLDLILMCTSTPEDLFGSAPQIQKQLGCKANPLSYDITAACSGFVLGLISAACHIRGGGFNNVLVIGADALSRYVDWTDRGTCILFGDAAGAVLVQACNSEEDGLFGFDLHSDGSGQRHLNASIKENESNNALDSNGSVFGFPPKQSSYSCIQMNGKEVFRFAVRCVPQSIESALEKAGLPASSIDWLLLHQANQRIIDAVATRLELPSERVISNLANYGNTSAASIPLALDEAVRSGKVKAGQTIATAGFGAGLTWGSAIIRWG

SEQ ID NO: 88453 - DNA, 1689 bp, Cuphea hookeriana
  CDS (201)..(1421)
gaattcggcacgagcttttgagctaataagccggtgacagacagctttctctgcgacggactccgcttcctgctgacaaccttgttgtctctccatagctaaagcaaggatttttattctcccccatcttgcgaaaggcgagaaattttctctgttgcttgctgctttggtgggattcaagagcaaaaagggctggaagaatggcgaatgcatctgggtttctgggtcattcagttccgaccttggggaggacaactcagtttcagcattcgatggcgtcgcatggatctgttttctgttcctcggactttattcccaagagggtattttgttgcagtgccgttcaaggtgctgacaagcaggcgtcgggtgattctcccactgaatatcgcacgcccagacttgtgagtagaggatgcaaattgattggatctggttcggctataccagctcttcaagtctcaaatgacgatcttgcaaaaattgttgataccaatgatgaatggatttctgtccgaacaggaatccacaatcgacgggttctaacgggtaaagatagccttacaaatttagcaacagaggcagcgaggaaagctctagaaatggcgcaggttgatgctgaagatgtggatatggtattgatgtgcacatccacccccgaggatctctttggtagtgctcctcagattcagaaggcgcttggttgcaagaagaatcctttgtcttacgatattaccgccgcttgcagtggatttgtgttgggtcttgtatcagctgcttgccacattagaggtggtggatttaacaatgttttagtgattggtgctgattccctctctcggtatgttgactggactgatcgaggaacctgtattctcttcggagatgcagccggtgctgtgctggttcagtcctgtgatgctgacgaagatgggctcttcgcttttgatttgcacagcgatggggatgggcagaggcacctaaaagccgcgattacagaaaatgaaattgatcatgccgtgggaactaatggatctgtatcagactttccaccgagacgttcttcatattcttgcattcaaatgaacggtaaagaggtattccgctttgcttgccgcagtgtgcctcagtcaattgaattagcacttgcaaaggccggtcttaatggatccaacattgactggctactgcttcatcaggcgaatcagaggatcattgatgcagttgcgacacgtttagaggttccacaggagcgagtgatctcaaacttggcaaattatggtaacacaagcgctgcatctatcccattggcactggacgaagctgttcggggtgggaaggtgaagcctggccacctgatagcaacagctggattcggcgctggactcacttggggttctgccatcgtcagatggggatgataagaatgaagctgcatccccctcttactcggctcaatcatcagtcccgtgtctcaacacagtaagaatcccggaacaccgacattttctgaatttttgcttccgtgatcaggaaaaaaaaaagagcaagagccatcacggagcaaggcaaatcaaatcagccaagcttcataatgttgcccttttacattcccttctttttgcatttgacattgcccatagaaataatttatgcttcctttatcaaaaaaaaaaaaaaaaaaaaaaa

SEQ ID NO: 88454 - protein, 406 aa, Cuphea hookeriana
MANASGFLGHSVPTLGRTTQFQHSMASHGSVFCSSDFIPKRVFCCSAVQGADKQASGDSPTEYRTPRLVSRGCKLIGSGSAIPALQVSNDDLAKIVDTNDEWISVRTGIHNRRVLTGKDSLTNLATEAARKALEMAQVDAEDVDMVLMCTSTPEDLFGSAPQIQKALGCKKNPLSYDITAACSGFVLGLVSAACHIRGGGFNNVLVIGADSLSRYVDWTDRGTCILFGDAAGAVLVQSCDADEDGLFAFDLHSDGDGQRHLKAAITENEIDHAVGTNGSVSDFPPRRSSYSCIQMNGKEVFRFACRSVPQSIELALAKAGLNGSNIDWLLLHQANQRIIDAVATRLEVPQERVISNLANYGNTSAASIPLALDEAVRGGKVKPGHLIATAGFGAGLTWGSAIVRWG

SEQ ID NO: 88455 - DNA, 1354 bp, Cuphea hookeriana
  CDS (99)..(1295)
tccattctcacctataaattagagcctcggcttcactctttactcaaaccaaaactcatcactacagaacatacacaagataattcgtcgacagatctatggcgaatgcatctgggtttctgggttcttcagttcctgccctgagaagggcaactcagcattcgatttcatcgtctcgtggatcttcctcggagtttgtctccaaaagggtgttttgctgtagtgccgttcaggattctgacaggcagtctttgggtgattctcgctcgccgaggcttgtgagtagaggatgcaaattaattggatctggttctgctataccagctcttcaagtctcaaatgatgatcttgctaaaattgtcgacaccaatgatgaatggattactgtccgaacggggatccgcaaccgaagggttctctcaggtaaagatagtcttacaaatttagcatcagaggcagcaaggaaagctctagagatggcacaggtagacgcaaatgatgtggatatggttttgatgtgtacttctacccctgaggaccttttcggcagtgctcctcagatatcgaaagcacttggctgcaaaaagaatcctttgtcttacgacattaccgctgcatgcagtggatttgtgttgggtttagtctcagctgcttgccacattagaggtgggggttttaacaatattctagtgattggtgctgattctctttctcggtatgttgactggaccgatcggggaacatgtattctctttggagatgctgctggagctgtagtggtgcagtcatgtgatgctgaggaagatgggctctttgcttttgatttgcatagcgatggagatgggcaaaggcatctaaaagctgcaatcaaagaagatgaagttgataaagccctgggacataatgggtccatcagagattttccaccaaggcgttcttcatactcttgcatccaaatgaacggtaaagaggtattccgctttgcttgccgctctgtgcctcagtcaatcgaatcagcacttggaaaggccggtcttaatggatccaacatcgactggttgctgcttcatcaggcaaatcagaggatcattgatgcagtagcaacacgtctagaggttcctcaagaacgaattatctcaaacttggcaaattacgggaacactagtgcggcatccattcccttggcactagacgaagctgtgaggagtggaaatgtgaagccgggtcacgtgattgcaaccgcaggatttggcgccggactcacatggggttctgctattatcaggtggggataagactgaagccgagccctcgagagtgtgtataccacggtgatatgagtgtggttgttgat

SEQ ID NO: 88456 - protein, 398 aa, Cuphea hookeriana
MANASGFLGSSVPALRRATQHSISSSRGSSSEFVSKRVFCCSAVQDSDRQSLGDSRSPRLVSRGCKLIGSGSAIPALQVSNDDLAKIVDTNDEWITVRTGIRNRRVLSGKDSLTNLASEAARKALEMAQVDANDVDMVLMCTSTPEDLFGSAPQISKALGCKKNPLSYDITAACSGFVLGLVSAACHIRGGGFNNILVIGADSLSRYVDWTDRGTCILFGDAAGAVVVQSCDAEEDGLFAFDLHSDGDGQRHLKAAIKEDEVDKALGHNGSIRDFPPRRSSYSCIQMNGKEVFRFACRSVPQSIESALGKAGLNGSNIDWLLLHQANQRIIDAVATRLEVPQERIISNLANYGNTSAASIPLALDEAVRSGNVKPGHVIATAGFGAGLTWGSAIIRWG

SEQ ID NO: 88457 - DNA, 939 bp, Bacillus subtilis
  CDS (1)..(939): transl_table=11
atgaaagctggaatacttggtgttggacgttacattcctgagaaggttttaacaaatcatgatcttgaaaaaatggttgaaacttctgacgagtggattcgtacaagaacaggaatagaagaaagaagaatcgcagcagatgatgtgttttcatcacatatggctgttgcagcagcgaaaaatgcgctggaacaagctgaagtggctgctgaggatctggatatgatcttggttgcaactgttacacctgatcagtcattccctacggtctcttgtatgattcaagaacaactcggcgcgaagaaagcgtgtgctatggatatcagcgcggcttgtgcgggcttcatgtacggggttgtaaccggtaaacaatttattgaatccggaacctacaagcatgttctagttgttggtgtagagaagctctcaagcattaccgactgggaagaccgcaatacagccgttctgtttggagacggagcaggcgctgcggtagtcgggccagtcagtgatgacagaggaatcctttcatttgaactaggagccgacggcacaggcggtcagcacttgtatctgaatgaaaaacgacatacaatcatgaatggacgagaagttttcaaatttgcagtccgccaaatgggagaatcatgcgtaaatgtcattgaaaaagccggactttcaaaagaggatgtcgactttttgattccgcatcaggcgaacatccgtatcatggaagctgctcgcgagcgtttagagcttcctgtcgaaaagatgtctaaaactgttcataaatatggaaatacttctgccgcatccattccgatctctcttgtagaagaattggaagccggtaaaatcaaagacggcgatgtggtcgttatggtagggttcggcggaggactaacatggggcgccattgcaatccgctggggccgataa

SEQ ID NO: 88458 - protein, 312 aa, Bacillus subtilis
MKAGILGVGRYIPEKVLTNHDLEKMVETSDEWIRTRTGIEERRIAADDVFSSHMAVAAAKNALEQAEVAAEDLDMILVATVTPDQSFPTVSCMIQEQLGAKKACAMDISAACAGFMYGVVTGKQFIESGTYKHVLVVGVEKLSSITDWEDRNTAVLFGDGAGAAVVGPVSDDRGILSFELGADGTGGQHLYLNEKRHTIMNGREVFKFAVRQMGESCVNVIEKAGLSKEDVDFLIPHQANIRIMEAARERLELPVEKMSKTVHKYGNTSAASIPISLVEELEAGKIKDGDVVVMVGFGGGLTWGAIAIRWGR

SEQ ID NO: 88459 - DNA, 1695 bp, Cuphea wrightii
  CDS (221)..(1423)
cggcacgagaaaaaatgatttattaaatcgaattttcggagcaaacgatgaatctttgtgctcacaatcacatgtctccgacgccaacgccacttcttctctgatctctctctgcaaatgggctctcccctgctgacaccaagctaaagcttcaaactttattactccccctgcctcgggcactcctgaatcggattcaaggcagagttttgttgctgtgatggcgaatgcatctggctttctgggttcttcagttcctgccctgagaagggcaactcagcctcagcattcgatttcatcgtctcgtggatcttcctcggactttgtcttcaaaagggtcttttgctgtagtgccgttcagggttctgacaggcagtctttgggtgattctcgctcgccgaggctcgtgagtagaggatgcaaattaattgggtctggttctgctataccatctcttcaaatctcaaatgatgatcttgcaaaaattgtcgacaccaatgatgaatggatttctgtcagaacggggatccgcaaccgaagggttctcacaggtaaagatagtcttacaaatttagcatcagaggcagcaagaaaagctctagagatggcacagatagacgcagatgatgtggatatggttttgatgtgtacttctacccctgaggatcttttcggcagtgctcctcagatatcgaaagcacttggctgcaaaaagaatcctttgtcttacgacattaccgctgcatgcagtggatttgtgttgggtctagtctcagctgcttgccacattagaggtgggggttttaacaatgttctagtgattggtgctgattctctttctcggtatgttgactggactgatcggggaacctgtattctctttggagatgctgctggagctgtagtggtgcagtcctgtgatgctgaggaagatgggctctttgcttttgatttgcatagcgatggagatgggcaaaggcatctaaaagccgcaatcaaagaagatgaagttgataaagccttgggatctaatgggtccatcagagattttccaccaagacgttcttcatactcttgcatccaaatgaacggtaaagaggtattccgctttgcttgccgctgtgtgcctcagtcaatcgaatcagcacttggaaaggccggccttaatggatccaacattgactggttgctgcttcatcaggcaaatcagaggatcattgatgcagtagcaacacgtctagaagttcctcaagaacgaattatctcaaatttggcaaactacgggaacactagtgcggcatccattcccttggcactagacgaagctgtgaggagtggaaatgtgaagccgggtcatgtgattgcaactgcaggatttggcgccggactcacatggggttctgctattatcaggtggggataagactgaagccgagccagcactgcatcggctcctcaaaccgatgttttacaaaattttgctaccatgactagaaaagcaacacaatacgatcttcatcacaatgctttttatattccccctttccattagtttgatgattttgctgacaatacaatactcatagtttcttttgtccccaataagttatttgtttcttgtttaattattcagcataatataaacatcatgtttatattatgctaatcagaggaacaaacaactctaaactcccc

SEQ ID NO: 88460 - protein, 400 aa, Cuphea wrightii
MANASGFLGSSVPALRRATQPQHSISSSRGSSSDFVFKRVFCCSAVQGSDRQSLGDSRSPRLVSRGCKLIGSGSAIPSLQISNDDLAKIVDTNDEWISVRTGIRNRRVLTGKDSLTNLASEAARKALEMAQIDADDVDMVLMCTSTPEDLFGSAPQISKALGCKKNPLSYDITAACSGFVLGLVSAACHIRGGGFNNVLVIGADSLSRYVDWTDRGTCILFGDAAGAVVVQSCDAEEDGLFAFDLHSDGDGQRHLKAAIKEDEVDKALGSNGSIRDFPPRRSSYSCIQMNGKEVFRFACRCVPQSIESALGKAGLNGSNIDWLLLHQANQRIIDAVATRLEVPQERIISNLANYGNTSAASIPLALDEAVRSGNVKPGHVIATAGFGAGLTWGSAIIRWG

SEQ ID NO: 88461 - DNA, 1827 bp, Cuphea wrightii
  CDS (239)..(1447)
ggcacgagctctaaacgagttgtcgtaatcgacccccaaaaatttatcagttttttcggaccccccgatgaatctttgtgcttataagtctgtgacagctttctctgcgatggagtttgctctcttgctgacaaccttgttgtctgtctgtccatagctaaaggaaggatttttattctccccatctgcgaaaggctagaaattttctctgttgggattcaagagagggctggaagaaatggcgaatgcatatgggtttgtgggtcattcagttccgaccatgaaaagggcagctcagtttcagcagatgggatctgggttttgttctgcggactccatttccaagagggtgttttgttgcagtgtcgttcaaggcgctgacaagccggcgtcgggtgattctcgtaccgaatatcgaacgccgaggcttgtgagtagaggatgcaaattggttggatctggttcggctatgccagctcttcaagtctcaaatgacgatctttcaaaaattgttgataccaatgatgaatggatttcagtccgaacaggaatccgcaatcgacgagttctaacaggtaaagagagtcttacaaatttagcaacagtggcagcgaggaaagctctagagatggcacaggttgatgcgaatgatgtggatatggtactgatgtgcacctcaacccccgaggatctgtttggtagtgctcctcagattcagaaggcactcggttgcaagaagaatcctttggcttatgatattaccgccgcgtgcagtggatttgtgttgggtcttgtatcagctgcatgccacattagaggtggtgggtttaacaatattttagtgattggtgctgattccctctctcggtatgttgactggaccgatcgaggaacctgtattctctttggagatgcagctggtgctgtgcttgttcagtcctgcgatgctgaggaagatgggctctttgcttttgatttacacagtgatggagatgggcagaggcacctaaaagccgcgattacagaaaacggaattgatcatgctgtgggaagtaatggatccgtatcagattttccaccaagaagttcttcgtattcttgcatccaaatgaatggtaaagaggtcttccgcttcgcttgccgttgcgtgcctcagtcaattgaatcagctcttggaaaggccggtcttaatggatccaacatcgactggctactgcttcatcaggcgaatcagaggatcattgatgcagtcgcgacacgtctagaggttcctcaggagcgagtgatctcaaacttggcaaattacgggaacacaagcgctgcatctattcccttggcacttgacgaagctgttcggggtgggaaggtgaaagccggccacctgatagctacagcaggattcggcgctggacttacttggggttctgccattgtcagatggggttgagaagaatgaagctgatcctcctcactcggctcgatcatcattcccgtgtccctctacacagtaagaatcccagaacaccgacactttctgaaattttttgcttcccagtgacccgaaaaaaagcaaatcatcaacgagcaatgcaaatcagcaagcaagcaagcttcattatgttgccctttacattccctcttttctgcattagtttgatgaatctgttgacacttcccatagaaataatctctgcctcctttatctgttcattttaagctaataaacttctcaagacattgaacagacagagcaaagacaggaagtgaactgaactgaacataggactgtatttgtgtgcattgtcggaaaatcttcaatctttattt

SEQ ID NO: 88462 - protein, 402 aa, Cuphea wrightii
MANAYGFVGHSVPTMKRAAQFQQMGSGFCSADSISKRVFCCSVVQGADKPASGDSRTEYRTPRLVSRGCKLVGSGSAMPALQVSNDDLSKIVDTNDEWISVRTGIRNRRVLTGKESLTNLATVAARKALEMAQVDANDVDMVLMCTSTPEDLFGSAPQIQKALGCKKNPLAYDITAACSGFVLGLVSAACHIRGGGFNNILVIGADSLSRYVDWTDRGTCILFGDAAGAVLVQSCDAEEDGLFAFDLHSDGDGQRHLKAAITENGIDHAVGSNGSVSDFPPRSSSYSCIQMNGKEVFRFACRCVPQSIESALGKAGLNGSNIDWLLLHQANQRIIDAVATRLEVPQERVISNLANYGNTSAASIPLALDEAVRGGKVKAGHLIATAGFGAGLTWGSAIVRWG

SEQ ID NO: 88463 - DNA, 1017 bp, Deinococcus radiodurans
  CDS (1)..(1017): transl_table=11
atgacggcatccctttctgcgcctgccatcggcatcctggcggtgggcgcctacgccccggcggcagtgatcaccaacgcccactacgcgacgcgcctcgacacctccgacgactggatcacctcgcgcaccggcatccgcgagcggcgccacgcggctcccgacgagagcagcagcgtgctcggcatccgggcgacgcaggacctcgccgggcgcttccctggcgccttggacggcgtgaacctggtgatctgcgcgacgagcagccccgacgccatgtttccctccacggcggcgctgatcgccgggggcacgggcctgcgcggggccgccgccttcgacgtgagcgtggcgtgcagcggctttctgtacgccctgagcgtgggctacggcatgatccgggccgggctggcgaaaaaagcattgattgtcggcagcgaggtgatgagcggcgcggtggaccagaacgaccgcaacaccgccatcctcttcggtgacggcgcgggctgcgtggtgatcggggaagtgccgcaaggctacggttttcagtcctttgtgctgggtgccgacagcgcgggcgggccgcacctctacctgcgcggcgcggcgctgcggctgcccgagggcacggaaatggggccgcacctgacgcaaaacgggcgcgaggtcttcaagttcgccgtccgtaccctgggcgacagcgccgagcaggccatgcggcaggcgggcaaaaccactgccgacatcgactggctcgttccccatcaggccaatatccgcatcattgaggccgcctgcgagcgcttcgggctgcctatcgagcgggcggtgaccaatctcgaccgctacggcaacaccagcgcggcgagtattccgctggccctggccgaggcccaggcgcagggccgcttcaaagacggcgaccaactgctgctcgccggtttcggcggtggcctgagctggggagcggcggcgctgaagtggtggagcgggcctactgggaaacagtcgtcctga

SEQ ID NO: 88464 - protein, 338 aa, Deinococcus radiodurans
MTASLSAPAIGILAVGAYAPAAVITNAHYATRLDTSDDWITSRTGIRERRHAAPDESSSVLGIRATQDLAGRFPGALDGVNLVICATSSPDAMFPSTAALIAGGTGLRGAAAFDVSVACSGFLYALSVGYGMIRAGLAKKALIVGSEVMSGAVDQNDRNTAILFGDGAGCVVIGEVPQGYGFQSFVLGADSAGGPHLYLRGAALRLPEGTEMGPHLTQNGREVFKFAVRTLGDSAEQAMRQAGKTTADIDWLVPHQANIRIIEAACERFGLPIERAVTNLDRYGNTSAASIPLALAEAQAQGRFKDGDQLLLAGFGGGLSWGAAALKWWSGPTGKQSS

SEQ ID NO: 88465 - DNA, 1089 bp, Vibrio cholerae
  CDS (1)..(1089): transl_table=11
atgactcaatgttatgccgaaatcaccgggtggggtaaatgtctgccacctgcgacgctctccaatcacgatttgagcacctttcttgatacttccgatgagtggattcaatcacgtactgggattgaacagcgtcggatcagccacgtgaatacttccgatctcgctaccgttgccgctcagcatgccattgcctgtgcgggcgtcagcgttgaagagatagacctgattattgtggcaacctgttcaccggattcgttaattcccaatattgcttcaagagtgcagcaaaatttaggcattccttctgctgccgcctttgatctcaacgccgcctgtaccggtttcctctatggcttagaaaccgcgacacgcttgatgcaagcgagccattatcgtcatgctttggtgattggtgctgagcgcctctctttctatctggactggacgaagcgtgacactgctgtgctgtttggagatggcgcaggtgctgtggtattgagcaagaccgaacaaaaagtgggcttgcaagatgcgcaaattggctgtgatgcccaagggcgagatattttagcggtacctaagtttggaaccgcgatggatcgttttgatgcagacaatggttactgggcgtttgatttcgtgggtaaagagatctttaaacgagcggtacgtggcatgggggctgcggcgcagcaagtgttggcgcgtagcggtttatcgaccgaagaaatcgatgtggtgatcccgcatcaagccaatatccgcattattcaaaccctgtgtgatttggcgggcatcgcgcaagacaaagcctttgtcaatattcatcgctacggtaatacctccgcggctacggtgccgattgccctatgcgaagcgttagagcaaggtaaaatcaaacctcatgatgatctgttggtcgccgcttttggcgcagggctaacgtggggtgcgggtcatattcgctggggtgagcggataacgcctctgggtaaaagcgatgcgcaattgccttcttgtgatcacactgcgttagatctgttgagcaaggctattgagcactgcaagcgtcatcaatcagaatga

SEQ ID NO: 88466 - protein, 362 aa, Vibrio cholerae
MTQCYAEITGWGKCLPPATLSNHDLSTFLDTSDEWIQSRTGIEQRRISHVNTSDLATVAAQHAIACAGVSVEEIDLIIVATCSPDSLIPNIASRVQQNLGIPSAAAFDLNAACTGFLYGLETATRLMQASHYRHALVIGAERLSFYLDWTKRDTAVLFGDGAGAVVLSKTEQKVGLQDAQIGCDAQGRDILAVPKFGTAMDRFDADNGYWAFDFVGKEIFKRAVRGMGAAAQQVLARSGLSTEEIDVVIPHQANIRIIQTLCDLAGIAQDKAFVNIHRYGNTSAATVPIALCEALEQGKIKPHDDLLVAAFGAGLTWGAGHIRWGERITPLGKSDAQLPSCDHTALDLLSKAIEHCKRHQSE

SEQ ID NO: 88467 - DNA, 972 bp, Agrobacterium tumefaciens
  CDS (1)..(972): transl_table=11
atgatccgctctatagtccgtggtttcggggcagcgctgccgaagcgtgtcatgaccaacagtgaaatcgaaggggtcgtagagacctccgatgaatggatcgtgcagcgcaccggcatcaggcaacgctatatcgccggcgaaggtgaaaccaccgcgtctctcggcgaggcggcggcgcgtgcggcgctcgacaatgccggtctgacgcccgccgatatcgacctcatcattctggccacctcgaccccggacaatacctttccggcaacagcggtgaacatacagaaccgtcttggcatgacccacggtttcgccttcgacatgcaggccgtctgctccggtttcgtttacgccgtggcgaccgccgatctctatattcgcggcggaatggccaagcgcgtgctggtgataggcgccgaaacattctcgcgcattctcgactggaaggaccgcaccacctgcgttctgttcggtgatggcgctggcgcactcgttatcgaggccggcgaaggcgagggcacttccagcgatcgcggcatcctcacctcgcagctgcgctccgacggttcgcacaaggacaagctctacgtcgatggcggaccttccacaactggcacggtcggccatctgcgcatggaaggccgggaagtgttcaagcatgctgtcggcatgatcaccgacgtcatcgagcaggccttcgaggcgacgggcacgacggcggacgatctcgactggctcgttccgcatcaggccaacaagcgcattatcgacggatcggcgaagaagctcaatatcgatccggaaaaggtcgtcatcaccgtcgacaaacacggcaatacctcggccgcatccattccgctggcgcttgcagtcgcggccagtgacggccgtatcaagaagggcgatctggtgatgctggaggccatgggcggaggtttcacctggggtgcagtgctgctgcgctggtaa

SEQ ID NO: 88468 - protein, 323 aa, Agrobacterium tumefaciens
MIRSIVRGFGAALPKRVMTNSEIEGVVETSDEWIVQRTGIRQRYIAGEGETTASLGEAAARAALDNAGLTPADIDLIILATSTPDNTFPATAVNIQNRLGMTHGFAFDMQAVCSGFVYAVATADLYIRGGMAKRVLVIGAETFSRILDWKDRTTCVLFGDGAGALVIEAGEGEGTSSDRGILTSQLRSDGSHKDKLYVDGGPSTTGTVGHLRMEGREVFKHAVGMITDVIEQAFEATGTTADDLDWLVPHQANKRIIDGSAKKLNIDPEKVVITVDKHGNTSAASIPLALAVAASDGRIKKGDLVMLEAMGGGFTWGAVLLRW

SEQ ID NO: 88469 - DNA, 930 bp, Aquifex aeolicus
  CDS (1)..(930): transl_table=11
atggggactaaaataatcggaaccggcgtttacctgcccaaaaacgtccttacaaactttgaccttgagaaaatagtggacacatcagacgagtggataacaacgagaacaggtataaaggaaagaaggatagcgaaagaggaaacaattacctacatggcaacgcaagccgcaaaagaggcactccgagaagctaacttgtctccagaggagctcgaccttatcatcctcgcaaccctaacaccacaaaagaggtttccgtcaaccgcctgtttggttcaggcacagttaaaggcgaagggagtttacgcctttgacatatcggcagcctgtagcggatttatatacgctctggacatagcagacagctttataaagtcgggaaaggctaaaaacgttctcgtaataggtgcggaaaagctctccgaggcggttgactgggaggaccgctccacctgcgttctcttcggagacggagcgggggcggtagtggtaacaaggtcagaggacaagagcgacattctcgcaacgaggatgtacgccgaaggctctctggaggaactcctccacgcggataactgcggatacataaggatgaagggaagggagcttttcaaggtcgccgtaaggagcatggaagaggtctgcagggaagttttagaaaaggctggcgtaaaacctgaggaagtttccctagtcattccccatcaggcaaacgtgaggataataaacgcccttgccgaaaaattaaacataccgaaggaaaaggtcttcgtaaacatacaaaagtacgggaacacttccgctgcatccattcctatagcccttcatgaagctataaaagaaggaaaagtaaagaggggagatctaatcctcatgaccgccatggggggcggtcttacgtggggagccgtgcttttgaggtattaa

SEQ ID NO: 88470 - protein, 309 aa, Aquifex aeolicus
MGTKIIGTGVYLPKNVLTNFDLEKIVDTSDEWITTRTGIKERRIAKEETITYMATQAAKEALREANLSPEELDLIILATLTPQKRFPSTACLVQAQLKAKGVYAFDISAACSGFIYALDIADSFIKSGKAKNVLVIGAEKLSEAVDWEDRSTCVLFGDGAGAVVVTRSEDKSDILATRMYAEGSLEELLHADNCGYIRMKGRELFKVAVRSMEEVCREVLEKAGVKPEEVSLVIPHQANVRIINALAEKLNIPKEKVFVNIQKYGNTSAASIPIALHEAIKEGKVKRGDLILMTAMGGGLTWGAVLLRY

SEQ ID NO: 88471 - DNA, 1246 bp, Arabidopsis thaliana
  CDS (1)..(1215)
atggctaatgcatctgggttcttcactcatccttcaattcctaacttgcgaagcagaatccatgttccggttagagtttctggatctgggttttgcgtttccaatcgattctctaagagggttttgtgctctagcgtcagctccgtcgataaggatgcttcgtcttctccttctcaatatcaacgacccaggctagtgccgagtggctgcaaattgattggatgtggatcagcagttccaagtcttctgatttctaatgatgatctcgctaaaatagttgatactaatgatgaatggattgctactcgtactggtattcgcaaccgtcgagttgtctcaggcaaagatagcttggttggcttagcagtagaagcagcaaccaaagctcttgaaatggctgaggttgttcctgaagatattgacttagtcttgatgtgtacttccactcctgatgatctatttggtgctgctccacagattcaaaaggcacttggttgcacaaagaacccattggcttatgatatcacagctgcttgtagtggatttgttttgggtctagtttcagctgcttgtcatataaggggaggcggttttaagaacgttttagtgatcggagctgattctttgtctcggtttgttgattggacggatagagggacttgcattctatttggagatgctgctggtgctgtggttgttcaggcttgtgatattgaagatgatggtttgttcagttttgatgtgcacagcgatggggatggtcgaagacatttgaatgcttctgttaaagaatcccaaaacgatggtgaatcaagctccaatggctcggtgtttggagactttccaccaaaacaatcttcatattcttgtattcagatgaatggaaaagaggtctttcgctttgctgtcaaatgtgttcctcaatctattgaatctgctttacaaaaagctggtcttcctgcttctgccatcgactggctcctcctccaccaggcgaaccagagaataatagactctgtggctacaaggctgcatttcccaccagagagagtcatatcgaatttggctaattatggtaacacgagcgctgcttcgattccgctggctcttgatgaggcagtgagaagcggaaaagttaaaccaggacataccatagcgacatccggttttggagccggtttaacgtggggatcagcaattatgcgatggaggtgaatggctaagtccaacaatgtaagttaacttc

SEQ ID NO: 88472 - protein, 404 aa, Arabidopsis thaliana
MANASGFFTHPSIPNLRSRIHVPVRVSGSGFCVSNRFSKRVLCSSVSSVDKDASSSPSQYQRPRLVPSGCKLIGCGSAVPSLLISNDDLAKIVDTNDEWIATRTGIRNRRVVSGKDSLVGLAVEAATKALEMAEVVPEDIDLVLMCTSTPDDLFGAAPQIQKALGCTKNPLAYDITAACSGFVLGLVSAACHIRGGGFKNVLVIGADSLSRFVDWTDRGTCILFGDAAGAVVVQACDIEDDGLFSFDVHSDGDGRRHLNASVKESQNDGESSSNGSVFGDFPPKQSSYSCIQMNGKEVFRFAVKCVPQSIESALQKAGLPASAIDWLLLHQANQRIIDSVATRLHFPPERVISNLANYGNTSAASIPLALDEAVRSGKVKPGHTIATSGFGAGLTWGSAIMRWR

SEQ ID NO: 88473 - DNA, 957 bp, Blochmannia floridanus
  CDS (1)..(957): transl_table=11
atgtttactaaaattcttggaactggaagttatttaccaaaatatattagatctaatattattttagagaaaatggtagatacttctaatgcgtggattatagctcgtactggaattaaggaacgtcgtatttctaattctagtgagactgttgctaaaatgggttattttgcatctaaaaaagctttagatatgtcctgtattgaagcaaatgaaataggaattattattgttgctacaacatcatctagtcatgcctttcctagttcagcatgtcaaattcagcgtgatttaaaaatatcagataccattgcttttgatttatcggcagcttgttcaggttttgtatatgcattagatgtagctaatcaatatattaagaatggtgttgtaaaatatgctttgattgtaggatcagatattttaagtcattttttaaatcctaacgatcgtagtacattaattttatttggagatggagcaggagcagtaatattaggtcgttcgaaaagtccaggaattatttcaactcatctacatgcaaatggatattatggagatttattaactttgcctcattataatacacaaaatcctgaaaaattatctgtttacttaactatgtctggcaataaagtatttaaaatggcaattgctacgttaactggtattattaatgaaactttgcatgcaaataatttgcaacaagatgaattagattggttagtacctcatcaagctaatttgagaattatttctaaagcagctaaacgattgaatatagatatggaaaaaataataattactttacataaacatggaaatacttctgctgcttctattcctttagctttggatgaggctgtgcgtgatggacgtattaaatcaaatcaattgttattgctagaagcatttggagcagggttaacttggggttcagttttattaagattttaa

SEQ ID NO: 88474 - protein, 318 aa, Blochmannia floridanus
MFTKILGTGSYLPKYIRSNIILEKMVDTSNAWIIARTGIKERRISNSSETVAKMGYFASKKALDMSCIEANEIGIIIVATTSSSHAFPSSACQIQRDLKISDTIAFDLSAACSGFVYALDVANQYIKNGVVKYALIVGSDILSHFLNPNDRSTLILFGDGAGAVILGRSKSPGIISTHLHANGYYGDLLTLPHYNTQNPEKLSVYLTMSGNKVFKMAIATLTGIINETLHANNLQQDELDWLVPHQANLRIISKAAKRLNIDMEKIIITLHKHGNTSAASIPLALDEAVRDGRIKSNQLLLLEAFGAGLTWGSVLLRF

SEQ ID NO: 88475 - DNA, 972 bp, Brucella melitensis
  CDS (1)..(972): transl_table=11
atgataagatctgtcgtacggggtatcggttcggcattgcctaaacgggtcatgaagaataccgactttgaaggcattgtcgaaacctcggacgagtggatcgtgcagcgcacgggtatccgtgaacgccacattgcgggcgagggcgaaacgacggtttcgctgggagcggctgctgcgcgcgcggcaatcgagaatgccgggcttcagccgtccgatatcgatctggtccttctggcaacctccacgcccaacaatacctttccggccagtgcagtggcaatccagcgcgagcttggcatcacccgaggcttcgctttcgaccttcaggccgtttgcagcggtttcatctatgccatcaccacggctgatctctatattcgcggcggcatggccaggcgcgttctggtcatcggtgcggaaaccttctcgcgtatcctcgactggaccgaccgcaccacctgcgttctctttggtgatggtgcaggcgcgatcgttctcgaagcagccgaaggccatggcctgacttcggatcgcggcattctcgccgccaatctgcgctcggatggcaatcataaggaaaagctctacgtcgatggcggcccgtccaccacgcagacggtgggccatctgcgtatggaaggccgcgaggtcttcaagcacgccgtcggcatgattaccgatgtgatcgaggcttccttcgaggcaacgggcctcacggccgaggatatcgactggttcgtgccgcatcaggccaacaagcgaatcatcgacgcttcggcaaagaagcttcacatcgctgaagagaaggtcgtcatcacggttgaccggcacggaaacacctctgccgcctcggttccactggccctcgccaccgctgttgccgatggtcgcatcaagaagggcgatctcgttcttttggaagccatgggcggcggatttacctggggcgcggttcttgtgcgctggtaa

SEQ ID NO: 88476 - protein, 323 aa, Brucella melitensis
MIRSVVRGIGSALPKRVMKNTDFEGIVETSDEWIVQRTGIRERHIAGEGETTVSLGAAAARAAIENAGLQPSDIDLVLLATSTPNNTFPASAVAIQRELGITRGFAFDLQAVCSGFIYAITTADLYIRGGMARRVLVIGAETFSRILDWTDRTTCVLFGDGAGAIVLEAAEGHGLTSDRGILAANLRSDGNHKEKLYVDGGPSTTQTVGHLRMEGREVFKHAVGMITDVIEASFEATGLTAEDIDWFVPHQANKRIIDASAKKLHIAEEKVVITVDRHGNTSAASVPLALATAVADGRIKKGDLVLLEAMGGGFTWGAVLVRW

SEQ ID NO: 88477 - DNA, 960 bp, Chromobacterium violaceum
  CDS (1)..(960): transl_table=11
atgggctattcccgcattctcggcaccggcagcttcctgccgtcccaggtgcttaccaatgcgcagttggccgaacgggtggaaaccagcgacgagtggatcgtctctcgtaccggcatccgcgcgcgccatattgccgacgaagggcacaagaccagcgatctggcgctgagggcggcgcaagccgccatcgccagcgccggcatcgacaagggcgagatcgacctgatcatcgtcgccaccaccacccccgacatggtttttcccagcaccgcctgcatcctgcaggagaagctgggattgcccggcgtgcaggcctttgacgtgcaggccgtgtgcgccggcttcgtctacgcgctgaccacggccaacgcctacatcaagagcggcctggccaagaaggcgctggtggtcggcgccgaaatcatgtcgcgcgtgctggactgggatgatcgccgcacctgcgtgctgttcggcgacggcgccggcgccgtggtactgggcgagtccgacgagcctggcatcctgcatgccaagctggcggcggacggccgctaccagggcttgctcaacacgccggcgcagatttccggcggcaagatccagggcatcccctatctgcacatggacggcccggcggtgttcaagttcgccgtcaagtcgctgtccgagatcgccaccgccacgctggccgaggccggcgtcgaacaggccagcctggactggctggtgccgcaccaggccaatctgcgcatcatcgaatccaccgccaagcatcttggcctgccgatggacaaggtggtcgtcaccttgccggagcagggcaatacctcggcggcttccattccgctggcgctggacgtcgcggtgcgcgacggacgcatccggcgcggccagaccgtgatgctggaaggcattggcggcggtttcgcctggggcgcggtgctgctgaccttctga

SEQ ID NO: 88478 - protein, 319 aa, Chromobacterium violaceum
MGYSRILGTGSFLPSQVLTNAQLAERVETSDEWIVSRTGIRARHIADEGHKTSDLALRAAQAAIASAGIDKGEIDLIIVATTTPDMVFPSTACILQEKLGLPGVQAFDVQAVCAGFVYALTTANAYIKSGLAKKALVVGAEIMSRVLDWDDRRTCVLFGDGAGAVVLGESDEPGILHAKLAADGRYQGLLNTPAQISGGKIQGIPYLHMDGPAVFKFAVKSLSEIATATLAEAGVEQASLDWLVPHQANLRIIESTAKHLGLPMDKVVVTLPEQGNTSAASIPLALDVAVRDGRIRRGQTVMLEGIGGGFAWGAVLLTF

SEQ ID NO: 88479 - DNA, 1005 bp, Clostridium tetani
  CDS (1)..(1005): transl_table=11
atgaaaaataaagaggtaagaatattatccactggaaaatatctaccaccaatatcaatatcaaaccatgatttatctaaaataatagatacaaacgataactggataaaaactagaacaggtatagaaaaaagaaggattacaaaaggagaaaatacatctgatttaggaactaaagcagctttagatgccctaagaaaggggggaatatctcctgaggaattagacttaattatagtagctaccataactccagattattttacaccttctactgcttgtattatacaaaggaatattaaagcttataatgcttttgcatttgatatatcagcagcttgttcaggttttacctatggaattagcatagcatctcaatttataagaaatggagtagctaaaaaggttttagttataggagttgaaacattatctaaattagtagattggaaggatagaaatacttgcatattatttggagatgggtcgggagcggctatactcacagaaagtaatgaaaagggaataatgaatgtgtatctaggttctgatggaagaggggctgatcttttaaaatgcaagtcatctagtttaactgttaatagtgatgaattaaaagaattgttaaattcgaaagaagaagatttagaaaataaatttatagaaatggatggtaaggaaatttttaaatttgcagtaaaagtaatgataaaaggtatagagaaagttttaaaggatagtaatttagaattaaaagatataaattatataattcctcatcaagctaatttgagaataattgaacatgtagccaagaaattaggcatagatgaaaataaattttatataaatattaatcactatggaaacacatcagctgcaagtattcctattgcattagcagaagtagatgaaaaaggattattaaaaaagggagataatgttatcttagtaggctttggagcaggattaacttgggcagcttcattaattaagtggatataa

SEQ ID NO: 88480 - protein, 334 aa, Clostridium tetani
MKNKEVRILSTGKYLPPISISNHDLSKIIDTNDNWIKTRTGIEKRRITKGENTSDLGTKAALDALRKGGISPEELDLIIVATITPDYFTPSTACIIQRNIKAYNAFAFDISAACSGFTYGISIASQFIRNGVAKKVLVIGVETLSKLVDWKDRNTCILFGDGSGAAILTESNEKGIMNVYLGSDGRGADLLKCKSSSLTVNSDELKELLNSKEEDLENKFIEMDGKEIFKFAVKVMIKGIEKVLKDSNLELKDINYIIPHQANLRIIEHVAKKLGIDENKFYININHYGNTSAASIPIALAEVDEKGLLKKGDNVILVGFGAGLTWAASLIKWI

SEQ ID NO: 88481 - DNA, 960 bp, Coxiella burnetii
  CDS (1)..(960): transl_table=11
atgacctacgcgcgtatccagggtgttggcagttatattcctcagcaaatattaagtaatgcagatttagaaaaaatggttaataccacggatgagtggatcatgcagcgggtcggcgtgcgtgagcgtcatgtcattgctaatagccctgataataccaccacgatggcggtcgatgcggcaaaacgtgcaattgaaatggcgggaatagaccccgccgttatcgacatgattatcgtggggactgcaacagcagaatattattttcctagtacggcttgtttggtccaaaaacatttaaatttgcgtgaggatatccccgcctttgacataaatgcggcgtgcgcaggttttgtgtacgctttaagcattgctgatcaatacatccgaaacgaaggcgccaagcatattctcgttattggtgtggattctttaacaaaggtagtggattggaaagatcgcagcacctgtattttattcggtgatggtgcaggagcggttattttacaagcccacaaagaacccggcattttaaacactattttacatgcgaatggtgattacagtgatttaattactgctaaaagtggagtttgggagcgggaatctgtgcctcatttgcacatgtatgggaaagaagtttttaaactagcggtaactaaattaggagaaattgtcgatgagattattgagaaaagcggactcaagcaatcagacatcgattggttaattccccatcaagcgaatttacgtattattgaagcaacagcgaaacgattagggctgccaagagaacgggttattttgacaattgagcaacatggtaacacttccgctgcttctattcctttggcgctcgatgcggctgttcgtgccggcaagattaagcgcggcgatacgctgctgttagaagcttttggtgcaggccttgcctggggcgctgcgctacttaaattgtag

SEQ ID NO: 88482 - protein, 319 aa, Coxiella burnetii
MTYARIQGVGSYIPQQILSNADLEKMVNTTDEWIMQRVGVRERHVIANSPDNTTTMAVDAAKRAIEMAGIDPAVIDMIIVGTATAEYYFPSTACLVQKHLNLREDIPAFDINAACAGFVYALSIADQYIRNEGAKHILVIGVDSLTKVVDWKDRSTCILFGDGAGAVILQAHKEPGILNTILHANGDYSDLITAKSGVWERESVPHLHMYGKEVFKLAVTKLGEIVDEIIEKSGLKQSDIDWLIPHQANLRIIEATAKRLGLPRERVILTIEQHGNTSAASIPLALDAAVRAGKIKRGDTLLLEAFGAGLAWGAALLKL

SEQ ID NO: 88483 - DNA, 951 bp, Haemophilus ducreyi
  CDS (1)..(951): transl_table=11
atgtacagtaagattcttgcgacggggagttacttgccaaaacaagtaagatccaatgctgatttagaaaagatggtcgatacaacagatgagtggatttttactcgttcaggtatgaaagagcgccgtattgcggccgctgatgaaacggtagccacaatgggcgccgccgccgctcataaggcgtgtgaaatggcagccattgatgtgaatgagattgagttgattgtggtggcaactactactcattcgcatgcttatccaagtgcggcgtgtcaaattcagggcatgttggccattgaagatgcgattgcatttgatgtggcagcggcgtgtacggggtttatttatgcgttgagtgtggcagatcaatttattcgtgccggtaaggtgaagacggcgtttgtggttggcgcagatgttaattctcgtgtgttagacgaggcagatcgcggtactgtggtgttatttggcgatggtgcaggggcggtgattttgcaagcgagtgaacaagcgggtattttatctactcatttgcattcttcagccgatacggacaatatgttggcgttgccgattcaagaacgcggaaatgcacaatctggttttattcagatgcagggtaatgcgacgtttaaactggcagtcagtcggcttgcaaatgtggtagaagagacattacaagctaataatttgcagaaggcggatttggattggttggtgcctcatcaagcaaatattcggattattgcggcaacagctaagaagttggaaatggaaatgtcgcaggtggtgttaacggttgagaaatatggtaataatagtgcggcaaccgtgcctgtggcattagatgaagcggtgcgagatgggcggattcaacgtgggcagttgttgctgttggaagctttcggcggtggttggacttggggttcgggattagtcagattctaa

SEQ ID NO: 88484 - protein, 316 aa, Haemophilus ducreyi
MYSKILATGSYLPKQVRSNADLEKMVDTTDEWIFTRSGMKERRIAAADETVATMGAAAAHKACEMAAIDVNEIELIVVATTTHSHAYPSAACQIQGMLAIEDAIAFDVAAACTGFIYALSVADQFIRAGKVKTAFVVGADVNSRVLDEADRGTVVLFGDGAGAVILQASEQAGILSTHLHSSADTDNMLALPIQERGNAQSGFIQMQGNATFKLAVSRLANVVEETLQANNLQKADLDWLVPHQANIRIIAATAKKLEMEMSQVVLTVEKYGNNSAATVPVALDEAVRDGRIQRGQLLLLEAFGGGWTWGSGLVRF

SEQ ID NO: 88485 - DNA, 939 bp, Listeria innocua
  CDS (1)..(939): transl_table=11
atgaacgcaggaattttaggagtaggtaaatacgtacctgaaaaaatattaacaaactttgatttagaaaaaatgatggaaacgtctgatgagtggattcgtactcgtactggaattgaagagagaagaattgctcgtgacgatgagtatacacatgatttagcatatgaagcagcaaaagtagcaattgaaaatgctggtcttactccagatgatattgatttgtttatcgttgcaactgtgacacaagaagcaacatttccatccgttgccaatattatccaagatcgcttaggagcaaaaaatgctgcgggaatggatgttgaagcagcgtgtgctggattcacatttggggttgttactgcagctcaattcattaaaactggcgcgtataaaaatattgttgtagttggtgcagataaattatctaaaattactaactgggacgaccgcgcaacagcagtattatttggtgatggagcaggggcagttgttatgggccctgtatcagatgaccacggtttactttcctttgacttgggttcggacggttctggaggtaaatacttgaacttagacgaaaacaaaaaaatctatatgaacggacgtgaagtgttccgtttcgcagttcgtcaaatgggtgaggcttcattacgcgtactagaaagtgctggacttgaaaaagaagacttagatttactaattccgcaccaagctaatattcgtattatggaagcttctcgtgaacgtttaaatcttccagaagaaaaactaatgaaaacagttcataaatacggaaatacatcatcatcttctattgcgcttgctttagtggatgcagttgaagaaggtcgtattaaagataatgataacgtgttacttgtcggctttggtggcggcttaacatggggcgccctaatcattcgttggggtaaataa

SEQ ID NO: 88486 - protein, 312 aa, Listeria innocua
MNAGILGVGKYVPEKILTNFDLEKMMETSDEWIRTRTGIEERRIARDDEYTHDLAYEAAKVAIENAGLTPDDIDLFIVATVTQEATFPSVANIIQDRLGAKNAAGMDVEAACAGFTFGVVTAAQFIKTGAYKNIVVVGADKLSKITNWDDRATAVLFGDGAGAVVMGPVSDDHGLLSFDLGSDGSGGKYLNLDENKKIYMNGREVFRFAVRQMGEASLRVLESAGLEKEDLDLLIPHQANIRIMEASRERLNLPEEKLMKTVHKYGNTSSSSIALALVDAVEEGRIKDNDNVLLVGFGGGLTWGALIIRWGK

SEQ ID NO: 88487 - DNA, 957 bp, Nitrosomonas europaea
  CDS (1)..(957): transl_table=11
atgtattcacggatcattggcaccggcagttacctgccggagaaagttctgaccaatcaggacctcgaatcgatggttgataccagcgatgaatggatacggacgcgtaccggtatcgaacgacggcatattgctgcagaaggccagatggcaagtgatcttgcgctggaagcgagccggaatgccattgaggctgcagatatccaggcaaaggacatcgatctgatcatcgtcgcaacgacgacaccggacatgatctttccaagcacagcctgtattctgcagaacaagcttggtatgtccaacgggccggcctttgatgtgcaggctgtctgcagcggattcatttatgcactggccacggcagacatgtttgtcagctccgggaaagcgcgtaatgcgctggttgttggtgctgaagtctactctcgtatcatggactggaacgaccgcagtacctgtgtcctgtttggtgacggtgcaggagcagtgattctcactcgtgatcagaaaccggggatcctttcatcccatctgcatgcagatgggagttacagccaggttctcacagcacctgcgtcgatccattccggtaaaatacaagggacccctttcattaccatggaaggcggtacagtcttcaaattcgcggtcaaagtcctggaagaagccgcactggaagcactgcaagcgaatcagctgcaaccttccgatatcgactggctgattccacatcaggccaatattcgcatcattacctcgacagcaaagaaactgggtatccctgaagaaaaagtggtagcaacggtttcacaacacggcaacacctcggctgcttccgttccactggcactcgaccaggcagtacgtgacggtcgtatccaaccggaccagcatatcgtgctggaaggtgtaggaggaggattcacctggggatcagttctggtacgctggtaa

SEQ ID NO: 88488 - protein, 318 aa, Nitrosomonas europaea
MYSRIIGTGSYLPEKVLTNQDLESMVDTSDEWIRTRTGIERRHIAAEGQMASDLALEASRNAIEAADIQAKDIDLIIVATTTPDMIFPSTACILQNKLGMSNGPAFDVQAVCSGFIYALATADMFVSSGKARNALVVGAEVYSRIMDWNDRSTCVLFGDGAGAVILTRDQKPGILSSHLHADGSYSQVLTAPASIHSGKIQGTPFITMEGGTVFKFAVKVLEEAALEALQANQLQPSDIDWLIPHQANIRIITSTAKKLGIPEEKVVATVSQHGNTSAASVPLALDQAVRDGRIQPDQHIVLEGVGGGFTWGSVLVRW

SEQ ID NO: 88489 - DNA, 939 bp, Oceanobacillus iheyensis
  CDS (1)..(939): transl_table=11
atgaatatcggtatattaggaaccggacattacttgccaacaaatgttgttacaaataatgatttagaaaaaatcgtagatacgaatgatgaatggattcgtactcgaactggtataagggaaagaaggttagcaacagaagaagttgacacttctgatatggcttttcacgcagctcttggagcattagaagaagcaaatttggcggcagaagatattgatttaatattagtagcaacggttacaccaaacacatcatttccatctgtagcttgtattattcaggaccaactaggagcgaagaatgcagctgctatggatgtgagtgctgcatgtgctggttttatgtatggtttgattactgctaaacagtttattgatacaggagcttacaaacatgtactggtagtaggtgcagagaaactttctaaaattactgattggtctgatcgtaccacatgtgtattatttggagatggcgcaggcgcagcagtagttggtgaagtaggtgagggcaaaggtatcctttcatttgagttaggtgcaaatggtgcaggtgcaaaagaattatatctgaatcatgatgatcacattatcatgaatggtagggaagtatataaatttgcagtgcgtcaaatgccagattctactgtaaacgttattgaacagttaggtttatcacgtgacgatgtagactatctagtccctcatcaggcgaatattcgtataatggaagctgccagagaaaggttaggtatctctgaagataaaatggccaaatcaatagagaaatttggaaataattcctctgcatctatacctatggctttatctgaggcagtaaaagagggtaaaataaaagataatgatttaatagtattagttggttttggtggaggcttaacctggggagctgttgcgcttcgttggggcaagtaa

SEQ ID NO: 88490 - protein, 312 aa, Oceanobacillus iheyensis
MNIGILGTGHYLPTNVVTNNDLEKIVDTNDEWIRTRTGIRERRLATEEVDTSDMAFHAALGALEEANLAAEDIDLILVATVTPNTSFPSVACIIQDQLGAKNAAAMDVSAACAGFMYGLITAKQFIDTGAYKHVLVVGAEKLSKITDWSDRTTCVLFGDGAGAAVVGEVGEGKGILSFELGANGAGAKELYLNHDDHIIMNGREVYKFAVRQMPDSTVNVIEQLGLSRDDVDYLVPHQANIRIMEAARERLGISEDKMAKSIEKFGNNSSASIPMALSEAVKEGKIKDNDLIVLVGFGGGLTWGAVALRWGK

SEQ ID NO: 88491 - DNA, 954 bp, Pasteurella multocida
  CDS (1)..(954): transl_table=11
atgtatagtaaaatcttatccaccgggagttatttacccaaacatatccgtacgaatgccgatttagaaaaaatggtggacacctctgatgaatggatttcggaacgtactggcatcaaagaacgtcgcattgctgaagcaagcgaaactgtggcaaccatgggatttgaagctgcccagaattgcttagcggtatcgcctatggatgtcaatgagattgatcttattgtcgtcgcgacgactagcgcaacacatgcttttccaagtacggcatgtcaaattcagaaaatgctcggcataaaagacgcgattgcgtttgatgtcgcagcggcctgttcgggctttgtttacgccttaaccgttgccgatcaatttatccgtaccggaaaagtaaaaaaagccctcgtgattggggcggatctcttttcccgcgcgttaaatccagaggatcgaggcacgattattttatttggtgatggtgccggtgctgtgattttagaagcaagtgagcaagcggggatcatttcaacgcatttacatgcaacaggcgaaagtgctgaagtcttaaccttagctaatcaggcgcgcggtattgaatccgatcctgcctatttagaaatgcagggtaacgcaacttttaaaattgcagtacgcgaattagcaaatgtggtggaagaaaccttagaagccaaccagttagataagaaagatattgattggttagttccacatcaggcgaacttgcggattatttccgctaccgcaaaaaaattagatatggatatgtcacaagtcgtggttacacttgatcgccatggcaatacgtctgcaggcagtattccaagtgcgcttgatgaggcagtgcgtgatggacgtattcagcgtggacaattgttgttattagaagcattcggcggtggtctgacttggggatcggcgttagttaggttttaa

SEQ ID NO: 88492 - protein, 317 aa, Pasteurella multocida
MYSKILSTGSYLPKHIRTNADLEKMVDTSDEWISERTGIKERRIAEASETVATMGFEAAQNCLAVSPMDVNEIDLIVVATTSATHAFPSTACQIQKMLGIKDAIAFDVAAACSGFVYALTVADQFIRTGKVKKALVIGADLFSRALNPEDRGTIILFGDGAGAVILEASEQAGIISTHLHATGESAEVLTLANQARGIESDPAYLEMQGNATFKIAVRELANVVEETLEANQLDKKDIDWLVPHQANLRIISATAKKLDMDMSQVVVTLDRHGNTSAGSIPSALDEAVRDGRIQRGQLLLLEAFGGGLTWGSALVRF

SEQ ID NO: 88493 - DNA, 993 bp, Pseudomonas aeruginosa
  CDS (1)..(993): transl_table=11
atgccgcgcgccgccgtggtctgcggcctgggcagctacctgcccgaggccgtgctcagcaacgacatgctcgccgccgagctggacacttccgacgcctggatcagcagccgcaccggcgtgcgccagcggcatatcgccggcgacctcggcagcggcgacctggccctgcgggcggcctccgccgcgctcgcctcggcggggctggagcgagtcgatgcggtggtgctggcaaccagcaccggcgacttctgctgcccggccaccgcgcccagggtcgcggcgcgcctggggttggtcggcgcgctcgcgttcgacctgtccgccgcctgcaccggcttcgtctacggcctggccagcgtcggctcgctgatcagcgccgggctggcggacagcgcgctgctggtcggggtggacactttcagccataccctcgaccccgccgatcgctcgacccgcgcactgttcggcgacggcgccggagcggtggtgctgcgtgccggcgatgccgaggaagaaggcgcgctgctggccttcgacctcggcagcgacggccaccagttcgacctgctgatgacccccgccgtcagtcgcgccgaacgcagttccggacaggcctccaactacttccggatggacggcaaggcagtgttcggccaggcggtgacgcagatgagcgactcggtgcggcgggtgctcgaccgggtcggctggcaagcttcggacctccatcacctggtcccgcaccaggccaacacacgcattctcgcggcggtcgccgaccagctcgaccttcccgtcgagcgagtggtgagcaacatcgccgaggtgggcaataccgtcgccgcctcgattcccctggccctggcccacggcctgcgccaaggcatcctgcgcgacggcggcaacatggtcctcaccggtttcggtgccggactgacctggggttcggtcgccctgcgctggccgaagatcgttccgacaatggactga

SEQ ID NO: 88494 - protein, 330 aa, Pseudomonas aeruginosa
MPRAAVVCGLGSYLPEAVLSNDMLAAELDTSDAWISSRTGVRQRHIAGDLGSGDLALRAASAALASAGLERVDAVVLATSTGDFCCPATAPRVAARLGLVGALAFDLSAACTGFVYGLASVGSLISAGLADSALLVGVDTFSHTLDPADRSTRALFGDGAGAVVLRAGDAEEEGALLAFDLGSDGHQFDLLMTPAVSRAERSSGQASNYFRMDGKAVFGQAVTQMSDSVRRVLDRVGWQASDLHHLVPHQANTRILAAVADQLDLPVERVVSNIAEVGNTVAASIPLALAHGLRQGILRDGGNMVLTGFGAGLTWGSVALRWPKIVPTMD

SEQ ID NO: 88495 - DNA, 981 bp, Ralstonia solanacearum
  CDS (1)..(981): transl_table=11
atgacacgttacgcaaggatcatcggcacgggcagctatctgccgcccaagcgggtcaccaatcacgagctggccgcccagctggccgagcaaggcatcgagacgagcgacgaatggatcgtcacgcgcagcggcatccgcgcgcgccattacgccgagcctgatgtcacgtgcagcgacctggccgcgaaggccgccgagcgcgccatcgaagctgccggcatcgatcgcgccgagatcgacctgattctggtggcgacgtccacgccggacttcgtcttccccagcgccgcctgcctggtgcagcagaagctgggcctgtccaaccactgcgcggcgttcgatctgcaggccgtgtgctcgggcttcgtctacgggctggcgaccgccgacaagttcatccgcgccggcggttaccgcaacgcgctggtgatcggcgcggaagtcttctcgcgcattctcgatttcaatgaccgcaccacgtgcgtgctgttcggcgacggcgccggcgcggtggtattgcaggcatccgacgagcccggcattctgtcgaccgccttgcatgccgacggcagccatgcggatatcctctgcgtgcccggcaacgtggccggcggcgcgatcaagggcagtgccttcctgtacatggacgggcaggcggtcttcaagctggccgtcaacgtgctcgacaaggtggcgcgcgaagcgctggcgctggcggaggtcgagtcctcgcagatcgactggctgatcccgcaccaggccaacatccgcatcatgcagggcaccgccaagaagctcggtctgcccggcgagcgcatggtggtgacggtcgatgagcacggcaacacgtcggccgcgtcgattccgctggcgctggacgccgccgtacgcgacgggcgtatccagaagggccaccatgtgctgctcgagggcgtgggcggcggcttcacctggggtgccgcgttgctgcgcttctga

SEQ ID NO: 88496 - protein, 326 aa, Ralstonia solanacearum
MTRYARIIGTGSYLPPKRVTNHELAAQLAEQGIETSDEWIVTRSGIRARHYAEPDVTCSDLAAKAAERAIEAAGIDRAEIDLILVATSTPDFVFPSAACLVQQKLGLSNHCAAFDLQAVCSGFVYGLATADKFIRAGGYRNALVIGAEVFSRILDFNDRTTCVLFGDGAGAVVLQASDEPGILSTALHADGSHADILCVPGNVAGGAIKGSAFLYMDGQAVFKLAVNVLDKVAREALALAEVESSQIDWLIPHQANIRIMQGTAKKLGLPGERMVVTVDEHGNTSAASIPLALDAAVRDGRIQKGHHVLLEGVGGGFTWGAALLRF

SEQ ID NO: 88497 - DNA, 972 bp, Rhizobium meliloti
  CDS (1)..(972): transl_table=11
atgatccgttctgtcgtgcgcggcttcggggcagcactgccgaagcgagtgatgaccaataaggaaatcgaatccagggtcgacacgtccgacgaatggatcgtgcagcggaccggcatccgccagcgctatatcgcaggcgagggcgagacgagcgcctctctcggcgaggcggcggcgcgggcggcgctcgagagagccgggctgacgccggacgacgtcgacctgatcatcgtcgcgacctccactccggacaacaccttccctgcaaccgcagtcaacatccagaaccgcctcggcatgcggcacggtgcggcattcgacatgcaggcggtctgttccggcttcgtctacgcggtggcgacggccgacgcctatattcgcggcggcctctccaaacgcgctcttgtcatcggcgcagagaccttctcgcggcttctcgactggaccgaccggacgacgtgtgtgctgttcggcgacggcgccggcgcaatcgttctggaggcgcaggaggcggccgggaccaaggctgatcggggcgttctgacggcgcaattgcgctccgacggcgcccaccgcgacaagctctatgtcgacggcgggccgtcgacgaccggcaccgtcggccatctccggatggaagggcgcgaagtcttcaagcacgcggtcggcatgatcaccgacgtgatcgaggcggctttcgaggcaaccggaacgaccgcggacgacatcgattggctggttccgcaccaggccaatcgccgcattattgacggctcggccaagaagctgggcatccctctcgaaaaggttgtggttaccgtcgacctgcatggcaacacctccgcggcatcgattccgcttgccctcgatgccgccgcctctgacggccgcatcaagaagggtgatctcgtaatgctcgaagcgatgggcgggggcttcacctggggctccgttcttcttcgctggtaa

SEQ ID NO: 88498 - protein, 323 aa, Rhizobium meliloti
MIRSVVRGFGAALPKRVMTNKEIESRVDTSDEWIVQRTGIRQRYIAGEGETSASLGEAAARAALERAGLTPDDVDLIIVATSTPDNTFPATAVNIQNRLGMRHGAAFDMQAVCSGFVYAVATADAYIRGGLSKRALVIGAETFSRLLDWTDRTTCVLFGDGAGAIVLEAQEAAGTKADRGVLTAQLRSDGAHRDKLYVDGGPSTTGTVGHLRMEGREVFKHAVGMITDVIEAAFEATGTTADDIDWLVPHQANRRIIDGSAKKLGIPLEKVVVTVDLHGNTSAASIPLALDAAASDGRIKKGDLVMLEAMGGGFTWGSVLLRW

SEQ ID NO: 88499 - DNA, 1038 bp, Rhodopirellula baltica
  CDS (1)..(1038): transl_table=11
atgggaaatttgaaaggcgttcgcattgccggcacgggatcgtacgttcccgaacgcattgtcacgaatgaagacttggccgctctgggttgcgacagcgattggatcgttcgccgcaccggcatcttgcaacgtcgacacgcggagcctgggcaagcgaccagcgatctttgttacgaggcggcgcttcgttgtcttgagaacgcgaatgtttcggtcgacgagattgacttgatcctggttgccacgatcacacccgaccatcccactccatcgacggcttgtcacttgcaacgtcgtctcggtgcggttgcacccgcaatggacatcggtgctgcgtgtgctggattcatgtacgcgttggtcactggtgcccagttcgtttccaacggcaatgctcgcaacgttttggtcatcggtgctgacctgatgagtcgcacggtggatcctgaggacaagaaaacctatccgttgtttggtgatgccgctggcgcagccctgctggtgccatcgacccaagacgaatgccaatcaacagaatgcaacggttcagcagctgattccacgatccaaaccgatggtcttttggcctatcagttaggcagtgaaggatgcggtggcgaaatgctgtgcattcctgcgggcggatcccgaacgccaattaccaccgatggcgaagactcagccagccgttatttgcagatggatggtcgtggtgtcttcaagtgggcagtgcgagtctttgacgagagtgccaaggacgtcttgcgagcggccaacgtttcttcggatcaactcagcttggttgtgttgcaccaagccaatcaacgaatcattgattcagcggtttccgacttgaacgttccgcctgaaaaagtgttcgtcaatctcgacaagtatggcaatacctccggagccagcattccactcgccctggacgaagccgctcgagccggccgtttgaaagaaggcgatctagtgctgctgtgcggcttcggtgcaggtttggcctggggcaccgcgctgtttcgttggtag

SEQ ID NO: 88500 - protein, 345 aa, Rhodopirellula baltica
MGNLKGVRIAGTGSYVPERIVTNEDLAALGCDSDWIVRRTGILQRRHAEPGQATSDLCYEAALRCLENANVSVDEIDLILVATITPDHPTPSTACHLQRRLGAVAPAMDIGAACAGFMYALVTGAQFVSNGNARNVLVIGADLMSRTVDPEDKKTYPLFGDAAGAALLVPSTQDECQSTECNGSAADSTIQTDGLLAYQLGSEGCGGEMLCIPAGGSRTPITTDGEDSASRYLQMDGRGVFKWAVRVFDESAKDVLRAANVSSDQLSLVVLHQANQRIIDSAVSDLNVPPEKVFVNLDKYGNTSGASIPLALDEAARAGRLKEGDLVLLCGFGAGLAWGTALFRW

SEQ ID NO: 88501 - DNA, 954 bp, Rickettsia felis
  CDS (1)..(954): transl_table=11
atgacctgtaaaattatcggctccggcgggtatcttccttcaaaaatagttagtaatgacgagcttgcaaaatttgtagatactaacgatgaatggattagaacaagaacgggtattacgcagcgtcatatagcaggtgatacagaatatacttcccatcttgctttaaaatcagctgaaaaagctatagcagatgcgagggtgtcggtaaatgatattgatttaattattacatgtactactactccggataatagcttcccttcagtcgcctctaagcttcaaggttatcttggtttaactaatataccgtcttttgatttacaagcagtgtgtgccggctttgtttatggtttacaagtagcgaattctcttattgcatccggtaaatataaaactgttttgcttataggagccgagaaaatgacgtcattattagactggagtgatcggtctacttgcgttttattcggtgatggggccggtagcgtaatattacagcgtagtagtgatgattccggtttaatagatagtaatatcttctcaagcggggctgattatgaaatattatacacgaacggtggtgtaagtatgaatggtattagtggcaagatagttatgcaggggcaaaaattatttcgtcatgcaatagaaaaaatgcaacaatctatagaagatttactacatgctaatcaattcagtgtaagcgatattgattatttcatacctcatcaagcaaatatccgtattataaataaacttgctgaactattaaatatagaagagcataaagtagtgaaaaccgtagaaaaacatgctaactgctctgcggcttctattccgcttgctttgagtactctcaaagcatcaggtaaaataaaaaagggcgatattctactattctcggctatcggtgcagggctcacttggggcagtgcattaattagatggtga

SEQ ID NO: 88502 - protein, 317 aa, Rickettsia felis
MTCKIIGSGGYLPSKIVSNDELAKFVDTNDEWIRTRTGITQRHIAGDTEYTSHLALKSAEKAIADARVSVNDIDLIITCTTTPDNSFPSVASKLQGYLGLTNIPSFDLQAVCAGFVYGLQVANSLIASGKYKTVLLIGAEKMTSLLDWSDRSTCVLFGDGAGSVILQRSSDDSGLIDSNIFSSGADYEILYTNGGVSMNGISGKIVMQGQKLFRHAIEKMQQSIEDLLHANQFSVSDIDYFIPHQANIRIINKLAELLNIEEHKVVKTVEKHANCSAASIPLALSTLKASGKIKKGDILLFSAIGAGLTWGSALIRW

SEQ ID NO: 88503 - DNA, 954 bp, Salmonella typhimurium
  CDS (1)..(954): transl_table=11
atgtatacgaagattattggtactggcagctatctgcccgaacaagtgcggactaacgccgatctggaaaaaatggttgagacctctgacgagtggattgtcactcgtacaggtattcgtaaacgccatatcgccgcgccgaatgaaactgtcgcgacgatgggctttaccgctgcgaatcgcgcgattgagatggcggggatcgataaagaccaaattggcttgattgtggtggctaccacatcagcaacgcatgcatttccaagcgcggcatgtcagattcaaagtatgctcggtattaaaggttgcccggcgtttgatgtcgcggcagcgtgcgcaggtttcacctacgcgttaagcatcgccgaccagtacgttaaatccggcgcggttaaacacgcgctggtggtcggttccgatgtattagcccgcacttgcgatcctggcgatcgcggtacgatcattattttcggcgatggcgcaggcgcggccgtactgagcgcttctgaagaaccgggtattatctccactcatcttcatgccgatggccgttacggtgaattactgaccctgccgaatgccgatcgcgtaaatccggataacccgatttacctgacaatggcgggcaatgaagtctttaaagtggcggtcactgaactggcgcatattgtcgatgagacgctggcggctaataacctggatcgctcagaactcgattggctggtgccgcatcaggctaacctgcgtatcattagcgcgacagcgaaaaaactcggcatgtcgatggacaatgtcgtcgtcacgctggacaggcacggcaatacctccgcggcttctgtgccgtgcgcgctggatgaagccgtgcgtgacgggcgaattaaagccggtcagctggtattgcttgaagccttcgggggtggattcacctggggctccgcgctgattcgtttctag

SEQ ID NO: 88504 - protein, 317 aa, Salmonella typhimurium
MYTKIIGTGSYLPEQVRTNADLEKMVETSDEWIVTRTGIRKRHIAAPNETVATMGFTAANRAIEMAGIDKDQIGLIVVATTSATHAFPSAACQIQSMLGIKGCPAFDVAAACAGFTYALSIADQYVKSGAVKHALVVGSDVLARTCDPGDRGTIIIFGDGAGAAVLSASEEPGIISTHLHADGRYGELLTLPNADRVNPDNPIYLTMAGNEVFKVAVTELAHIVDETLAANNLDRSELDWLVPHQANLRIISATAKKLGMSMDNVVVTLDRHGNTSAASVPCALDEAVRDGRIKAGQLVLLEAFGGGFTWGSALIRF

SEQ ID NO: 88505 - DNA, 1880 bp, Spinacia oleracea
  CDS (167)..(1384)
ctccctgtctgtagttcacccatcctcctcataatttctcccaattgaatccattctgtgtcaaatgggctcaaaatactctcaaagtttcatctttcacaatctctccagctaaagatctcttcttctaaatcaacttttactgttcgtcttgttcttttgatcaatggcgacttcatatggcttcttctcaccttctgtaccttctagtctcaacaacaaaatttcgccatctttgggcataaatggatctgggttttgctcccatttgggtatcagtaaaagggttttctgttcgtccattgaagcttctgagaaacatgctgcagctggggtttcttccagtgaatcgagagtttctaggctagtaaataggggttgcaagctagttggttgtggttctgctgttccaaagctgcagatctccaatgatgacctttctaaatttgttgaaacttcggatgaatggatagctactcgaactgggatccgccaacgacatgttctttcaggtaaggatagcttggtagacttggctgccgaagcagcaaggaatgctcttcagatggccaacgttaatcctgatgatattgaccttatcttgatgtgtacttctacaccagaggacctctttggcagtgctcctcaggtacaaagagcattgggatgcagccgaactccgttgtcttatgatattactgcagcctgcagtggatttatgctgggtttggtgtcagctgcttgtcacgtaaggggtggtggatttaagaacgtgctagttataggtgccgatgctctttctcgtttcgttgactggactgatagaggtacttgcatactttttggtgatgctgctggagctgtagttgtgcaggcttgtgacagtgaagaagacggcatgtttgcttttgacctgcatagtgatggcgggggcggaaggcatttgaatgcatccctgttaaacgatgagactgatgcagcaataggcaacaatggtgcggtgacaggtttccccccgaagcggccatcttattcatgtattaatatgaatgggaaagaggtctttcgctttgctgttagatgtgtgccccagtctattgaggctgcacttcaaaaggctggtctaactagttccaacattgattggttattattgcatcaggcaaaccagaggattattgatgcggttgcaacacgtttggaagttccttcagaaagggtattgtctaatttggcaaattatggtaacaccagtgctgcatcaatccccttggcattggatgaagccgttcggagtggaaaagttaagccaggaaatataattgcgacatccggatttggtgctggtcttacatggggttcgtccattattagatggggataaacaaagaaagacagatttatggacatcattacagtgttgaagatgaatgggaaaggaggaagtgtgtttgtttaacacttgcaatccattccatactcaagaagaatttcactcccttttggttaagattaagatgttacaagagctgcaacttctcgtaaattcgtactgcacagaagctcaatcagagaggccactagtgttataccttttcccctatatctgctaaataagtctatttgtggtcacctaggaaaataaaaatttcccttcaattccctgagttgtaattcattgtttttcgcagtcagtcagttagcagaactaggaattttttcaggcagagcgattcaaatagcttcttcaggcttgctcttcctatctgttagaccttgtatcagttattcagttgtatgttgtactctttcgttatgcacttttcatcttcattcaatcattaatcagagttacttgctgatttactgaaaaaaaaaaa

SEQ ID NO: 88506 - protein, 405 aa, Spinacia oleracea
MATSYGFFSPSVPSSLNNKISPSLGINGSGFCSHLGISKRVFCSSIEASEKHAAAGVSSSESRVSRLVNRGCKLVGCGSAVPKLQISNDDLSKFVETSDEWIATRTGIRQRHVLSGKDSLVDLAAEAARNALQMANVNPDDIDLILMCTSTPEDLFGSAPQVQRALGCSRTPLSYDITAACSGFMLGLVSAACHVRGGGFKNVLVIGADALSRFVDWTDRGTCILFGDAAGAVVVQACDSEEDGMFAFDLHSDGGGGRHLNASLLNDETDAAIGNNGAVTGFPPKRPSYSCINMNGKEVFRFAVRCVPQSIEAALQKAGLTSSNIDWLLLHQANQRIIDAVATRLEVPSERVLSNLANYGNTSAASIPLALDEAVRSGKVKPGNIIATSGFGAGLTWGSSIIRWG

SEQ ID NO: 88507 - DNA, 975 bp, Xylella fastidiosa
  CDS (1)..(975): transl_table=11
atgagcaagcggatctacgctagaatcgcaggcacaggcggttatttgccggaaaaagtgctaactaatgacgatctggcccatatcgtcgataccagcgatgaatggatccgcactcgcactggtatccgtgagcggcatattgctgccgaaggcgaaacgaccagcgatttggcttatgaggctgcgatatgtgcacttgaagctgctgaggtgcggtccgctgatttggatttgattgttgtcgggaccacaacgccggacttgatttttccgtctactgcttgcttgttacaggcacgtctgggagctgttggttgtggtgcgttcgacgtgaatgctgcatgttccggttttgtatatgcgttgagcgtggcagaaaaatttgtgtcttcgggttgctccaaaacagtgttagttgtgggggccgataccttgacccgaattatcgactggagtgaccgcacaacttgcgtactattcggggatggtgccggggcggtggtgctcaaggctgatgaagatacagggattctcagtacccatctgcatgctgatgggagcaaaaaagaattgttgtgggatcctgttggtgtgtcagttggttttggtgaaggcaaagattgcggtgcgttgttgatgaagggaaatgaggtgtttaaatatgccgttaaagcccttgatagagtggttgatgagacgttggaagcgaatcatctggataagcacgaactcgattggttaattcctcaccaagccaacttacgcattatcgaagccaccgcaaggcgtttagatatgtcgatggatcaggtggtggtcacggttgatcgtcacggcaacacttccacggcttcggtgccactcgcgcttgacgaggctatccgttctggtcgtgtgcagcgtggtcagttactgctcctggaagcattcggtggtggttttacttggggatcggcgttactgcgctattga

SEQ ID NO: 88508 - protein, 324 aa, Xylella fastidiosa
MSKRIYARIAGTGGYLPEKVLTNDDLAHIVDTSDEWIRTRTGIRERHIAAEGETTSDLAYEAAICALEAAEVRSADLDLIVVGTTTPDLIFPSTACLLQARLGAVGCGAFDVNAACSGFVYALSVAEKFVSSGCSKTVLVVGADTLTRIIDWSDRTTCVLFGDGAGAVVLKADEDTGILSTHLHADGSKKELLWDPVGVSVGFGEGKDCGALLMKGNEVFKYAVKALDRVVDETLEANHLDKHELDWLIPHQANLRIIEATARRLDMSMDQVVVTVDRHGNTSTASVPLALDEAIRSGRVQRGQLLLLEAFGGGFTWGSALLRY

SEQ ID NO: 88509 - DNA, 951 bp, Yersinia pestis
  CDS (1)..(951): transl_table=11
atgtatactaagattctcggtacggggagttatctgcccgtacaagtgcgcagcaatgctgatttagaaaaaatggtggatacgtcagatgagtggattgtcactcgtactggtatccgtgagcggcgtattgcaggccttgacgaaacagtcgcgactatgggcttccaggcggcagaaaaagcgctggaaatggccggtattgataaggacgatatcgggttgattatcgttgcgaccacctcttcaagccatgctttcccaagttcggcttgccaggtgcagcgaatgctcggtatcaaagatgcagcttcttttgatttggctgcggcttgcgcgggttttacctatgcgctgagtgttgctgaccagtatgttaagagtggtgcggtcaagcatgccattgttattgggtcagatgtattgtcccgtgcattggatccagaagatcgtggtacgatcattctgtttggcgatggcgctggcgcggtggtacttggtgcatctgagcaaccaggtattatgtctacgcatttacatgctgatggtcgttatggcgagttgctcgctttaccgtatccagaccgtcagcaggaccaacctgcctacgtcacgatggcaggcaatgaagtttttaaagttgcggtaacggaactggcccacattgtggatgaaacattgcaggctaataatctggatcgcactgcgctcgattggttggtgccacatcaggctaacctgcgtattattagcgctacggctaaaaagttaggcatggggatggataaagtggtgatcacgcttgatcgccatgggaacacctccgcggcatcagtgccttcggcattcgatgaagcagtgcgagatgggcgaattcaacgtgggcagttggtattgcttgaggcgtttggcggtggatttacctggggttctgcactggttcgtttttga

SEQ ID NO: 88510 - protein, 316 aa, Yersinia pestis
MYTKILGTGSYLPVQVRSNADLEKMVDTSDEWIVTRTGIRERRIAGLDETVATMGFQAAEKALEMAGIDKDDIGLIIVATTSSSHAFPSSACQVQRMLGIKDAASFDLAAACAGFTYALSVADQYVKSGAVKHAIVIGSDVLSRALDPEDRGTIILFGDGAGAVVLGASEQPGIMSTHLHADGRYGELLALPYPDRQQDQPAYVTMAGNEVFKVAVTELAHIVDETLQANNLDRTALDWLVPHQANLRIISATAKKLGMGMDKVVITLDRHGNTSAASVPSAFDEAVRDGRIQRGQLVLLEAFGGGFTWGSALVRF

SEQ ID NO: 88511 - DNA, 1215 bp, Brassica napus
  CDS (1)..(1215)
atggcgaatgcatctggcttcttcactcatccttcgatttcctcaatgcgaagaagaacccacctcccgattcaagtttctggatctgggttttgcgtctcgaaacgattctccaaaagggtcctctgctctagcctcagctccctcgataacaatgcttctccttctccctctcaataccgaccacccaggctagtaccgagtggctgcaaactgattggatctggttcagctgtcccaagtcttctgatttctaatgatgatctcgcaaagatagtcgatactaatgatgaatggatagctactcgcactggtatccgcaaccgcagagttgtatcaggcaaagatagcttggttggcttagcagtggaagcagcaaccaaagcccttgaaatggcagaggttgctcctgaggatattgacttagtcttgatgtgtacctccactcctgatgatctcttcggtgctgctccacagattcagaaggcgcttggttgcacaaagaaccctttggcatatgatatcacagctgcttgtagtggatttgttttgggtctagtctcagctgcttgtcatataagaggaggcggttttaagaatgttttagtgattggagctgattctttatctcggtttgttgattggactgatagaggaacttgcatcctctttggagatgctgctggtgctgtggttgttcaggcttgtgacattgaggatgatgggttatatagtttcgatgtacacagcgatggagacggtcgtagacatttgaatgcttctattaaagaatcccaaaccaatggtgacttgagctccaacggatcagcgttgggagacttccaaccgaaacaagcttcatactcttgcattcagatgaatggaaaagaagtctttcgctttgctgtcaaatgcgttccccaatctattgaatctgctttacaaaaagccggtcttcctgcttccgccatcgactggctcctcctccaccaggcaaaccagagaataatagactctgtggctacaaggctgcagttcccaccagaaagagtcatatcaaacttggctaattacggtaacacaagcgctgcttctatccctctagctcttgatgaggcggtgagaagcgggaaagttaaaccgggacataccatagccacttccggttttggagccggtttaacttggggttcagcaattatcaggtggagatga

SEQ ID NO: 88512 - protein, 404 aa, Brassica napus
MANASGFFTHPSISSMRRRTHLPIQVSGSGFCVSKRFSKRVLCSSLSSLDNNASPSPSQYRPPRLVPSGCKLIGSGSAVPSLLISNDDLAKIVDTNDEWIATRTGIRNRRVVSGKDSLVGLAVEAATKALEMAEVAPEDIDLVLMCTSTPDDLFGAAPQIQKALGCTKNPLAYDITAACSGFVLGLVSAACHIRGGGFKNVLVIGADSLSRFVDWTDRGTCILFGDAAGAVVVQACDIEDDGLYSFDVHSDGDGRRHLNASIKESQTNGDLSSNGSALGDFQPKQASYSCIQMNGKEVFRFAVKCVPQSIESALQKAGLPASAIDWLLLHQANQRIIDSVATRLQFPPERVISNLANYGNTSAASIPLALDEAVRSGKVKPGHTIATSGFGAGLTWGSAIIRWR

SEQ ID NO: 88513 - DNA, 1215 bp, Brassica napus
  CDS (1)..(1215)
atggcgaatgcatctggcttcttcactcatccttcgatttcctcaatgcgaagaagaacccacctcccgattcaagtttctggatctgggttttgcgtctcgaaacgattctccaaaagggtcctctgctctagcctcagctccctcgataacaatgcttctccttctccctctcaataccgaccacccaggctagtaccgagtggctgcaaactgattggatctggttcagctgtcccaagtcttctgatttctaatgatgatctcgcaaagatagtcgatactaatgatgaatggatagctactcgcactggtatccgcaaccgcagagttgtatcaggcaaagatagcttggttggcttagcagtggaagcagcaaccaaagcccttgaaatggcagaggttgctcctgaggatattgacttagtcttgatgtgtacctccactcctgatgatctcttcggtgctgctccacagattcagaaggcgcttggttgcacaaagaaccctttggcatatgatatcacagctgcttgtagtggatttgttttgggtctagtctcagctgcttgtcatataagaggaggtggttttaagaatgttttagtgattggagctgattctttatctcggtttgttgattggactgatagaggaacttgcatcctctttggagacgccgctggtgctgtggttgttcaggcatgcgacattgaggatgatgggttatatagtttcgatgtacacagcgatggagacggtcgtagacatttgaatgcttctattaaagaatcccaaaccaatggtgacttgagctccaacggatcagcgttgggagacttccaaccgaaacaagcttcatactcttgcattcagatgaatggaaaagaagtctttcgctttgctgtcaaatgcgttccccaatctattgaatctgctttacaaaaagccggtcttcctgcttccgccatcgactggctcctcctccaccaggcaaaccagagaataatagactctgtggctacaaggctgcagttcccaccagaaagagtcatatcaaacttggctaattacggcaacacaagcgctgcttcgatcccgctagctcttgatgaggcagtgagaagcggaaaagttaaaccaggacataccatagccacatccggttttggagccggtttaacttggggttcagcaattgtcaggtggagatga

SEQ ID NO: 88514 - protein, 404 aa, Brassica napus
MANASGFFTHPSISSMRRRTHLPIQVSGSGFCVSKRFSKRVLCSSLSSLDNNASPSPSQYRPPRLVPSGCKLIGSGSAVPSLLISNDDLAKIVDTNDEWIATRTGIRNRRVVSGKDSLVGLAVEAATKALEMAEVAPEDIDLVLMCTSTPDDLFGAAPQIQKALGCTKNPLAYDITAACSGFVLGLVSAACHIRGGGFKNVLVIGADSLSRFVDWTDRGTCILFGDAAGAVVVQACDIEDDGLYSFDVHSDGDGRRHLNASIKESQTNGDLSSNGSALGDFQPKQASYSCIQMNGKEVFRFAVKCVPQSIESALQKAGLPASAIDWLLLHQANQRIIDSVATRLQFPPERVISNLANYGNTSAASIPLALDEAVRSGKVKPGHTIATSGFGAGLTWGSAIVRWR

SEQ ID NO: 88515 - DNA, 1206 bp, Zea mays
  CDS (1)..(1206)
atggtcgccgcctccggcctcgcgctgccgcgggtgtccgcaccatgcccggtgcgcacgcgtggtggcctccgccccgccttcctccgagtcgcgcagcccgtgacgctgccaccgccccagctccggtgctgcgcgtccaccgtcgacgatggcgtggtgtccgctgcggcttccaagtcccgcctccccagggtggttggtatgggttcaaagctcgttggatgtggatcagccatcccaacacttagcgtttcaaatgatgacctttcgaagatagttgaaacatcagatgaatggattgcggctcgaactgggattcgtaacaggcgagttctttcaggagatgaaacattgcggggactctcaataaaagcagctcaaagggcacttgaaatggccaaagtaaaagctgaagatgttgaccttgttctcctttgtacatctactccagatgatttgtttggaggtgccactcaggtgctgacggacgtggggtgcacaaaggcttttggatttgatattacagctgcttgcagtgggtttatagttggcttaatcacagctactcgttttatcaaaggtggaggttttcagaatatcctagtaattggtgctgatgctctttcaaaatatgtggattggacagacagaggtacatgcatcctttttggtgatgctgctggtgctgtgttggtacaggcatgcagcgctgatgaagatggcttgctaggtttttgtgttcaaagtgatggcaatgggcaaaaacacctaaatgccgcaacggcaaacgatgagtcaatcttgtccaataccaatggtgttcctggatttccgccaaagaaggcaacctactcatgcattcagatgaacggaaaggaagttttccgctttgctgtccgatgtgtgccacagtccattgagaaggcactccaagaagctggtttgcccgcctccagtatagactggttgttgttacatcaagctaatcagcggattattgatgcggctgccagtcgattagatatcccgtccgacaaggttatttcaaatcttgccaactatggcaataccagcgcggcatccatcccgttagctttggatgaggctgttcgcagcggcaaggtgaaggctggcgatattattgcggcgtcaggttttggtgctggacttacctggggttcagctattgtcaagtggggctaa

SEQ ID NO: 88516 - protein, 401 aa, Zea mays
MVAASGLALPRVSAPCPVRTRGGLRPAFLRVAQPVTLPPPQLRCCASTVDDGVVSAAASKSRLPRVVGMGSKLVGCGSAIPTLSVSNDDLSKIVETSDEWIAARTGIRNRRVLSGDETLRGLSIKAAQRALEMAKVKAEDVDLVLLCTSTPDDLFGGATQVLTDVGCTKAFGFDITAACSGFIVGLITATRFIKGGGFQNILVIGADALSKYVDWTDRGTCILFGDAAGAVLVQACSADEDGLLGFCVQSDGNGQKHLNAATANDESILSNTNGVPGFPPKKATYSCIQMNGKEVFRFAVRCVPQSIEKALQEAGLPASSIDWLLLHQANQRIIDAAASRLDIPSDKVISNLANYGNTSAASIPLALDEAVRSGKVKAGDIIAASGFGAGLTWGSAIVKWG

SEQ ID NO: 88517 - DNA, 1206 bp, Zea mays
  CDS (1)..(1206)
atggtcgccgcctccggcctcgcgctgccgcgggtgtccgcaccatgcccggtgcgcacgcgtggtggcctccgccccgccttcctccgagtcgcgcagcccgtgacgctgccaccgccccagctccggtgctgcgcgtccaccgtcgacgatggcgtggtgtccgctgcggcttccaagccccgcctccccagggtggttggtatgggttcaaagctcgttggatgtggatcagccatcccaacacttagcgtttcaaatgatgacctttcgaagatagttgaaacatcagatgaatggattgcggctcgaactgggattcgtaacaggcgagttctttcaggagatgaaacattgcggggactctcgatacaagcagctcaaagggcacttgagatggccggagtaaaagctgaagatgtcgacctcgttcttctttgtacatctactccagatgatctgtttggaggtgctgctcaggtgctgtccgaagtggggtgcacaaaagcttttggatttgatattacagctgcttgtagtgggtttttagtcggcttaatcacagctactcgctttatcaaaggcggaggttttcagaatgtcttagtaattggtgcagatgctctttcaaaatacgtggattggacagacagaggtacatgcatcctttttggtgatgctgctggtgctgtgttggtacaggcatgcagcgctgatgaagatggcttgctaggtttttgtgttcaaagtgatggcaatgggcaaaaacacctaaatgccgcaacggcaaacgatgagtcaatcttgtccaataccaatggtgttcctggatttccgccaaagaaggcaacctactcatgcattcagatgaacggaaaggaagttttccgctttgctgtccgatgtgtgccacagtccattgagaaggcactccaagaagctggtttgcccgcctccagtatagactggttgttgttacatcaagctaatcagcggattattgatgcggctgccagccgattagatatcccgtccgacaaggttatttcaaatcttgccaactatggcaataccagtgcggcatccatcccgttagctttggatgaggctgttcgcagcggcaaggtgaaggctggcgatattattgcggcgtcaggttttggtgctggacttacctggggttcagctattgtcaagtggggctaa

SEQ ID NO: 88518 - protein, 401 aa, Zea mays
MVAASGLALPRVSAPCPVRTRGGLRPAFLRVAQPVTLPPPQLRCCASTVDDGVVSAAASKPRLPRVVGMGSKLVGCGSAIPTLSVSNDDLSKIVETSDEWIAARTGIRNRRVLSGDETLRGLSIQAAQRALEMAGVKAEDVDLVLLCTSTPDDLFGGAAQVLSEVGCTKAFGFDITAACSGFLVGLITATRFIKGGGFQNVLVIGADALSKYVDWTDRGTCILFGDAAGAVLVQACSADEDGLLGFCVQSDGNGQKHLNAATANDESILSNTNGVPGFPPKKATYSCIQMNGKEVFRFAVRCVPQSIEKALQEAGLPASSIDWLLLHQANQRIIDAAASRLDIPSDKVISNLANYGNTSAASIPLALDEAVRSGKVKAGDIIAASGFGAGLTWGSAIVKWG

SEQ ID NO: 88519 - DNA, 20 bp, Artificial sequence
  primer
atgcgccaacgctacatttg

SEQ ID NO: 88520 - DNA, 20 bp, Artificial sequence
  primer
ttaccaccgcactatgctag

SEQ ID NO: 88521 - protein, 350 aa, Artificial sequence
  consensus sequence
  Variant (2)..(2): Xaa in position 2 is any amino acid
  Variant (4)..(6): Xaa in position 4 to 6 is any amino acid
  Variant (8)..(9): Xaa in position 8 to 9 is any amino acid
  Variant (10)..(12): Xaa in position 10 to 12 is any or no amino acid
  Variant (14)..(19): Xaa in position 14 to 19 is any amino acid
  Variant (20)..(26): Xaa in position 20 to 26 is any or no amino acid
  Variant (28)..(28): Xaa in position 28 is any amino acid
  Variant (30)..(30): Xaa in position 30 is any amino acid
  Variant (33)..(34): Xaa in position 33 to 34 is any amino acid
  Variant (39)..(40): Xaa in position 39 to 40 is any amino acid
  Variant (42)..(54): Xaa in position 42 to 54 is any amino acid
  Variant (55)..(57): Xaa in position 55 to 57 is any or no amino acid
  Variant (60)..(61): Xaa in position 60 to 61 is any amino acid
  Variant (63)..(65): Xaa in position 63 to 65 is any amino acid
  Variant (66)..(66): Xaa in position 66 is any or no amino acid
  Variant (68)..(72): Xaa in position 68 to 72 is any amino acid
  Variant (73)..(74): Xaa in position 73 to 74 is any or no amino acid
  Variant (76)..(80): Xaa in position 76 to 80 is any amino acid
  Variant (82)..(82): Xaa in position 82 is any amino acid
  Variant (85)..(90): Xaa in position 85 to 90 is any amino acid
  Variant (91)..(92): Xaa in position 91 to 92 is any or no amino acid
  Variant (94)..(96): Xaa in position 94 to 96 is any amino acid
  Variant (98)..(99): Xaa in position 98 to 99 is any amino acid
  Variant (102)..(105): Xaa in position 102 to 105 is any amino acid
  Variant (106)..(108): Xaa in position 106 to 108 is any or no amino acid
  Variant (110)..(110): Xaa in position 110 is any amino acid
  Variant (112)..(113): Xaa in position 112 to 113 is any amino acid
  Variant (115)..(115): Xaa in position 115 is any amino acid
  Variant (117)..(117): Xaa in position 117 is any amino acid
  Variant (120)..(122): Xaa in position 120 to 122 is any amino acid
  Variant (124)..(125): Xaa in position 124 to 125 is any amino acid
  Variant (127)..(131): Xaa in position 127 to 131 is any amino acid
  Variant (132)..(132): Xaa in position 132 is any or no amino acid
  Variant (134)..(137): Xaa in position 134 to 137 is any amino acid
  Variant (138)..(139): Xaa in position 138 to 139 is any or no amino acid
  Variant (142)..(142): Xaa in position 142 is any amino acid
  Variant (144)..(147): Xaa in position 144 to 147 is any amino acid
  Variant (149)..(151): Xaa in position 149 to 151 is any amino acid
  Variant (153)..(154): Xaa in position 153 to 154 is any amino acid
  Variant (157)..(157): Xaa in position 157 is any amino acid
  Variant (158)..(159): Xaa in position 158 to 159 is any or no amino acid
  Variant (161)..(162): Xaa in position 161 to 162 is any amino acid
  Variant (167)..(167): Xaa in position 167 is any amino acid
  Variant (171)..(188): Xaa in position 171 to 188 is any amino acid
  Variant (189)..(197): Xaa in position 189 to 197 is any or no amino acid
  Variant (200)..(203): Xaa in position 200 to 203 is any amino acid
  Variant (204)..(204): Xaa in position 204 is any or no amino acid
  Variant (206)..(212): Xaa in position 206 to 212 is any amino acid
  Variant (213)..(244): Xaa in position 213 to 244 is any or no amino acid
  Variant (246)..(246): Xaa in position 246 is any amino acid
  Variant (248)..(249): Xaa in position 248 to 249 is any amino acid
  Variant (252)..(253): Xaa in position 252 to 253 is any amino acid
  Variant (256)..(265): Xaa in position 256 to 265 is any amino acid
  Variant (267)..(276): Xaa in position 267 to 276 is any amino acid
  Variant (278)..(281): Xaa in position 278 to 281 is any amino acid
  Variant (286)..(286): Xaa in position 286 is any amino acid
  Variant (289)..(295): Xaa in position 289 to 295 is any amino acid
  Variant (297)..(310): Xaa in position 297 to 310 is any amino acid
  Variant (311)..(311): Xaa in position 311 is any or no amino acid
  Variant (319)..(319): Xaa in position 319 is any amino acid
  Variant (321)..(321): Xaa in position 321 is any amino acid
  Variant (324)..(325): Xaa in position 324 to 325 is any amino acid
  Variant (327)..(329): Xaa in position 327 to 329 is any amino acid
  Variant (331)..(334): Xaa in position 331 to 334 is any amino acid
  Variant (336)..(341): Xaa in position 336 to 341 is any amino acid
  Variant (342)..(343): Xaa in position 342 to 343 is any or no amino acid
  Variant (345)..(345): Xaa in position 345 is any amino acid
  Variant (347)..(348): Xaa in position 347 to 348 is any amino acid
GXGXXXPXXXXXNXXXXXXXXXXXXXTXDXWIXXRTGIXXRXXXXXXXXXXXXXXXXAAXXAXXXXAXXXXXXXDXXXXXTXTPXXXXXXXXAXXXQXXLGXXXXXXXAXDXXAXCXGFXXXLXXAXXXXXXGXXXXXXLVXGXXXXSXXXDXXDRXXXTXXLFGDXAGAXXXXXXXXXXXXXXXXXXXXXXXXXXXDGXXXXXLXXXXXXXXXXXXXXXXXXXXXXXXXXXXXXXXXXXXXXXMXGXXVFXXAVXXXXXXXXXXLXXXXXXXXXXDXXXXHQANXRIXXXXXXXLXXXXXXXXXXXXXXXGNTSAASXPXALXXAXXXGXXXXGXXXXXXXXGXGXXWG

SEQ ID NO: 88522 - protein, 12 aa, Artificial sequence
  protein pattern
  Variant (3)..(3): Xaa in position 3 is Asn, Ser or Thr
  Variant (4)..(4): Xaa in position 4 is Gly, Ser, Thr or Val
  Variant (6)..(6): Xaa in position 6 is Ala, Gly or Ser
  Variant (7)..(7): Xaa in position 7 is Ser or Thr
  Variant (8)..(8): Xaa in position 8 is Ile or Val
  Variant (9)..(9): Xaa in position 9 is Ala, Gly or Pro
  Variant (10)..(11): Xaa in position 10 to 11 is any amino acid
  Variant (12)..(12): Xaa in position 12 is Phe, Leu or Met
GNXXAXXXXXXX

SEQ ID NO: 88523 - protein, 22 aa, Artificial sequence
  protein pattern
  Variant (2)..(6): Xaa in position 2 to 6 is any amino acid
  Variant (7)..(7): Xaa in position 7 is any or no amino acid
  Variant (9)..(9): Xaa in position 9 is any or no amino acid
  Variant (11)..(11): Xaa in position 11 is any amino acid
  Variant (12)..(12): Xaa in position 12 is Ser or Thr
  Variant (13)..(14): Xaa in position 13 to 14 is any amino acid
  Variant (19)..(19): Xaa in position 19 is Ala or Gly
  Variant (21)..(21): Xaa in position 21 is Ala, Gly or Thr
  Variant (22)..(22): Xaa in position 22 is Ala, Cys, Gly or Ser
SXXXXXXDXRXXXXLFGDXAXX

SEQ ID NO: 88524 - protein, 17 aa, Artificial sequence
  protein pattern
  Variant (2)..(3): Xaa in position 2 to 3 is any amino acid
  Variant (4)..(4): Xaa in position 4 is Ile, Leu or Val
  Variant (5)..(5): Xaa in position 5 is any amino acid
  Variant (10)..(10): Xaa in position 10 is any amino acid
  Variant (13)..(14): Xaa in position 13 to 14 is any amino acid
  Variant (15)..(16): Xaa in position 15 to 16 is any or no amino acid
DXXXXHQANXRIXXXXA

SEQ ID NO: 88525 - protein, 20 aa, Artificial sequence
  protein pattern
  Variant (2)..(2): Xaa in position 2 is any amino acid
  Variant (3)..(3): Xaa in position 3 is any or no amino acid
  Variant (5)..(5): Xaa in position 5 is Ala or Val
  Variant (7)..(7): Xaa in position 7 is Ala, Ser or Thr
  Variant (10)..(10): Xaa in position 10 is Ile, Leu, Met or Val
  Variant (11)..(11): Xaa in position 11 is any amino acid
  Variant (12)..(12): Xaa in position 12 is Ala, Gly or Leu
  Variant (13)..(13): Xaa in position 13 is Ile, Leu, Met or Val
  Variant (14)..(15): Xaa in position 14 to 15 is any amino acid
  Variant (16)..(16): Xaa in position 16 is Ala, Gly or Val
  Variant (17)..(19): Xaa in position 17 to 19 is any amino acid
  Variant (20)..(20): Xaa in position 20 is Ile, Leu, Met or Val
DXXAXCXGFXXXXXXXXXXX

SEQ ID NO: 88526 - DNA, 576 bp, Thermus thermophilus
  CDS (1)..(576): transl_table=11
atggtgacgacgacgagggaccgcatcctagaggaggccgccaagctcttcacggagaagggctacgaggccaccagcgtccaggaccttgcccaggccctggggctttccaaggccgccctctaccaccacttcgggagcaaggaggagatcctctacgagatcagcctcctggccctaaagggcctggtggcggcgggggaaaaggccctggaggtggcggaccccaaggccgcccttcttcgcttcatggaggcccacgcccgctactttgaggagaaccgccccttcttcgtggccatgctccagggcctgcaaagcctttccccggagcaccgggaggccaccgtccgcctccgcgaccggcacgaggaaaacctccgggcgatcctgaggcgcggggtggagcagggcgtcttccgggaggtggacgtggccctggcggggcgggccgtcctctccatgctcaactggatgatccgctggttccggcccgatgggcccatgcgggcggaggaggtggcccgggcctaccatgacctgatcctgagggggttggaacgtggaggtgcctaa

SEQ ID NO: 88527 - protein, 191 aa, Thermus thermophilus
MVTTTRDRILEEAAKLFTEKGYEATSVQDLAQALGLSKAALYHHFGSKEEILYEISLLALKGLVAAGEKALEVADPKAALLRFMEAHARYFEENRPFFVAMLQGLQSLSPEHREATVRLRDRHEENLRAILRRGVEQGVFREVDVALAGRAVLSMLNWMIRWFRPDGPMRAEEVARAYHDLILRGLERGGA

SEQ ID NO: 88528 - DNA, 549 bp, Klebsiella pneumoniae subsp. pneumoniae MGH 78578
  CDS (1)..(549): transl_table=11
atgagagctgatgccagaaaaaattatgacctgttgatcgaggtggcccgggacgtctttgtggagcaaggcgctgaggcgtcgctgcgcgatatcgcccgccgggcgggcctcggaatgggaaccctctaccgccactttcccaaccgcgacagcctgctggaagccctgctccgcagccgctttgcggcgctaaccgcccgggctgagtcgcttctgctcgccgccgatcctgccgcggcgctgctggagtggctggccgagagcgtggcgtttacccatcagcatcgcgggatcatcgccccgctgatgagcgccatcgacgatcatgagtccgccctgcacagcgcctgcgttgccctgcgcgccgccggtacgtcgctgcttacccgcgcgcagcaggccgggctggcacggccagatctcagcggagaggagctgttcgatctgatcgccgcgcttgcctggctgcgggagcaaccgtcccatgccccgcgcgcagagcggattttagcggtgctggccgacgcgatcctgactgccggctag

SEQ ID NO: 88529 - protein, 182 aa, Klebsiella pneumoniae subsp. pneumoniae MGH 78578
MRADARKNYDLLIEVARDVFVEQGAEASLRDIARRAGLGMGTLYRHFPNRDSLLEALLRSRFAALTARAESLLLAADPAAALLEWLAESVAFTHQHRGIIAPLMSAIDDHESALHSACVALRAAGTSLLTRAQQAGLARPDLSGEELFDLIAALAWLREQPSHAPRAERILAVLADAILTAG

SEQ ID NO: 88530 - DNA, 648 bp, Xanthobacter autotrophicus Py2
  CDS (1)..(648): transl_table=11
atgccacgcaagaccgccgccaggaagaccgccgccaaaggcgaggagaggcggcagaacaggttcgccagcgaactgttccagggtgaactcagtccccgccaccgggacgtgctggaggcggcggcaagcctgttcgcggagcgcggctacgcggccacctcggtgcgcgagatcggcgaacgggtcggactgctcgggggctcgctctaccactacatcaagtcgaaggaagcgctgttcgtgcgcatccacgacatcgcgctggaagtggcgggtgaccgcattcgagccgccgtcgaggtgcagaccgacccctgggaccggctggaggcggcatgcgtgaccatgctggagatccagctcgacccccattccatcacgatgccactcatgaacgaccttcaggcggtccccgccgaggtgcgcgagcagcttatcgcccggcgcgacagcttcgagaagatcttctcggatcttgtcgctgatctgcccttgagtccgcagatcgatcgcagcgtataccggcttcttctgctaacgctgctcaataataccagctcatggtatcgtgagggacgcctgtcgcccaaagagatcgctaggcagatcgtttttatattccatcaacgcgccgaatataactag

SEQ ID NO: 88531 - protein, 215 aa, Xanthobacter autotrophicus Py2
MPRKTAARKTAAKGEERRQNRFASELFQGELSPRHRDVLEAAASLFAERGYAATSVREIGERVGLLGGSLYHYIKSKEALFVRIHDIALEVAGDRIRAAVEVQTDPWDRLEAACVTMLEIQLDPHSITMPLMNDLQAVPAEVREQLIARRDSFEKIFSDLVADLPLSPQIDRSVYRLLLLTLLNNTSSWYREGRLSPKEIARQIVFIFHQRAEYN

SEQ ID NO: 88532 - DNA, 783 bp, Xanthobacter autotrophicus Py2
  CDS (1)..(783): transl_table=11
atggccggcgccggggctcgcccagcggggcgccggagggcaggaacaggacagatggctcggacccgcgcgcaggactacgacgcaaaacggcaggtgatcctgcacaagtcggcggagctgttcgcccagttcggctattccggcacctcgatcaccatgatcgcggaggcgtgcggcgcctccaaggcgctgctctatcactattatccggacaaggaggcggtgctcttcgacatcctctccacccatctggagcagctcatccaggcggtggaggcggccctggaagcagctcccgagggcgatcgcctgttcgccatcgccgccgccctgcttgaagcctatcgcgatgccgatgccgagcatcagatccagattgccaacctcaagctgctgccggccgacaagcaggacgcgctgcgggccatggagcgccagctggtggtgctcatgtcggacgccatcgcgcaggaggtgccggagatcggccgggggccgctcctgaagccggtcaccatgtccgccttcggcatgctgaactggcactatctgtggtttcgcgagggcaagggcctgacccgcgccgaatatgcccgcctcgtcaccagcctgatcaccgccggcgccgcaggagcggcggcggcagttgcaggtccggaggcgccgctccgtgccgagccgcgcgtgcgcgcgatcgcgccagccgcggcgccggttgcggccgcgcgccgccgggctccgccgtccaccgccaaggccggacggcgcaaggcggattag

SEQ ID NO: 88533 - protein, 260 aa, Xanthobacter autotrophicus Py2
MAGAGARPAGRRRAGTGQMARTRAQDYDAKRQVILHKSAELFAQFGYSGTSITMIAEACGASKALLYHYYPDKEAVLFDILSTHLEQLIQAVEAALEAAPEGDRLFAIAAALLEAYRDADAEHQIQIANLKLLPADKQDALRAMERQLVVLMSDAIAQEVPEIGRGPLLKPVTMSAFGMLNWHYLWFREGKGLTRAEYARLVTSLITAGAAGAAAAVAGPEAPLRAEPRVRAIAPAAAPVAAARRRAPPSTAKAGRRKAD

SEQ ID NO: 88534 - DNA, 705 bp, Xanthobacter autotrophicus Py2
  CDS (1)..(705): transl_table=11
atggcgcgcaccatcggttccaacggcgcccgtaccgccgaagccatccgccaggcgggcgtcaagctcatctacaagcacggctacgaggccatgagcctgcgccagctcgccgccgaggtggggctgcagtccggctcgctctacaaatattttgagaacaagcagaacctgctgttcgacatcgtgcgcgaccacatggaggacctgctcggcaaggccgaggcggacctggagggcatcaccgacccgctggcgcggctgaagaccttctccgcctttcacctgcgctatcacatgacgcgcatggcccatgtcttcatcgccaacatggagatccgcagcctggaggacgagcaccgcgccgtggtggtcgccctgcgccggcgctacgagggcctgctggaggagatcctgcggcagggcgcgcaggaaggcgtgttccaggtgagtgagcccaaggtcgccacctacgccatcatctccatgctcaccggcatctgcatgtggtaccgacccggcgggcgcctctcccaggacgaactggtggacatctacaccggtctcgtggtggacggcgccaccgggcccggcccggcaaccgccgcccgcgccaaaccgcttgaggccgccgccgcccagccgcgcgacagcggcgcgcgcgccaaaccccgcgttgcccggcccaagacggcgcgcgcgtaa

SEQ ID NO: 88535 - protein, 234 aa, Xanthobacter autotrophicus Py2
MARTIGSNGARTAEAIRQAGVKLIYKHGYEAMSLRQLAAEVGLQSGSLYKYFENKQNLLFDIVRDHMEDLLGKAEADLEGITDPLARLKTFSAFHLRYHMTRMAHVFIANMEIRSLEDEHRAVVVALRRRYEGLLEEILRQGAQEGVFQVSEPKVATYAIISMLTGICMWYRPGGRLSQDELVDIYTGLVVDGATGPGPATAARAKPLEAAAAQPRDSGARAKPRVARPKTARA

SEQ ID NO: 88536 - DNA, 672 bp, Xanthobacter autotrophicus Py2
  CDS (1)..(672): transl_table=11
atggcgcctccgaaacccaccgccgccgcgatggcggatccctcaccctggcgctcccccgcccagcgcgggcgcgaccgggcgctgaagcgcgaggcagtgctgaaggcggcggcgcggctgttcaacgagaagggctttcacgccacctcgctggatgacgtggcgcggcagctgaacgtcaccaagccgacgctctatcattacttccgcagcaaggacgacgtgctgttcgaatgctgccgcatggggctggagatgatcgaggcggcggcggcaaccgtgccgggctcccaggccagcggcctcgaacggctgcgcgcgctgatggagcagtatgccgaggccatgaccatggacttcggcatgagcatcagccgcaccccggacaccgccctgtcgcccgagaaccgcgctgagctgcggcgcctgaaagcgcagatcgaccgggccctgcgcggcgtgatccagagcggcatcgaggacggctccatcgccccctgtgatgtgcgcaccgccgccttcgccatcgccggcgcgctgaacgccatcgcccattggtacaagcccgacggccccctcgcgccggccgagatcgcccggcagaccgccgattttctcatccagggccttgcgccccgcacctcagaacgacgccagcccaagcgctga

SEQ ID NO: 88537 - protein, 223 aa, Xanthobacter autotrophicus Py2
MAPPKPTAAAMADPSPWRSPAQRGRDRALKREAVLKAAARLFNEKGFHATSLDDVARQLNVTKPTLYHYFRSKDDVLFECCRMGLEMIEAAAATVPGSQASGLERLRALMEQYAEAMTMDFGMSISRTPDTALSPENRAELRRLKAQIDRALRGVIQSGIEDGSIAPCDVRTAAFAIAGALNAIAHWYKPDGPLAPAEIARQTADFLIQGLAPRTSERRQPKR

SEQ ID NO: 88538 - DNA, 642 bp, Mesorhizobium loti MAFF303099
  CDS (1)..(642): transl_table=11
atggcgcgcaccacaggatccgacggcgagcgaacagaggcggcagtccgcgaagcggcggtcaacctgatcgcacgctacggctacgaggcgatgtcgatgcgccagctggcggccgaggtcggcgtgcaggcggccgcgctctatcgctattttccgaccaaggaagacctgctgttcacgctcatgcgcgaacacatggaggggcttcgggcggcctgggaacacgtcaggccaatcgatgcagatccggcggagcagcttgcggcctatgtgcgcaaccacatcgctttccacatcgagcgccggcattccacgcatgtgtcgaacatggaactgcgcagcctgtcgcccgacaggctgacacagatcttgcgcatgcgcacagcctacgaaaaggaactccgcagcatcctgcgcgaaggcgccgaggccggcgacttcagcatcgaggacaccggcctgacggccatggcgctgatccagatgatgaccggcgtcatcgtctggtttcgcccgggcgagcggctgtcagtccctgaagtgacggcgacatatctttcaatgacaatgcgcctggttggcgcgaggatggatacctacagcgccgcacgtcccttggacgtgcaaaggacgctgtag

SEQ ID NO: 88539 - protein, 213 aa, Mesorhizobium loti MAFF303099
MARTTGSDGERTEAAVREAAVNLIARYGYEAMSMRQLAAEVGVQAAALYRYFPTKEDLLFTLMREHMEGLRAAWEHVRPIDADPAEQLAAYVRNHIAFHIERRHSTHVSNMELRSLSPDRLTQILRMRTAYEKELRSILREGAEAGDFSIEDTGLTAMALIQMMTGVIVWFRPGERLSVPEVTATYLSMTMRLVGARMDTYSAARPLDVQRTL

SEQ ID NO: 88540 - DNA, 648 bp, Bacillus halodurans C-125
  CDS (1)..(648): transl_table=11
ttgaaaagatcaacaaaggagcgaattatcgaaacggccctccttctttttgaagaacatgggtttcacgccgtaacggtagatcgaatcgtgcaagaaagtgggacgtcgaagggaggattttatcataattttaaatcaaaggatgagctattgtataccattcatgattcgttcattacgtatgtgcttgaaaaagcgagagaagcgtatgaaaagtatgaaacaccagcagaacgtctccatgctacggtccgttcgtttgtcatgatgtttgatttttatcgtccccatgtaaccgtattttaccaggagtcattatatttaagttcagattactttaaggatattaaaaagaaacgtgatcaatataaacaattaatgtttcgtttagtcaaggaagggattgacgctggtgagttccgagaagaaatacctgtcccgattacatccatggctatttttgggatgatcaactggacgtataaatggtataaaacatccggaatgtactctgtggcggagattgcagacatttatgctgatttagtactgcacgcagtgttgacgcaagaagcattgactcgtcctgattatcaatcgctgtttcttcagcatggtttaaggacgggtgaaaggagtgtgtaa

SEQ ID NO: 88541 - protein, 215 aa, Bacillus halodurans C-125
MKRSTKERIIETALLLFEEHGFHAVTVDRIVQESGTSKGGFYHNFKSKDELLYTIHDSFITYVLEKAREAYEKYETPAERLHATVRSFVMMFDFYRPHVTVFYQESLYLSSDYFKDIKKKRDQYKQLMFRLVKEGIDAGEFREEIPVPITSMAIFGMINWTYKWYKTSGMYSVAEIADIYADLVLHAVLTQEALTRPDYQSLFLQHGLRTGERSV

SEQ ID NO: 88542 - DNA, 615 bp, Methanothermobacter thermautotrophicus str. Delta H
  CDS (1)..(615): transl_table=11
atgttagtaagtacttacataagtggtatcatggtctcaacagagaagaggataaccaatgctgcaagggaactcttcataaagagggggtacagaggtacagctacccgtgaaatcgcatcgcgggccggtgtgagtgaagtaacagtattcagaaaatttggatccaagaaaaatcttctcaaaaggataatggatgagagcactgaaaggctgtcccaggtacttgaagtccttgatggggatggtgacccgcgtgatgtacttgaggaagtcagcgaacagctaatccgggtaatggtcgaggagaagatcgacctcctcttcgtaatgatggttgagagggaacttgaagaacacggttttgaggaatgggaggttcctgattcagctggcagattgatatacaattcaattgaggcttacctgaggaagaagatcgatgagggctccttaagggctgtggatcctgggaccgctgcagagattattgtaagctacatctcacatgcaagtctcagttcacacttccgtggacatgaaacaccatcagccgggcggttcatggacatattatggaacggtatggcaggaggtggtatgattaagggatag

SEQ ID NO: 88543 - protein, 204 aa, Methanothermobacter thermautotrophicus str. Delta H
MLVSTYISGIMVSTEKRITNAARELFIKRGYRGTATREIASRAGVSEVTVFRKFGSKKNLLKRIMDESTERLSQVLEVLDGDGDPRDVLEEVSEQLIRVMVEEKIDLLFVMMVERELEEHGFEEWEVPDSAGRLIYNSIEAYLRKKIDEGSLRAVDPGTAAEIIVSYISHASLSSHFRGHETPSAGRFMDILWNGMAGGGMIKG

SEQ ID NO: 88544 - DNA, 594 bp, Deinococcus radiodurans R1
  CDS (1)..(594): transl_table=11
atgaccgaaacgaccaagccccgccgcgaacagattcatgatgtcgccagccgcctgttttccgagcgcggctaccacgccacgtccatgcgtgacctcgccggacagctggggatgcagggcggcagcctctacgcgcacatcagcggtaaggaagaattgctggtcgaaatcgtgcgcggagcatcgcagcagttcgacgaggcgctgttctcgctgcgtgacgtgaacctccccgctgacgagaagctgcgtgaggcgatgtttcgccatatccaggtcgtggccgacaacatggacagcgcgacggtgtttttccacgagtggaagcacctttccgccgagccgtatgcccaggtggtggcgtggcgcgacaccatcgacatcttttaccgagacctggtggcgcagggcgtccgcgacggcactttccgcgccgacctcgacgttcgggcggcggccaacctgattctgtctgccgtgaactggacctacacctggtatcgccccggcgggcggctctccccgcgtgacgtggccgagcagtttgccgacatgctgctcagcgggcttatggcaggtgagctccaatag

SEQ ID NO: 88545 - protein, 197 aa, Deinococcus radiodurans R1
MTETTKPRREQIHDVASRLFSERGYHATSMRDLAGQLGMQGGSLYAHISGKEELLVEIVRGASQQFDEALFSLRDVNLPADEKLREAMFRHIQVVADNMDSATVFFHEWKHLSAEPYAQVVAWRDTIDIFYRDLVAQGVRDGTFRADLDVRAAANLILSAVNWTYTWYRPGGRLSPRDVAEQFADMLLSGLMAGELQ

SEQ ID NO: 88546 - DNA, 645 bp, Mycobacterium tuberculosis CDC1551
  CDS (1)..(645): transl_table=11
atgccatccgacaccagccccaacgggctaagccgccgtgaggagttgctggctgttgccaccaaactattcgcggcgcgcggttatcacggcacccggatggacgacgtcgccgatgtgatcgggctcaacaaagcaacggtctatcactactacgccagcaagtcgctgatcctgttcgacatttaccgtcaggcggccgagggcaccctggccgccgtgcacgacgatccgtcctggacggcccgtgaagcgctgtaccagtacacggtccggctgctcactgcgatcgcgagcaaccccgagcgggccgccgtgtacttccaggagcagccctacatcaccgagtggttcaccagcgagcaggtcgccgaggtccgcgagaaggagcagcaagtctacgagcacgtacacggcctgatcgaccgcgggattgccagcggcgagttctatgagtgcgactcgcatgtggtggcgctggggtacatcgggatgacgctgggcagctaccgctggctgcggccgagcgggcgccgaacggccaaggagatcgcggcggagttcagcacggcactgctgcgcgggctgatccgcgacgaatcgatccgcaaccagtctccgcttggaactcggaaggaaacgtga

SEQ ID NO: 88547 - protein, 214 aa, Mycobacterium tuberculosis CDC1551
MPSDTSPNGLSRREELLAVATKLFAARGYHGTRMDDVADVIGLNKATVYHYYASKSLILFDIYRQAAEGTLAAVHDDPSWTAREALYQYTVRLLTAIASNPERAAVYFQEQPYITEWFTSEQVAEVREKEQQVYEHVHGLIDRGIASGEFYECDSHVVALGYIGMTLGSYRWLRPSGRRTAKEIAAEFSTALLRGLIRDESIRNQSPLGTRKET

SEQ ID NO: 88548 - DNA, 603 bp, Mycobacterium tuberculosis CDC1551
  CDS (1)..(603): transl_table=11
gtgcaacagcaacgcacaaaccgcgacaaactgctcgacggcgctctggcttgtttacgagaacgcggctacggcaacaccagctcgcgcgacatcgctcgtgcggcaggggtgaacatcgcgtcgatcaactaccacttcggtagcaaggacgcgctgctcgacgatgcgctcggccggtgcttttcgacgtggaaccagcgtgtccaggaggcattcgatcactcccgcgccgccggtccggccgggcagatcctggcggtactcgaagccaccgtcgattcgttcgagcagatccgccccgccgtgtatgcgtgtgtggagtcatacgctccggcgttgcgctcagaggccttgcgggagcgcctggccgccggatatgccgacgttcggcagcattcggtcgatctggctggcgctgcgcttgccggtaccgacatagcaccgccggagaacctgtcgaccatcgtctcggtgttgatggcggtcatcgatggcctcatgatccagtggatcgccgatccgtccgccaccccgcgatcgaccgaggtaatccgagcgcttgccagcatcggcgcggtcgtcacgtcgcagttgcggtga

SEQ ID NO: 88549 - protein, 200 aa, Mycobacterium tuberculosis CDC1551
MQQQRTNRDKLLDGALACLRERGYGNTSSRDIARAAGVNIASINYHFGSKDALLDDALGRCFSTWNQRVQEAFDHSRAAGPAGQILAVLEATVDSFEQIRPAVYACVESYAPALRSEALRERLAAGYADVRQHSVDLAGAALAGTDIAPPENLSTIVSVLMAVIDGLMIQWIADPSATPRSTEVIRALASIGAVVTSQLR

SEQ ID NO: 88550 - DNA, 678 bp, Mycobacterium tuberculosis CDC1551
  CDS (1)..(678): transl_table=11
gtgagccgcgctagcgcgcggcggcgccgagcggtcagcgatgaggacaagtcgcaacggcgcgacgagatcttggccgcggccaaaatagtgtttgctcacaagggttttcatgccaccaccgtcgcagacatcgccaagcaggccggcctggcgtacgggctgatctactggtacttcgactccaaggacgacttgttccacgccttgatggccggtgaagaggaggcgctgcgcgcgcatgtcgcggccgaactggcccgcgttggcgggtctaccgaggcgccgcttcgggccctgttacaggccgcggtacaggccacgttcgagttcttcgaaaccgacaaggctaccgtcaaactactgttccgtgacgcttacgcgcttgggggccgattcgaagagcatctcggcggaatctacgagcggttcatcgacgacatcgaagccgtcgttgttgccgctcaacggcgcggtgaggttgtcgaggccccgtcccggatggccgcgtacacgttggcggcgctggtggggcagttggcacaccgacggctgaataccgacgataacgtcaccgccgcccaggtagccgacttcgtggtgtcgctggtgctagacgggctgcgtccgcgtgcactggcggtcggggcccgcggtggtcgggccgcccgaacctga

SEQ ID NO: 88551 - protein, 225 aa, Mycobacterium tuberculosis CDC1551
MSRASARRRRAVSDEDKSQRRDEILAAAKIVFAHKGFHATTVADIAKQAGLAYGLIYWYFDSKDDLFHALMAGEEEALRAHVAAELARVGGSTEAPLRALLQAAVQATFEFFETDKATVKLLFRDAYALGGRFEEHLGGIYERFIDDIEAVVVAAQRRGEVVEAPSRMAAYTLAALVGQLAHRRLNTDDNVTAAQVADFVVSLVLDGLRPRALAVGARGGRAART

SEQ ID NO: 88552 - DNA, 603 bp, Mycobacterium tuberculosis CDC1551
  CDS (1)..(603): transl_table=11
atggatcgagtggccggtcaggtcaatagccggcgaggcgagttgctggagctcgcggcggcgatgttcgccgagcgcggactgcgcgccaccaccgtgcgcgatatcgccgacggcgccggcatcctatccggcagcctgtatcaccatttcgcctccaaagaggagatggtcgatgagctgttacgcggtttcctcgattggctcttcgcccgttaccgcgacatcgtggatagcacggccaatccgctggagcggctgcagggcctgttcatggcgtcgtttgaggcgatcgagcatcatcacgcgcaagtggtgatctaccaggatgaagcgcaacggctggcgtcgcaacccaggttttcctacatcgaggaccgtaacaagcagcagcgcaagatgtgggtggacgtgctcaaccagggcatcgaagagggctacttccggcccgacctagacgtcgacctggtctaccgattcatccgtgacaccacctgggtgtcggtgcgctggtatcgacccggtgggccgctcaccgcccagcaggtgggccagcaatacctagccatcgtgcttggcgggatcaccaaagagggagtctga

SEQ ID NO: 88553 - protein, 200 aa, Mycobacterium tuberculosis CDC1551
MDRVAGQVNSRRGELLELAAAMFAERGLRATTVRDIADGAGILSGSLYHHFASKEEMVDELLRGFLDWLFARYRDIVDSTANPLERLQGLFMASFEAIEHHHAQVVIYQDEAQRLASQPRFSYIEDRNKQQRKMWVDVLNQGIEEGYFRPDLDVDLVYRFIRDTTWVSVRWYRPGGPLTAQQVGQQYLAIVLGGITKEGV

SEQ ID NO: 88554 - DNA, 642 bp, Agrobacterium tumefaciens str. C58; identical to SEQ ID NO: 29296
  CDS (1)..(642): transl_table=11

SEQ ID NO: 88555 - protein, 213 aa, Agrobacterium tumefaciens str. C58; identical to SEQ ID NO: 29297

SEQ ID NO: 88556 - DNA, 636 bp, Caulobacter crescentus CB15
  CDS (1)..(636): transl_table=11
gtgaccgtcgttttgaagaagccgcacaagtccgcgcgaaaacccaagggtgacgggcacttgcgccggggcgagatcctggcggcggccgagaagatctttatcgccgagggctatgccggcgccacgatccgcaagatcgccgacgccgtgggggtgtcctcgaccgcgctctacatgcactttcgcgacaaggaccagatcctgctggagatcagcaacgacgcgatcgagcgtctgctggacctgaacatccagatcgccggtcagccgatcgacccgctgtcgcgcgttcgcctgatgctcgaagcctacatgcgcttcgcgctcgacaaccccaacacctaccaactggtgttctgcagcactggggatcacgtcaagtccgacaagatcggcgagaccatggcgctgggcgatcgttgcttcgagaagttcagcgagccggtccacgagatcgcggcccaggggcgccttcggtcaggatcggcggtccaggcggccgaggtgctgtggagcggttgccacggcctggtgtcgctgctgatcaccaagccgtcacgtggctggtccgagccggagcagttgatgagggtgatgctggacgggctgctgcacggtctggtcacggactga

SEQ ID NO: 88557 - protein, 211 aa, Caulobacter crescentus CB15
MTVVLKKPHKSARKPKGDGHLRRGEILAAAEKIFIAEGYAGATIRKIADAVGVSSTALYMHFRDKDQILLEISNDAIERLLDLNIQIAGQPIDPLSRVRLMLEAYMRFALDNPNTYQLVFCSTGDHVKSDKIGETMALGDRCFEKFSEPVHEIAAQGRLRSGSAVQAAEVLWSGCHGLVSLLITKPSRGWSEPEQLMRVMLDGLLHGLVTD

SEQ ID NO: 88558 - DNA, 660 bp, Sinorhizobium meliloti 1021
  CDS (1)..(660): transl_table=11
ttggccagccttacgacttgccgctcgcaaatgcttcacggcgggccgttccgtccgggggcagatagcgaaaacatgcgtgcacgcatccaggaggtagcggaggagcacttccgtcgtataggtcatcacaagacgtccgtagccgacattgcctctgagctcagcatgagccgggcgaacatctgccgtttcttcccctccagggatgcaattaaggaattcatctgcaggcgggtcttgaacggtaccgccgagctcgcccttacgatcgcacgcaggagcacgccgccctcggagaaactcaaggaactcctgaccgccgttcaccatcaaaacaagacgaaactgctccacgacaggcagatgcgcgacctgatcgtagccgccatgcaggagaaccggccggtcatcaaggtgcatgctgagcagacgatgacgattctcgaggcaatcatccgcgagggcatcgaaacgggccagttcgaggtcgaagatcccgccgaagcagcgcgcgcggtcaagaccgcgtttataccgttcttccatccggttctgatcgagcaccgccttcgacacggagaagacaccgaagcgggcttgcctgagcaaattcggcttatcctaaaggctctcgaaaggtcgggctatgcccgctga

SEQ ID NO: 88559 - protein, 219 aa, Sinorhizobium meliloti 1021
MASLTTCRSQMLHGGPFRPGADSENMRARIQEVAEEHFRRIGHHKTSVADIASELSMSRANICRFFPSRDAIKEFICRRVLNGTAELALTIARRSTPPSEKLKELLTAVHHQNKTKLLHDRQMRDLIVAAMQENRPVIKVHAEQTMTILEAIIREGIETGQFEVEDPAEAARAVKTAFIPFFHPVLIEHRLRHGEDTEAGLPEQIRLILKALERSGYAR

SEQ ID NO: 88560 - DNA, 609 bp, Sinorhizobium meliloti 1021
  CDS (1)..(609): transl_table=11
atgagcgatctcgcagacaacgccatagacgcagcccgccaggaaaacgtggcgcgcattcttgaggccgccgagcggctgttccgccattacggctatgccaagacaaacgtcgccgatatcgcgcgcgagctcgatatgtcgccggccaacatctatcgcttctttgcgtcgaagacggaaatccaccaaacactttgcttgcgcatgctcggcgcgagctaccagcaggcgctggaaatcgcgcatctgccactcagtgcttccgagcggctgaggcgctatgcgctggggcagcacaagctcaccgtcgagacgatgctcgacgagcagaaggtccatgaaatggtcgtcgtggcgatcgagcgcgactggcacgtcatcgagaaacatatcagccgtctggacgacctcctcgcaggcattatccgcgaggggatcgaagccggagagttcgccgacgtggaccccgcggtcgcggccagatgtttcggcgccagcctcgtcaccctttgtcatccgcagatcgtcgcccagtgtcttgccaaggaaaaccgcgcgacacccgatgaactggtcgagttcgcgatccgggcgctgaaaaaataa

SEQ ID NO: 88561 - protein, 202 aa, Sinorhizobium meliloti 1021
MSDLADNAIDAARQENVARILEAAERLFRHYGYAKTNVADIARELDMSPANIYRFFASKTEIHQTLCLRMLGASYQQALEIAHLPLSASERLRRYALGQHKLTVETMLDEQKVHEMVVVAIERDWHVIEKHISRLDDLLAGIIREGIEAGEFADVDPAVAARCFGASLVTLCHPQIVAQCLAKENRATPDELVEFAIRALKK

SEQ ID NO: 88562 - DNA, 711 bp, Synechocystis sp. PCC 6803
  CDS (1)..(711): transl_table=11
gtgaggcgatcgggatttttcccgcacaataacagtaatagctcggtgaatttagaggtaaagtccgtgcagagcaacaagtattcaatcgccccatcgacctttaccaatccggccgaagcttccacccatgatcgcattttgaagggagctttgaaattatttggcactaagggttacgaaggtactaccacaaaggatttggcccaggcagccaacgtggccgaaggaacgctattccgttatttcaccaataagaaggccattttggtggaagtggccaccgccggctgggtggaaattctcaccgatttattgactgaattaagcgagatgggcagttacaaggcgatcgcccaggtgatgaaacggcggatgttccatttgcgggaaaacaaatatctattgcaagtgtgctttgtggaagcccaatatcacccggagctacgggaaaaaatccagtcggaaattatcgacaaaatgaccgatgtggcggaagcctttttccaaaccgccatggaccgaggcatttaccggcgaatgaatcccaaaattgtcgcccaggtttttttgggtatgtttgcggtggctggtttttccgaacaaacggtgattgacccccacgcttccccccaggctttgcaagaaatggcggaaggtttagcagatatttttcttaacggagtgttagctaaaggagaaaaaatgtga

SEQ ID NO: 88563 - protein, 236 aa, Synechocystis sp. PCC 6803
MRRSGFFPHNNSNSSVNLEVKSVQSNKYSIAPSTFTNPAEASTHDRILKGALKLFGTKGYEGTTTKDLAQAANVAEGTLFRYFTNKKAILVEVATAGWVEILTDLLTELSEMGSYKAIAQVMKRRMFHLRENKYLLQVCFVEAQYHPELREKIQSEIIDKMTDVAEAFFQTAMDRGIYRRMNPKIVAQVFLGMFAVAGFSEQTVIDPHASPQALQEMAEGLADIFLNGVLAKGEKM

SEQ ID NO: 88564 - DNA, 654 bp, Salmonella typhimurium LT2; identical to SEQ ID NO: 29300
  CDS (1)..(654): transl_table=11

SEQ ID NO: 88565 - protein, 217 aa, Salmonella typhimurium LT2; identical to SEQ ID NO: 29301

SEQ ID NO: 88566 - DNA, 711 bp, Ralstonia solanacearum GMI1000
  CDS (1)..(711): transl_table=11
atgctgctcatgtccaccgtccgtaaaaccgtttccgacgcgcgttcgtcggccgacgccgaatcgcctgaggccgtcgcgcccgtcacgcgcccgcatatcgccgagcgccaggaggcgcgccgccgccagattctcgataccgccgggcagctcttctacaccaagggctatgccggcatgaccatgagcgacctgtgcagcgcgttgggcgtgaccaagccggcggtctactactacttcacggacaagtacgagattttcgacatcctgtgccgcgaggccgcgcaggtctgcctgtcggccatccgcgaaacggccaatccggtgctgcctgtgcgcgagcgcttgcaggcctgcctgctggagatggcgcgccgctgcatcgcctgccaccacgccgccgcgctgacctaccgcgaccgccagtacctgcgctccgagacggtggagtggctgcacacgatgtcgcgggcgtactaccgcgacctctatgcgctgctggacgagggcaagcgcaccggcgtgttcgatttcggcgacgcgcgcgtggccgcgcacgcgatgggcggcgtgatgggtttcatgtacacctggcacgacccgtcgcgcatcgatcccgatgtgctggcgcacgagctgtcgagcgccatgatgaagatcgtcctgccggccgcgccgggcccgatcgctacggctgcggcgtcctga

SEQ ID NO: 88567 - protein, 236 aa, Ralstonia solanacearum GMI1000
MLLMSTVRKTVSDARSSADAESPEAVAPVTRPHIAERQEARRRQILDTAGQLFYTKGYAGMTMSDLCSALGVTKPAVYYYFTDKYEIFDILCREAAQVCLSAIRETANPVLPVRERLQACLLEMARRCIACHHAAALTYRDRQYLRSETVEWLHTMSRAYYRDLYALLDEGKRTGVFDFGDARVAAHAMGGVMGFMYTWHDPSRIDPDVLAHELSSAMMKIVLPAAPGPIATAAAS

SEQ ID NO: 88568 - DNA, 648 bp, Ralstonia solanacearum GMI1000
  CDS (1)..(648): transl_table=11
atggcggccatcacccaatgtgcccccgacatgtcccgcgtcaagaacgaagacgaattcgaactccgccgagaaagcgtgctcgacaccgccgccgaagccttcgccgcggacagctacgcgagcgtgtcgatgaaccagatcgccgcggcctgcggcggctcgaaatcccgcctgtatcactactacgaaggcaaggaagccatcctgttcgacctgctggaccgctacacccggcgcctggccgacctggtcgaacgcgccgagcgcgacgcgctccacgccaggctgtcggcgcgcgccacgctgcacctgctgatccgcaccttcctggccgagtacgccacctcgcgcacgcggcacgtggcgctgctcaatgacgtgaaatacctgtcgcccgaacagcgcgacatcatcctggcgcgcgagcgcgaagtcgtcgccgccgtcggccgccagctcgccgcggcctaccccggcaaggtcgacgacgccaaccgcacgccggtcacgatgatggtgttcgggatgatgaactggacgttcacatggctcaaacccgatgggccgctgtcgtacgaaggctatgccgagatggtgattgagatgctggagaatgggttgggtgggggtaaaacgcaatcctag

SEQ ID NO: 88569 - protein, 215 aa, Ralstonia solanacearum GMI1000
MAAITQCAPDMSRVKNEDEFELRRESVLDTAAEAFAADSYASVSMNQIAAACGGSKSRLYHYYEGKEAILFDLLDRYTRRLADLVERAERDALHARLSARATLHLLIRTFLAEYATSRTRHVALLNDVKYLSPEQRDIILAREREVVAAVGRQLAAAYPGKVDDANRTPVTMMVFGMMNWTFTWLKPDGPLSYEGYAEMVIEMLENGLGGGKTQS

SEQ ID NO: 88570 - DNA, 624 bp, Agrobacterium tumefaciens str. C58; identical to SEQ ID NO: 29306
  CDS (1)..(624): transl_table=11

SEQ ID NO: 88571 - protein, 207 aa, Agrobacterium tumefaciens str. C58; identical to SEQ ID NO: 29307

SEQ ID NO: 88572 - DNA, 615 bp, Agrobacterium tumefaciens str. C58; identical to SEQ ID NO: 29308
  CDS (1)..(615): transl_table=11

SEQ ID NO: 88573 - protein, 204 aa, Agrobacterium tumefaciens str. C58; identical to SEQ ID NO: 29309

SEQ ID NO: 88574 - DNA, 582 bp, Streptomyces coelicolor A3(2)
  CDS (1)..(582): transl_table=11
atgggtcgatgggagccgaacgcgcgcggccgcctggagcaggcggcgctggagctgtacgtggagcgcggctacgagcagaccccggtggccgagatcaccaagcgtgcggggctgacggagcggacgttcttccggcacttcaccgacaagcgggaggtcctcttcgccgggtccggcaggctggaggagctgtgcgtggcagccgtcgcggcggcgcccacgacggcgagtccgatggaggcggtggccgccgcactcgacgccgcggcgggcgccttcgaggagcgcggtgacctggtgggcctgcggcagggcgtcatcgactccaacgcggagctgcgggagcgggagctgatcaagctcgcgtccctgtccggcgcgctcgccgacgcgctgcgcgggcgcggcgtggccgaaccggcggcggagctgaccgccgagtcggcgatcgccgtgctcaaggtcgccttccggcgctggatcgacgggggccgggagcgaccgctgcggcccctgctcgccgagtgcttcgacgtgctccgcaccctgtccgcacggggcgccgcgagcgccggttag

SEQ ID NO: 88575 - protein, 193 aa, Streptomyces coelicolor A3(2)
MGRWEPNARGRLEQAALELYVERGYEQTPVAEITKRAGLTERTFFRHFTDKREVLFAGSGRLEELCVAAVAAAPTTASPMEAVAAALDAAAGAFEERGDLVGLRQGVIDSNAELRERELIKLASLSGALADALRGRGVAEPAAELTAESAIAVLKVAFRRWIDGGRERPLRPLLAECFDVLRTLSARGAASAG

SEQ ID NO: 88576 - DNA, 756 bp, Streptomyces coelicolor A3(2)
  CDS (1)..(756): transl_table=11
gtgacccccgccggggcgcacgccccggcccgggccgccctgcccgacgcgccggggacggcaagtgggaagatcctccgtcgggaaccgcgttcccacaggcatcaggacggacacggaacgcacggaacggaccgtgcaacggaaaggcaggtgacggcagtgcccaggaccacggacggggacagcactccggtgccgcagcggctcctggccgccgccacccggctcttcgccgagcagggctacgaccgcacctcggtacaggagatcgtcgaggcggcgggcgtcaccaagggcgcgctctaccactacttcggctccaaggacgaccttctgcacgaggtgtacgcgcgcgtgctgcgcctccagcaggaacgcctggacgccttcgcggacgccgacgagccggtcgagaagcgggtgcgggacgcggcggccgacgtcgtcgtcacgaccatcgagaacctcgacgacgcgtcgatcttcttccgctccatgcaccagctcagcccggagaagaacaaacaggtgcgcgcggagcgccggcgctaccacgagcgcttccgcgcgctgatcgaggaggggcagcggaccggcgtcttcaccaaggagattccggccgacctggtggtggactaccacttcgggtccatccaccacctgtccacctggtaccgccccgacgggccgctcagcccgcaggaggtcgccgaccacctcgccggcctgctgctgcgcgccctgcgcccctga

SEQ ID NO: 88577 - protein, 251 aa, Streptomyces coelicolor A3(2)
MTPAGAHAPARAALPDAPGTASGKILRREPRSHRHQDGHGTHGTDRATERQVTAVPRTTDGDSTPVPQRLLAAATRLFAEQGYDRTSVQEIVEAAGVTKGALYHYFGSKDDLLHEVYARVLRLQQERLDAFADADEPVEKRVRDAAADVVVTTIENLDDASIFFRSMHQLSPEKNKQVRAERRRYHERFRALIEEGQRTGVFTKEIPADLVVDYHFGSIHHLSTWYRPDGPLSPQEVADHLAGLLLRALRP

SEQ ID NO: 88578 - DNA, 648 bp, Streptomyces coelicolor A3(2)
  CDS (1)..(648): transl_table=11
atgagtacggcggccgagacgacgggcggcgacatcgagccgtgggaagaggtcacgcccgacgcggcccggcggctcctggtggccgccgtggaggcgttcgccgaacgcgggtaccacgcgaccacgacccgcgacatcgccggacgggccggcatgagcccggccgcgctctacatccactacaagaccaaggaagagctgctccaccggatcagccgcatcggccacacccgggcggtggccatcctgcgctccgcggcccagggcgagggcagtgcggccgaacggctcgccgacgccgtgagctccttcgtccgctggcacgccgggcggcgtacgaccgcgcgggtcgtgcagtacgagctggacgccctcggtcccgaggcccgggaggagatcctcacgctccgccggcagtgcgacgccgcggtccgcggcatcatcgacgacggcgtggccgcgggcgagttcgacgtgccggacgtcaagggcaccacgctggccgtgctctccctctgcatcgacgtggcccgctggttcaacgtgaacggcccccgcacgcccgacgaggtcggcgcgctctacgccgacctcgtgctgcgcatggtgggtgccgaaccgtccggggcgacggctcagaggtag

SEQ ID NO: 88579 - protein, 215 aa, Streptomyces coelicolor A3(2)
MSTAAETTGGDIEPWEEVTPDAARRLLVAAVEAFAERGYHATTTRDIAGRAGMSPAALYIHYKTKEELLHRISRIGHTRAVAILRSAAQGEGSAAERLADAVSSFVRWHAGRRTTARVVQYELDALGPEAREEILTLRRQCDAAVRGIIDDGVAAGEFDVPDVKGTTLAVLSLCIDVARWFNVNGPRTPDEVGALYADLVLRMVGAEPSGATAQR

SEQ ID NO: 88580 - DNA, 627 bp, Streptomyces coelicolor A3(2)
  CDS (1)..(627): transl_table=11
atggccaccagaaccgacgcccccacccgccgcgagcagatcctcaaggaggccgcccggctcttcgccgagcgcggcttccacggggtgggcgtcgacgagataggcgccgcggtcggcatcagcggccccggcctctaccggcacttccccggcaaggacgcgatgctcgccgagctgctggtcgggatcagcgactcgctgctgaccggggcgaagcggcggctggcggaggcggacggggcggccggctcccgggcgggcaccggcccgacggggccgggggcggtcctcgactcgctcatcgcggggcacatcgacttcgcgctcgacgaccgcccgctcatcaccctgcacgaccgcgagctggaccgcctccgggacgccgaccgcaagatggtgcggcagttgcagcggcagtacgtggagctgtgggtcggggtgctccgggaggtctacccggcggtcgccgagcccgccgcccgctccgcggtccactcggtcttcggcctcctgaactccaccccccacctgggccgccccggctccctgcccggccgcgcggtgacggcgtccctgctgcaccggatggcccggggggcgttcgcggcggtgggggaggcgtag

SEQ ID NO: 88581 - protein, 208 aa, Streptomyces coelicolor A3(2)
MATRTDAPTRREQILKEAARLFAERGFHGVGVDEIGAAVGISGPGLYRHFPGKDAMLAELLVGISDSLLTGAKRRLAEADGAAGSRAGTGPTGPGAVLDSLIAGHIDFALDDRPLITLHDRELDRLRDADRKMVRQLQRQYVELWVGVLREVYPAVAEPAARSAVHSVFGLLNSTPHLGRPGSLPGRAVTASLLHRMARGAFAAVGEA

SEQ ID NO: 88582 - DNA, 615 bp, Streptomyces coelicolor A3(2)
  CDS (1)..(615): transl_table=11
gtgaacggcgacgccggcgggaccacccggcgccgcggccgcccgcccggtacggagtccggggacacccgcgaccgcatcctcaccaccgcccgcgaggagttctccgagcgcggctacgagaagacctccgtgcgcggcatcgccaaggcggcaggcgtggaccccgcgctggtccaccactacttcggcaccaaggagcaggtcttcgaggcggccatcgaggtcgccttcgcaccggccctgcgggcccccgacgcgatcggcgacgcccccctcgacgaggtcggcgagcggctcacccgcttcatcctcggcctctgggagaacccggccagccggacgccgctgctggccatcgtccgctccgccgtgaacaacgagaccgccgccaccgtcttccgccggctgatcgccacccaggtgctgcgccgggtcgccgcccagctgcacctgccggacgcggaactgcgcgtcgaactggcggcggcgcagctggtggggtgcgcgatgctccgctacgtgatcaaggtggaaccgctggcctcggccgacccggagcagatcgtcgcccgcctggccccggtcgtccagggccacctcaccggcccctga

SEQ ID NO: 88583 - protein, 204 aa, Streptomyces coelicolor A3(2)
MNGDAGGTTRRRGRPPGTESGDTRDRILTTAREEFSERGYEKTSVRGIAKAAGVDPALVHHYFGTKEQVFEAAIEVAFAPALRAPDAIGDAPLDEVGERLTRFILGLWENPASRTPLLAIVRSAVNNETAATVFRRLIATQVLRRVAAQLHLPDAELRVELAAAQLVGCAMLRYVIKVEPLASADPEQIVARLAPVVQGHLTGP

SEQ ID NO: 88584 - DNA, 630 bp, Streptomyces coelicolor A3(2)
  CDS (1)..(630): transl_table=11
atgaccaccgccaagcgcgacacgtacacgcccgagacgctgctgtccgtggccgtgcaggtcttcatcgagcgcggctacgacggcacctccatggagcacctgtccaaggcggcggggatctccaagtcgtcgatataccaccacgtcacgggcaaggaggagttgctgcgccgggccgtgagccgggccctggacgagctcttcgggatcctcgacgaggagcacgcgcgcgtggggacggccgccgagcgcctcgagtacgtcgtgcggcgcatggtcgaggtgctcatggccgagctgccctatgtgacgctgctgctgcgggtgcgcggcaacaccggcaccgagcggtgggcgctggagcgccgccgcgagttcgaccaccgggtcgccgccctgctgaaggacgcggcggccgagggggacgtgcgcgccgacgtggaggtgcggctcgcgacccgcctcgtcttcggcatgatcaactcgatcgtcgagtggtaccgccccgaaggtccagacggccggagtgacgcgagtggcgcgagtggcgtgagtggcgcgggcgagcgcgaggtggtcgacgcggtggcgcggctggtgttcggcgggttgcgcaaggcgtcctga

SEQ ID NO: 88585 - protein, 209 aa, Streptomyces coelicolor A3(2)
MTTAKRDTYTPETLLSVAVQVFIERGYDGTSMEHLSKAAGISKSSIYHHVTGKEELLRRAVSRALDELFGILDEEHARVGTAAERLEYVVRRMVEVLMAELPYVTLLLRVRGNTGTERWALERRREFDHRVAALLKDAAAEGDVRADVEVRLATRLVFGMINSIVEWYRPEGPDGRSDASGASGVSGAGEREVVDAVARLVFGGLRKAS

SEQ ID NO: 88586 - DNA, 618 bp, Streptomyces coelicolor A3(2)
  CDS (1)..(618): transl_table=11
atgagagcgtgcctgcccatgagccccaaacaacaccgcggtgaggtcacctccgacctcctcctggacgccgccctgcgggtgtacgcggacgcgggggagcaggggctgacggtcagcgccgtgaccagggcgagcggcgtcagcctgggcagcctctaccaccacttcggcagcatcgacgggctcgtcaacgcgttgctgacgcgctggctcggccggctgctgggcgaactggccgacgcggtgggggactcccgcgacgcgcgcaccggcgttcgcgcactggtgcgcgcctacctcggcttcgttcaggcgcatccggacgtgagccgactcctgcactcctcgcgagccgaccaggtgggcatggagcagggcagggaactccgcgacgtccaggaggcacggatgcctccgctcacctcctgggtgctgcggcacgtcgagcgcggcgagatcgccccgctgtcccccgccctgctggagtccctcctcctgggccccgtcgtcggcgtcagccgccgctggctgaccctcggggacgtcgacctggacgaggccgcgcggatcctgccggagcggatctggcggtccatcagcgcggacggggcgtag

SEQ ID NO: 88587 - protein, 205 aa, Streptomyces coelicolor A3(2)
MRACLPMSPKQHRGEVTSDLLLDAALRVYADAGEQGLTVSAVTRASGVSLGSLYHHFGSIDGLVNALLTRWLGRLLGELADAVGDSRDARTGVRALVRAYLGFVQAHPDVSRLLHSSRADQVGMEQGRELRDVQEARMPPLTSWVLRHVERGEIAPLSPALLESLLLGPVVGVSRRWLTLGDVDLDEAARILPERIWRSISADGA

SEQ ID NO: 88588 - DNA, 756 bp, Streptomyces coelicolor A3(2)
  CDS (1)..(756): transl_table=11
gtgcctgcgaccaacgacggccccgacgacggcgcccacctcagcaagtccgagcagacccgcgcgctgatcctggagacggccatgcggctgttccaggaacgcggttacgaccggaccacgatgcgggccatcgcccaggaggccggggtctccgtcggcaacgcgtactactacttcgccggcaaggaacacctgatccagggcttctacgaccggatcgccgccgagcaccgggcggcggtccgcgaggtgctggccagggagaccgacctggaggcgcggctggcgggcgtgctgaaggtctggctggacatcgccacgccgtaccacgagttcgcggtgcagttcttcaagaacgccgccgacccggacagcccgctcagccccttctccccggagtcggagcacgcgcgcgtggaggccatcggcatccaccgcgcggtgctcgccggggcgaagaccaaggtgcccgaggagctgcgggacatcctgccggagctgatgtggctctcccagatgggtctagtcctgtactggatcttcgaccgcacggagggccgcgagcgcagctaccgcctcgccgagcgcggcgcccggctcaccgcgcggggcgtcgtgctggcccgcttccgggtgctgcgcccgctggtgcgcgaggtgcacgagctgttcacggacttcctgccggggatgacgaaggtgatgccggacccggcgaagaaaccgacgcgggatgccggtcctcaggcctga

SEQ ID NO: 88589 - protein, 251 aa, Streptomyces coelicolor A3(2)
MPATNDGPDDGAHLSKSEQTRALILETAMRLFQERGYDRTTMRAIAQEAGVSVGNAYYYFAGKEHLIQGFYDRIAAEHRAAVREVLARETDLEARLAGVLKVWLDIATPYHEFAVQFFKNAADPDSPLSPFSPESEHARVEAIGIHRAVLAGAKTKVPEELRDILPELMWLSQMGLVLYWIFDRTEGRERSYRLAERGARLTARGVVLARFRVLRPLVREVHELFTDFLPGMTKVMPDPAKKPTRDAGPQA

SEQ ID NO: 88590 - DNA, 645 bp, Streptomyces coelicolor A3(2); identical to SEQ ID NO: 34230
  CDS (1)..(645): transl_table=11

SEQ ID NO: 88591 - protein, 214 aa, Streptomyces coelicolor A3(2); identical to SEQ ID NO: 34231

SEQ ID NO: 88592 - DNA, 672 bp, Streptomyces coelicolor A3(2)
  CDS (1)..(672): transl_table=11
ttgagcaccgagcagagccaggacagcacggccacggcgcggcactggcgttcctacggaccgctggacctgcacccgatcctggttcacgccatggaggccttcaacgagcacggctaccacggcacttcggtccgcaacatcgccggccgggtcggcgtcaccgtgcccgcgctgtactaccactacgagaacaagcaggccctgctggccaccttgctggagacgtccatcaaggacgtcctggaccgttgccgggcggcggccgcggaggcggggcccgctccgctggcgcggttctgcggcatggtcgagtcgatcgtgctctacatggcccaccggaggtcgctggcgttcctggacaccgagatacgcagcctggagccggccaaccgggcgcgttacgtggccctgcgcgactacctccagcacatgctgctcgacacggtcgaagccgggcgcgccgagggcgtgttcaccaccgacatcccggccgacgccgtgcgcgcggtcctgatcatgtgccagggcgtcgccaactggttccgccccgacgggcccctcaccgcggaacaggtcgccgaacgccacgtcctgctgagcctgggcaccgtggggcaccaactgcccgcccccgcgccgcgggccccggcaccgtacggctccccatga

SEQ ID NO: 88593 - protein, 223 aa, Streptomyces coelicolor A3(2)
MSTEQSQDSTATARHWRSYGPLDLHPILVHAMEAFNEHGYHGTSVRNIAGRVGVTVPALYYHYENKQALLATLLETSIKDVLDRCRAAAAEAGPAPLARFCGMVESIVLYMAHRRSLAFLDTEIRSLEPANRARYVALRDYLQHMLLDTVEAGRAEGVFTTDIPADAVRAVLIMCQGVANWFRPDGPLTAEQVAERHVLLSLGTVGHQLPAPAPRAPAPYGSP

SEQ ID NO: 88594 - DNA, 633 bp, Xanthomonas campestris pv. campestris str. ATCC 33913
  CDS (1)..(633): transl_table=11
atgtccattcactcgtccactttcgctgcgccgcagcggctgaccgaccgcaagcgtcacgcgatcctggaagcggcgatcgccgagttccgccagcagggcttcgaggcgaccagcatggaccgcatcgcggccaccgctggcgtctccaagcgcacggtttacaaccatttccccagcaaggacacgctgttcggcgagatcctgcgcgggctatggcagcgcagtgccgaggcggtgagcctggcgtatcagcccggccagccattgcggccgcagctgctggagttgctgcagcagaagctgcggctgctggaagacccggccttcatcgacctctcccgcgtggcgattgccgagggcatccactcgccggcgcgggcacgcgaactgctcgcgcagctgggcagcaaggaggaaggcaccaccacctgggtgcgcgccgcgctggccgacggccggctggtggcagtggacccggcctttgccgcacagcaattgcaggccctggtgaagggctttgcgttctggccgcagctggccctgggccagccggccctgtcgccggaagaacaggcgcaggtcgcggcgtcggcggtggacatgttcctgggcgtgtacgcgcgtcagtga

SEQ ID NO: 88595 - protein, 210 aa, Xanthomonas campestris pv. campestris str. ATCC 33913
MSIHSSTFAAPQRLTDRKRHAILEAAIAEFRQQGFEATSMDRIAATAGVSKRTVYNHFPSKDTLFGEILRGLWQRSAEAVSLAYQPGQPLRPQLLELLQQKLRLLEDPAFIDLSRVAIAEGIHSPARARELLAQLGSKEEGTTTWVRAALADGRLVAVDPAFAAQQLQALVKGFAFWPQLALGQPALSPEEQAQVAASAVDMFLGVYARQ

SEQ ID NO: 88596 - DNA, 567 bp, Oceanobacillus iheyensis HTE831
  CDS (1)..(567): transl_table=11
atgagagataaaattattcaagtgagtataccattgtttgatacacatggttacagcgaaacatccattcaaggtattgtagatgcattaggagttaccaaaggtactttctattattattacaagagcaaacaagaattattaaaggatattaatttaacgtatattcaaaaccttttactttcccaagaagaaattttgaatgatagtaccttaacctataaagaaaagctatacaataatgtgttattaattatccgcaatattcgaaaacagcgacagagtgcgagaatatttgccagagaaattcgtcatttgcaaggcgaaaacttagaagtcgtgagaaatatacgaaataaattcagaaaaaatacgcaaacaattattacaaagggaatagaagaaggagagtttaataaaaacattcgtccggatattttaacactaggaattcttgggattacaaattggagttattattggtttaatccagatggagaagtatctgaagaagaacttaccgaatattatatggagttaattttaaatggaataaatctcgaatag

SEQ ID NO: 88597 - protein, 188 aa, Oceanobacillus iheyensis HTE831
MRDKIIQVSIPLFDTHGYSETSIQGIVDALGVTKGTFYYYYKSKQELLKDINLTYIQNLLLSQEEILNDSTLTYKEKLYNNVLLIIRNIRKQRQSARIFAREIRHLQGENLEVVRNIRNKFRKNTQTIITKGIEEGEFNKNIRPDILTLGILGITNWSYYWFNPDGEVSEEELTEYYMELILNGINLE

SEQ ID NO: 88598 - DNA, 633 bp, Shewanella oneidensis MR-1
  CDS (1)..(633): transl_table=11
ttgaggagcccaatgatgtcaaccgtcccccagacgccctgcgtaggtcgcccacgcgccttcgatgccgatgatgcattggccaaagccttggaagtcttctggcgcaaaggttttgaaggtacatcgttaaccgatctaactcaggccatgggcatcaacaaacctagcctttatgctgcttttggtaacaaagaacagctattccttaaagcgatcgagctatacgagcagcgcccctgtgcgtttttctatccttcacttgaaaaagaaaccgcctatcaagtggttgagtctatgttacttggcgcagcaacctccttagtggatgaaaaccaacctcatggctgcttgattgtccaaggcgctctcgcctgtagtgaagcaggacaagccattaaagaaacactgatcacccgccgccgtgacggtgagcaagcattatgcgaacgcctgcaacgcgcaaaggatgaaggcgatttacccgccgacgccgatcccctgctactcgccagatacgtaggcactgtactacaaggcatggccgtgcaagcaactaatggcatatgcccgggggaactccgtaaagtcgccgagatagtgttagcgaatttccccaaaaataaaggctga

SEQ ID NO: 88599 - protein, 210 aa, Shewanella oneidensis MR-1
MRSPMMSTVPQTPCVGRPRAFDADDALAKALEVFWRKGFEGTSLTDLTQAMGINKPSLYAAFGNKEQLFLKAIELYEQRPCAFFYPSLEKETAYQVVESMLLGAATSLVDENQPHGCLIVQGALACSEAGQAIKETLITRRRDGEQALCERLQRAKDEGDLPADADPLLLARYVGTVLQGMAVQATNGICPGELRKVAEIVLANFPKNKG

SEQ ID NO: 88600 - DNA, 762 bp, Corynebacterium efficiens YS-314
  CDS (1)..(762): transl_table=11
atgtgttttcccctttcgcaggaaaagtggtggagattacttaccgaatggacggtagtatcatgggagtgtacggatccaggcacattcccgcggggaaatgagagcttcacaccgtcccccctatcagtccattggttccgacaaggagaaaccatgcaatcagtcaccacagccaccacccaacggggcagaccaggctatgcacgcgaggatgtcatccgcatcgcggtcaaccagttcaacacccacggctatgaggcgacctccatgggcgcactcgccaccaccctcggcgtgagcaagtcagccatctaccaccacatcagctccaaggaggagatcctggtcgaggccaccgaccaggcgctcgaggcgcttttcgacgtgatcgaggaggccgatgccatgcccggcacggcagaggaccgcctgtccgcagtgatcagtggcgccacccgggtactgtgcgagaagccggagaatgtcaccctcctcctgcgcctacggggcaatacagaggtggagaaacagatcctcgagcgtcgacggctaattacccgccgtttcattgactatgttgcatccgcccaggaggagggtgccgtgcgctccaatctggatgccggcatggttgcccgactgaccttcggcatgatcaactccctggtggagtggtatcgccccgatggaccgatctcccccgaggagctcagcaagatcatgccggattttgtgttccaggggctcgcagtccgctaa

SEQ ID NO: 88601 - protein, 253 aa, Corynebacterium efficiens YS-314
MCFPLSQEKWWRLLTEWTVVSWECTDPGTFPRGNESFTPSPLSVHWFRQGETMQSVTTATTQRGRPGYAREDVIRIAVNQFNTHGYEATSMGALATTLGVSKSAIYHHISSKEEILVEATDQALEALFDVIEEADAMPGTAEDRLSAVISGATRVLCEKPENVTLLLRLRGNTEVEKQILERRRLITRRFIDYVASAQEEGAVRSNLDAGMVARLTFGMINSLVEWYRPDGPISPEELSKIMPDFVFQGLAVR

SEQ ID NO: 88602 - DNA, 606 bp, Pseudomonas putida KT2440
  CDS (1)..(606): transl_table=11
atggttcgccgcacccgcgccgcaatgcaagaaacccgagccctgttactggccaccgcccgccagatgttcagcgagcagggatttgcgcacgcctcgatggatgatctgaccgcccgggcgggcttgacgcggggggcgttgtaccaccactttggcgacaagaagggcttgctggcagccgtcgttgagcagctcgacgctgaaatggacgagcgcctgcgtgctattaccgagaccgccgataacgctttggacggcttccgccaacgctgccacgcctacctggagatggcgctggagcccgagatccagcgtatcgtattgcgcgacgccagagcggtgttggggggcggctcgcctgaggcccagcggtattgcatagagtcgctgcgccagttgatcgacaacctggtactagagggcgttttcgtcaacgcgcacgctcaagcgctggctgcgttgatctacggcagcttggctgaagcggctgtgtggatcgcggaggccgaagacggcaatgcacgcttggcgcaggctggcaaggcgttcgacctgctgttgctcggggtgctaaagcggccaacagactctacggacgcgtga

SEQ ID NO: 88603 - protein, 201 aa, Pseudomonas putida KT2440
MVRRTRAAMQETRALLLATARQMFSEQGFAHASMDDLTARAGLTRGALYHHFGDKKGLLAAVVEQLDAEMDERLRAITETADNALDGFRQRCHAYLEMALEPEIQRIVLRDARAVLGGGSPEAQRYCIESLRQLIDNLVLEGVFVNAHAQALAALIYGSLAEAAVWIAEAEDGNARLAQAGKAFDLLLLGVLKRPTDSTDA

SEQ ID NO: 88604 - DNA, 600 bp, Bradyrhizobium japonicum USDA 110
  CDS (1)..(600): transl_table=11
atgacactgattgcggaacatatcgaaggcgacacccgggatcgtatcctcgaggtggccgagcggctgttccgccagatcggctaccagaagaccacggtcggtgacatcgccaaggagctcaggatgagccccgccaatgtctatcgcttcttcgaatcgaagaaggcgattcaccaggcggtggcccgttcgctgatgggcgaggttgagatcgaagcgcagcggatcgtggcgaggcccggtccggtgctcccgcgcttccgcgagctgctcaccaccatccatcgcatgaacaccgagcgctatgtcggcgacaacaagctgcatgagatggtcgagatcgcgatgcaggaggactgggacgtctgcgtcgcccatatggagtgcattgccggggtgatcggccagatgatcgcgcaaggcgcggcctccggcgagttcgaggccccggacctgcaattggccgcgctctgcgcctccacggcgatgatgcgcttcttccacccccagatgatcgcccagtgcgccaccaagccgggcccgaccatcgaccagatgatcgatttcgtcatcgcgggtctgtcgccgcgttactga

SEQ ID NO: 88605 - protein, 199 aa, Bradyrhizobium japonicum USDA 110
MTLIAEHIEGDTRDRILEVAERLFRQIGYQKTTVGDIAKELRMSPANVYRFFESKKAIHQAVARSLMGEVEIEAQRIVARPGPVLPRFRELLTTIHRMNTERYVGDNKLHEMVEIAMQEDWDVCVAHMECIAGVIGQMIAQGAASGEFEAPDLQLAALCASTAMMRFFHPQMIAQCATKPGPTIDQMIDFVIAGLSPRY

SEQ ID NO: 88606 - DNA, 675 bp, Bradyrhizobium japonicum USDA 110
  CDS (1)..(675): transl_table=11
atgaccgaactgtcaacgatgaaggatggcgttgcgaaccaggccgaggcctcggaccgcgtgcttcagatcctcgccgaggccgggcggctgttcgccagcaagggatttgaggggacttcgatgcgcgacatcgcgctcgcctgcggcatctccaagtcgctcctctaccatcatttctccaacaaggacgagatctacgcgcgggtggcggtcggctcgacgctcgaactctaccttttcgtgcgcgaccgcattcccgacgggccgccgtcgcagaagattcgtgctttcatggtcgccacggcggaatacttccggcgctatcgctgggcctggatcgcctccacgaccgccttctggaacgatcccgaccgacggcggcacaaggagaggctgacgcgccgcgaccgtttcgagaactttctgcgcggcctgatccaggaagccatcgacgccggcgaaatccgcaaggtcgacgttcccatgaccggccggctgatcctctcttcgctcaattggatgcatcgctggtacaatcccaacaaatccgcaaccccggaacagatcgcggagatattcttcgacatgctgttcaacgggctgcggagcggggagttgatcgaacttcccggcgccgagccgcctcgcgccggccggcgaaaatcacgctga

SEQ ID NO: 88607 - protein, 224 aa, Bradyrhizobium japonicum USDA 110
MTELSTMKDGVANQAEASDRVLQILAEAGRLFASKGFEGTSMRDIALACGISKSLLYHHFSNKDEIYARVAVGSTLELYLFVRDRIPDGPPSQKIRAFMVATAEYFRRYRWAWIASTTAFWNDPDRRRHKERLTRRDRFENFLRGLIQEAIDAGEIRKVDVPMTGRLILSSLNWMHRWYNPNKSATPEQIAEIFFDMLFNGLRSGELIELPGAEPPRAGRRKSR

SEQ ID NO: 88608 - DNA, 648 bp, Bradyrhizobium japonicum USDA 110
  CDS (1)..(648): transl_table=11
atgcccgcaaaacgatctggcgacaccgtgccgcagcggcgcgacccggtcgccacccgcaagaagctgctgaccgcggcgcgcctggagttcgcccggcacggccttgcgggcgcccgcgtcgacgagatcgccgagcgcgccggcgtcaacaagcagctcgtctaccactacttcggcgacaaggacgcgctctacctcgccgtgctcgaatgggtctatgaggacatccgcgagcaggagcgcaggctcaatctggaaggcctgccgcccgacaaggcgatccgccggctgatcgaagcctcgttcgaccacctggcggcaaaccctgatttcatcgtgcttctgaacgacgagaaccgcggcggtgcccgtcatgtccgcgggtccacgcggctggaggcgatgcattccccgctggtgaaaagcgtctcccacatcctccatgagggcgtgcgttgcggacttttccggaaagggatcgaccccgtccagctttacatctccatcgcgggcctcagctacttcttcttctccaacacgccgacgctctcggcgatcttcggcaaggacctgtcgagccgcgcccagcgccgtgcccggcgcaggcatgtcgtcgacctggtgctccagtcgctccggccataa

SEQ ID NO: 88609 - protein, 215 aa, Bradyrhizobium japonicum USDA 110
MPAKRSGDTVPQRRDPVATRKKLLTAARLEFARHGLAGARVDEIAERAGVNKQLVYHYFGDKDALYLAVLEWVYEDIREQERRLNLEGLPPDKAIRRLIEASFDHLAANPDFIVLLNDENRGGARHVRGSTRLEAMHSPLVKSVSHILHEGVRCGLFRKGIDPVQLYISIAGLSYFFFSNTPTLSAIFGKDLSSRAQRRARRRHVVDLVLQSLRP

SEQ ID NO: 88610 - DNA, 567 bp, Clostridium tetani E88
  CDS (1)..(567): transl_table=11
atgaataaaactaaaaaacttatattcaaggcggcaataaagattttttcccaaaatggatataacggaacaactatggatgatatagcaaaagaagctaatgtagctaaaggaactttatattatcattttaaaagcaaagaagaaatatttaagtttataatcaatgaaggaatgaatatcatatctgaaaagttagacgatatatccaaacaagatagtgattcaatttccaaattaaaagcagtatgtaaagctcagcttagtgtggtatatgaaaatagagatttctttaaagttataatgagtcaattgtggggaagtgaaataagacaatctgagataagagaaaaaatagaaaaatatataaaagatatagaaaaatatataaaagatgctgtagatgaaggaggtataaaaaagggtgaaacctattttatggcatatgcagtatttggtatgttatgctctgcatcaatatatgaattaataaatgaagataaagaaaaaatagatgaagtggcagagagtcttatggattatatacttaaaggaatagaatcataa

SEQ ID NO: 88611 - protein, 188 aa, Clostridium tetani E88
MNKTKKLIFKAAIKIFSQNGYNGTTMDDIAKEANVAKGTLYYHFKSKEEIFKFIINEGMNIISEKLDDISKQDSDSISKLKAVCKAQLSVVYENRDFFKVIMSQLWGSEIRQSEIREKIEKYIKDIEKYIKDAVDEGGIKKGETYFMAYAVFGMLCSASIYELINEDKEKIDEVAESLMDYILKGIES

SEQ ID NO: 88612 - DNA, 570 bp, Pseudomonas syringae pv. tomato str. DC3000
  CDS (1)..(570): transl_table=11
atgagtacacgttcagaccttttgaccagcgctgaaatactgctccgaacgaaaggctacgcggccttcagttatgccgaccttgcggacgacatcggcatcaagaaggccagtattcaccatcactttcccaccaaggaaggcatggcaattgccatcgtcgagagctatctgttccgattcaggaagcagttggaagctatcaatgatgagaacgttggcatcgttgaccgcctgaaggcgttcgcgttgatgtttgcgcacagcagtgaaaacggaatgcttccactctgcggggctttggccgctgagcttttggctctgcctgaaagccttaaagcaatgactaaggatttcttcgagatccatctgacttggctccaagagaatatcaagaagggccaggatcagggtgtgctcaagcccgacctggatgtgatcacagtttcaaggttcatattgaatgccttggaaggtgcaagctttgtatcttgggcaatgagcgatgactacgagaagtcttctggatttgatttgattttggccggaattctgcgttctgaagcctaa

SEQ ID NO: 88613 - protein, 189 aa, Pseudomonas syringae pv. tomato str. DC3000
MSTRSDLLTSAEILLRTKGYAAFSYADLADDIGIKKASIHHHFPTKEGMAIAIVESYLFRFRKQLEAINDENVGIVDRLKAFALMFAHSSENGMLPLCGALAAELLALPESLKAMTKDFFEIHLTWLQENIKKGQDQGVLKPDLDVITVSRFILNALEGASFVSWAMSDDYEKSSGFDLILAGILRSEA

SEQ ID NO: 88614 - DNA, 591 bp, Streptomyces avermitilis MA-4680
  CDS (1)..(591): transl_table=11
atgggacaccgtgaggatctgctcgagggcgccaagcgctgcctggtggagaaggggttcgtgcgcacgaccgcgcgcgacatcgtgaaggagtcggggaccaacctggcctcgatcggctaccactacgggtccaaggacgcgttgctcgcggaggcgtacgtcgatctgatctcgaacgtcggcgacacgttcggggcgttcgacgaaggcgccgcgacgggggagcccggttccctcgaacgcttcgaggaagcctggaggggcgtcatcaggtccttcaccgaggcccgcccgatctggctgctcaccttcgaggtggtcaccaacgccgaccggcttcccacggtccgcgagcacctggtcaaggcccaggacgaggggcgccggggcctcatccccatgttcatgggcggtcgcgaggaggacgtcgacgacgaggcgttgcggacgctcggcggcttctaccagacgctgctcaacggactgtgcctccagtggctcttcgatcccgacagcgcgtccacggccgagggactcaccgcgggcctgcgacgcgtgatcgaggcggccgccaagccgacgggctga

SEQ ID NO: 88615 - protein, 196 aa, Streptomyces avermitilis MA-4680
MGHREDLLEGAKRCLVEKGFVRTTARDIVKESGTNLASIGYHYGSKDALLAEAYVDLISNVGDTFGAFDEGAATGEPGSLERFEEAWRGVIRSFTEARPIWLLTFEVVTNADRLPTVREHLVKAQDEGRRGLIPMFMGGREEDVDDEALRTLGGFYQTLLNGLCLQWLFDPDSASTAEGLTAGLRRVIEAAAKPTG

SEQ ID NO: 88616 - DNA, 591 bp, Streptomyces avermitilis MA-4680
  CDS (1)..(591): transl_table=11
atgaccaccgccaagcgcgacacgtacaccccggagacgctgctctccgtcgccgtccaggtcttcatcgagcggggctacgacggcacctccatggagcacctctccaaggcggcgggcatctccaagtcgtcgatataccaccacgtcgcgggcaaggaggagctgttgagccgcgccgtcagccgggcgctcgacggcctcttcgggattctcggcgaggagcacgcgcgcgtggggcgtgccgtggagcgcctggagtacgtcgtacggcgcatggtcgaggtgctcaccgccgaactgccgtacgtgacgctgctgctgcgggtgcgcggcaacacggacaccgagcgctgggccctggagcggcgacgcgacttcgaccaccgggtcgccgagctgctgaaggccgccgccgacgacggggacgtacgcggcgatgtggaggtccggctcgcgaccaggctcgtcttcggcatgatcaactcgatcgtcgagtggtaccggccggacggccggggcatgggcgagcgggaagtggccgacgcggtcgtgcggttggtcttctcagggctccgcagcgaggcctga

SEQ ID NO: 88617 - protein, 196 aa, Streptomyces avermitilis MA-4680
MTTAKRDTYTPETLLSVAVQVFIERGYDGTSMEHLSKAAGISKSSIYHHVAGKEELLSRAVSRALDGLFGILGEEHARVGRAVERLEYVVRRMVEVLTAELPYVTLLLRVRGNTDTERWALERRRDFDHRVAELLKAAADDGDVRGDVEVRLATRLVFGMINSIVEWYRPDGRGMGEREVADAVVRLVFSGLRSEA

SEQ ID NO: 88618 - DNA, 591 bp, Streptomyces avermitilis MA-4680
  CDS (1)..(591): transl_table=11
atggccacgagaaccgacgcccccacccgccgcgagcagatcctcaaggaggctgcccggctcttcgccgagcgcggcttccacggtgtgggggtcgacgagataggtgccgcggtcggcatcagcggccccggtctgtaccggcacttcgcgggcaaggacgcgatgctcgccgagctgctcgtggggatcagcgggcagctgctgacgggcggcaagcgccgggcggccgaggcggagggcgaccccgaggcgctcctcgactcgctcatcgaggggcacatcgacttcgcgctcgacgaccgccccctgatcaccctgcacgaccgtgagctggaccgcctccgggacagtgaccgcaagctcgtgcggcagctccagcgccagtacgtcgagctgtgggtggaggtggtgcgcaacgtgtacccgggcctcgacgaacccgccgcccgttccgccgtgcactccgtcttcggcctgctgaactccacgccacacctggggcgtccgggcgcgcttccggggcgcgcggggaccgccgcactccttcaccgtatggcgcgaggtgccttcggggccgccggggcgtga

SEQ ID NO: 88619 - protein, 196 aa, Streptomyces avermitilis MA-4680
MATRTDAPTRREQILKEAARLFAERGFHGVGVDEIGAAVGISGPGLYRHFAGKDAMLAELLVGISGQLLTGGKRRAAEAEGDPEALLDSLIEGHIDFALDDRPLITLHDRELDRLRDSDRKLVRQLQRQYVELWVEVVRNVYPGLDEPAARSAVHSVFGLLNSTPHLGRPGALPGRAGTAALLHRMARGAFGAAGA

SEQ ID NO: 88620 - DNA, 615 bp, Streptomyces avermitilis MA-4680
  CDS (1)..(615): transl_table=11
gtgaccgccgcaccggagcgccgccgcgaactcctcgacaccgcagccgaggtcttcgccgagcagggctacaacgccaccaccgtacgcaagatcgcggaccatgccggcatgctcgcgggcagcctctactaccacttcgactccaaggaatcgatgctggaggagatcctgcggaccttcctcgacgagctctgggacggctacgacaccgtcctggacgccgaactcgggccgcgcgaaaccctggaggcgctggtcaccgagtccttccgggagatcgaccggcaccgtgcggccgtcgcgatctaccagaaggagtcgaggcaactcgtggcgcaggagcggttcgcgttcctcgccgagtcgcagcgcaggttcgagaaggcgtggctggccacgctggagcgcggggtcgccgccgaggtgttccgggccgacctcgacatccggctcacctaccggttcgtacgcgacacggtgtgggtcgccgcgtcctggtaccggcccggtggacagcaccgcccggaggagatcgcccggcagtacctgtcgatggtcctcgacgggatcgccgtccgtacgtcgcccctcacgttgcccgtccgtacataa

SEQ ID NO: 88621 - protein, 204 aa, Streptomyces avermitilis MA-4680
MTAAPERRRELLDTAAEVFAEQGYNATTVRKIADHAGMLAGSLYYHFDSKESMLEEILRTFLDELWDGYDTVLDAELGPRETLEALVTESFREIDRHRAAVAIYQKESRQLVAQERFAFLAESQRRFEKAWLATLERGVAAEVFRADLDIRLTYRFVRDTVWVAASWYRPGGQHRPEEIARQYLSMVLDGIAVRTSPLTLPVRT

SEQ ID NO: 88622 - DNA, 630 bp, Streptomyces avermitilis MA-4680
  CDS (1)..(630): transl_table=11
gtgatgagtacggcggaggagacggccggcggcgagatccagccgtgggccgaggtcacccctgacgcggcccggcggttgctggtcgccgccgtggaggccttcgccgagcgcggctaccacgcgacgaccacccgcgacatcgcgggccgggccggcatgagccccgccgcgctctacatccactacaagaccaaggaagagctgctccaccgcatcagcaggatcgggcacgagaaggcgctggagatcctgcggccggcggtggagggcgagggcagcgccgccgagcggctctccgaggccgtacggtcgttcgtgcgctggcacgccgggcagcacaccaccgcacgggtcgtgcagtacgaactggaggcgctcggccccgacgcgcgcgccgagatcatcgcgctgcgccggcagaccgacgcggccgtgcgcgggatcatccaggacggcgtggcggcgggcgacttcgacgtcccggacgtgcccggcaccaccgtggcggtgctctcgctctgcatcgacgtggcccgctggttcaacgtcaacggcccccgtacgcccgacgaggtcggcgcgctctacgccgacctcgtgctgcggatggtgagggcgaaggtctag

SEQ ID NO: 88623 - protein, 209 aa, Streptomyces avermitilis MA-4680
MMSTAEETAGGEIQPWAEVTPDAARRLLVAAVEAFAERGYHATTTRDIAGRAGMSPAALYIHYKTKEELLHRISRIGHEKALEILRPAVEGEGSAAERLSEAVRSFVRWHAGQHTTARVVQYELEALGPDARAEIIALRRQTDAAVRGIIQDGVAAGDFDVPDVPGTTVAVLSLCIDVARWFNVNGPRTPDEVGALYADLVLRMVRAKV

SEQ ID NO: 88624 - DNA, 603 bp, Streptomyces avermitilis MA-4680
  CDS (1)..(603): transl_table=11
gtggcggcagtgcccaggacgacggacggtgacggcacgcccgtcccgcagcggctcctcgccgccgccacccggctcttcgccgaccgtggctacgaccgcacgtcggtccaggagatcgtcgaggcggcgggcgtcaccaagggcgccctgtaccactacttcggctccaaggacgacctcctgcacgaggtgtacgcgcgagtgctgcgcgtccagcaggagcgtctcgacgcgttcgcggacgccgacgcgccgatcgaggagcggctgcgggcggcggcggccgacgtggtcgtcaccaccatcgacaacctcgacgacgcgatgatcttcttccgctccatgcaccatctgagccccgagaagaacaagcaggtacgcgcggagcggcgccgctaccacgagcgcttccgcgcgctgatcgaggagggccagaaggagggcgtcttctccaccaggacgcccgccgacctggtggtcgactaccacttcggctccgtgcaccacctgtcgacctggtaccgcccgggcggcccgctcaccccgcagcaggtcgccgaccaactggcggacctgctgctgcgggcgctgcggccgtag

SEQ ID NO: 88625 - protein, 200 aa, Streptomyces avermitilis MA-4680
MAAVPRTTDGDGTPVPQRLLAAATRLFADRGYDRTSVQEIVEAAGVTKGALYHYFGSKDDLLHEVYARVLRVQQERLDAFADADAPIEERLRAAAADVVVTTIDNLDDAMIFFRSMHHLSPEKNKQVRAERRRYHERFRALIEEGQKEGVFSTRTPADLVVDYHFGSVHHLSTWYRPGGPLTPQQVADQLADLLLRALRP

SEQ ID NO: 88626 - DNA, 624 bp, Bordetella pertussis Tohama I
  CDS (1)..(624): transl_table=11
atggccgatgctcctgcccctgctccgaagcgcgcgcgcgccggccgcccgcccacgctggccgcgccgcgcgagcgcattctcgaggaggccgcgcgcctgttcgcccgcagcggctacgaaaacagctcagtcgccgacctggccgcggccatcggggtgtccaaggccgccctctatcactatttcccgaccaagcaggacatctacgacgccatcatcctggaaacgctggccggcctgctgcaggccgtgacccgcgaggtggagcgccagcacgaggcctgcgaacggctgcgcgccttcatggtggggcatgcccgctatttcgcgcgccatcacgagcaattcgtgaccatgctgatcggctattccggcatggcgctgcccgagcgcgccgacgccgcgcaattgcgcgaccgctacgaacaactgctgcgcgacctgctggagcagggcatggccgcggggacgctgcgccggctggacgtggcggccaccggccgcgcggtgctgtcgatgctgaactggatggtgcgctggtacaagcctggccagggcgacagcgccgagcagatcgccgacggctactacgacttgcttttcaacggcctgcgcatctga

SEQ ID NO: 88627 - protein, 207 aa, Bordetella pertussis Tohama I
MADAPAPAPKRARAGRPPTLAAPRERILEEAARLFARSGYENSSVADLAAAIGVSKAALYHYFPTKQDIYDAIILETLAGLLQAVTREVERQHEACERLRAFMVGHARYFARHHEQFVTMLIGYSGMALPERADAAQLRDRYEQLLRDLLEQGMAAGTLRRLDVAATGRAVLSMLNWMVRWYKPGQGDSAEQIADGYYDLLFNGLRI

SEQ ID NO: 88628 - DNA, 633 bp, Bordetella parapertussis 12822
  CDS (1)..(633): transl_table=11
atgcacgccagctcccgcgggaccgaagaggcggccggatcgccgcgacgcgccgacgtgatcgccaccgccggcgagctgttccggctgcacggctatgagcgtacgacggtgcgcgagctggcgcgcgcggttggcctgcaatcgggcagcctgttccaccatttccgcagcaaggaggagatcctggtggcggtgatgtcggagggcatcgaggaagtgctggagcagggcgcgctggcgctggcgcactaccaggaccccggggcgcgcctggcggcgctgttccgggtgcacatgtggagcatgctcaagggggccgggggcgacgccatgaacgcgctggtgtacgagtggcgcagcctgtcgccggccgctcgcggcggggtcaaggcgttgagcgatcgctacgaggacatgtggcaggacgcggtggacgatgcgttgcgcgccgggctggtcgacggcgatgcgcgcgtcatcaagcgctacctgttgggcgggttgaacctgaccgtgcaatggtacaggccgcaggggcggctggaacctggcgatttcatcgaggccatgctgcgcgcggcgctgcccggcttgccgcccggcaccggggcgtggccgctgcgggactag

SEQ ID NO: 88629 - protein, 210 aa, Bordetella parapertussis 12822
MHASSRGTEEAAGSPRRADVIATAGELFRLHGYERTTVRELARAVGLQSGSLFHHFRSKEEILVAVMSEGIEEVLEQGALALAHYQDPGARLAALFRVHMWSMLKGAGGDAMNALVYEWRSLSPAARGGVKALSDRYEDMWQDAVDDALRAGLVDGDARVIKRYLLGGLNLTVQWYRPQGRLEPGDFIEAMLRAALPGLPPGTGAWPLRD

SEQ ID NO: 88630 - DNA, 612 bp, Bordetella bronchiseptica RB50
  CDS (1)..(612): transl_table=11
atggcaagaaggcagacgagttccaacggcgccggcgaaacgcgcgagaatctgctgcggctcgcagcgcggattttcagcgcccaaggctattccggaacgacgatgcgcagcattgcgcagcaggccggcatagaaaccgccagcatctactaccatttcccgtccaaggaagacctggtcgacgaggtgatggagatcggtgccactgccatcatccagcacatgacggaacggatcgaggccctgggcgacggcgccacggcggaagagcgcttccgcgcggccgtgctggggcagatggccggcatggtcaagcatggcgagtacacgctggccagcagcagcttgatagaacagctgcccgaaaaggtgcgtgaacgccagagcaagcggcgcgagagctaccagaaactatgggccggcctgctcgaggacctgcgcgccgaaggccggctgcgcagcgatgtagacctccatctggcgcgcatgttcatattgggcagcgtgcaatcgattcgatactggttcaatccgcgcaaggggtcgctggagaaggtcgccgcgcagctttgcgacctgttcttcgaaggcgtgggccagcgcggctag

SEQ ID NO: 88631 - protein, 203 aa, Bordetella bronchiseptica RB50
MARRQTSSNGAGETRENLLRLAARIFSAQGYSGTTMRSIAQQAGIETASIYYHFPSKEDLVDEVMEIGATAIIQHMTERIEALGDGATAEERFRAAVLGQMAGMVKHGEYTLASSSLIEQLPEKVRERQSKRRESYQKLWAGLLEDLRAEGRLRSDVDLHLARMFILGSVQSIRYWFNPRKGSLEKVAAQLCDLFFEGVGQRG

SEQ ID NO: 88632 - DNA, 741 bp, Bordetella bronchiseptica RB50
  CDS (1)..(741): transl_table=11
atgccccattccgtcgacgactcctccctggtaacacgacgccgcgcgcaactggtaaaagccgcgatcaagctgttttcgcgcatggggtaccacgccgccacggtcaaggacatcgcgcaggaggctggcgtcagcgccggcctgatgtaccagtacgtgccggacaagcaggacctgctgttcctggcgctgcagcacatcgtccagcgcaacaaggaagaagtgccgtcggccttgctgggcgtcgaagatcccatcgcgcgcctgtaccgcgccatcgatgcctacacgcgcgtcatggccgccaaccagcaagccgtgctgctgacctaccgcgagaccaagtctctcaagcccgaatacatcgagcagatgaagcagctcgaactcgacaccaacaggcttatcgaagcatgcgccacggattgcatacgcgcgggctacctggcgcccaccaacgtggagctgctggtgtaccgcatcatcattgcggcgcatgcatggcccctgaagcattggcgcttgcgtcgcatcgtcacgctggatgagtatctcgaccaggcgatccatgccgcctggaaagacctgctgctgccgcgcggcagcagccgatatgaagaactgcgccgggccggcgaactccggcccgtccatctcgccggcgaatcggacgacggcgcctcccgcgcggcgggcacggaaccgaagaagcgcgcacggcgcggccgcgccgcctga

SEQ ID NO: 88633 - protein, 246 aa, Bordetella bronchiseptica RB50
MPHSVDDSSLVTRRRAQLVKAAIKLFSRMGYHAATVKDIAQEAGVSAGLMYQYVPDKQDLLFLALQHIVQRNKEEVPSALLGVEDPIARLYRAIDAYTRVMAANQQAVLLTYRETKSLKPEYIEQMKQLELDTNRLIEACATDCIRAGYLAPTNVELLVYRIIIAAHAWPLKHWRLRRIVTLDEYLDQAIHAAWKDLLLPRGSSRYEELRRAGELRPVHLAGESDDGASRAAGTEPKKRARRGRAA

SEQ ID NO: 88634 - DNA, 600 bp, Bordetella bronchiseptica RB50
  CDS (1)..(600): transl_table=11
atgttccaggtcaagcggcgcgccctgattcgcgaagcgggcaaatcgttcagccgcctgggctaccacaacgcgtcgctggacgacgtcgcccgcgccctgcatgtatccaagccggcgctctactactacgtcaaggacaagaacgaaatcctgttcgagtgccacaacttcgcgctcgacctgggcgaccgcgccatggaagaagcccgcgccgcgcaggccaccgcattcgggcggctgcgcgagtttgtgtttcggtatgtgcacatgatcaacggcgaactgggcagctacgccgtcctgaccgaaccggccacgtcgctgcgcgaacccgagcggcaggccatcctcaagcggcgccgccagttcgattcggccctgcgccaatgggtgaacgaggccatcgccgacggcgacatcgcggacaacgatcccggcctggtggtcgcgttcttcatgggcgcgatcaaccagattccgctgtggttcaacccggaaggcccgattcccggcgaacaggtggcgcgcattttctccaatctcatttcctgcggcatgcggggcgagcgcggcaacgcaccgccaggccgcggatag

SEQ ID NO: 88635 - protein, 199 aa, Bordetella bronchiseptica RB50
MFQVKRRALIREAGKSFSRLGYHNASLDDVARALHVSKPALYYYVKDKNEILFECHNFALDLGDRAMEEARAAQATAFGRLREFVFRYVHMINGELGSYAVLTEPATSLREPERQAILKRRRQFDSALRQWVNEAIADGDIADNDPGLVVAFFMGAINQIPLWFNPEGPIPGEQVARIFSNLISCGMRGERGNAPPGRG

SEQ ID NO: 88636 - DNA, 648 bp, Bordetella bronchiseptica RB50
  CDS (1)..(648): transl_table=11
atgaaggcccgggccgcggtcgcgtacgaggagatgccgctgcgccaggtggagctgctggacgcggccgcccgggcgttcaccgagatggggttcagcgccgcgacgatcgattcggtggcggacctgatcggggtgaccaagggcagcgtgtattactactaccgcagcaagacggacctgttcttcgcggtgcaccggcgcgccatgcagctgaacctggacgcggtcgagcccctggcggcggacctgtcggtgacgccggcgcggcgcttgtggaacatggcgcacgcgcatacgcacctgatgatggcgtacctgccctaccagcgcgtgacggtgcagggcatcgagctgcggctggccggacgcaccacggcgggccagcgcgccgagctggaagagctggtgcaattgcgcgaccgctatgaatcgctgtttcgcgcggtggtggaagcgggcgtggcggccgggcagtttcgcgcggcgccgccggcgctggcggtcaagccgctgctgggcgcgctgaactggacgacattgtggtaccgcccgcgcgagggcgagaccgaggccgagcgcgaatcgatcgcgcgcggaattgccgacgcgatcgtgggcagcgtgatgccgctgcccgcgatctga

SEQ ID NO: 88637 - protein, 215 aa, Bordetella bronchiseptica RB50
MKARAAVAYEEMPLRQVELLDAAARAFTEMGFSAATIDSVADLIGVTKGSVYYYYRSKTDLFFAVHRRAMQLNLDAVEPLAADLSVTPARRLWNMAHAHTHLMMAYLPYQRVTVQGIELRLAGRTTAGQRAELEELVQLRDRYESLFRAVVEAGVAAGQFRAAPPALAVKPLLGALNWTTLWYRPREGETEAERESIARGIADAIVGSVMPLPAI

SEQ ID NO: 88638 - DNA, 669 bp, Bordetella bronchiseptica RB50
  CDS (1)..(669): transl_table=11
gtgctccttacccccgaactcgaaaattgggtgggcatcgactatgacgacatgcccgccgtccaacgcaagctgctggatgcggcggccaaggcgttcaccacctacgggttcgccgcgacatcgatcgatgtgatcgccagccagatcggcgccaccaagggcagcgtctactaccactatcgcagcaagaccgacctgttcttcgcggtccacaagtgcgcgatggtcatgaacctgaaggcccaggtgccggtcgccttcgatgcctcgctggatccgcgcgccaagctgtatcgcatggcgtacctgcacgccatgctgatgatggattcgctctactaccagcgcgtgacggtgcagggcgtggagttgcaccagtccgtcagcaccacgcccatggagcgcgaggcgctggccgaggtcatcgccatgcgcgatatctacgaaggcctgttcagccaggtggtgcgcgacggcatggccagcgggcacttcgccgaggccgaccattcgatcgccgccaagggcatcctgggcattctcaactggattaccgtctggtaccggccgcgcgagaccgaaagcccgggtttccggcagcgcgtcgccacgcagctggccacccaggccatccagggcatcgctcgcgccgatacgcgcggttga

SEQ ID NO: 88639 - protein, 222 aa, Bordetella bronchiseptica RB50
MLLTPELENWVGIDYDDMPAVQRKLLDAAAKAFTTYGFAATSIDVIASQIGATKGSVYYHYRSKTDLFFAVHKCAMVMNLKAQVPVAFDASLDPRAKLYRMAYLHAMLMMDSLYYQRVTVQGVELHQSVSTTPMEREALAEVIAMRDIYEGLFSQVVRDGMASGHFAEADHSIAAKGILGILNWITVWYRPRETESPGFRQRVATQLATQAIQGIARADTRG

SEQ ID NO: 88640 - DNA, 663 bp, Bordetella bronchiseptica RB50
  CDS (1)..(663): transl_table=11
atgcaggcaggggcgcgccttgcccgccaggataacgccatggccgatgctcctgcccctgctccgaagcgcgcgcgcgccggccgcccgcccacgctggccgcgccgcgcgagcgcattctcgaggaggccgcgcgcctgttcgcccgcagcggctacgaaaacagctcggtcgccgacctggccgcggccatcggggtgtccaaggccgccctctatcactatttcccgaccaagcaggacatctacgacgccatcatcctggagacgctggccggcctgttgcaggccgtgacccgcgaggtggagcgccagcgcgaggcctgcgaacggctgcgcgccttcatggtggggcatgcccgctatttcgcgcgccatcacgagcaattcgtgaccatgctgatcggctattccggcatggcgctgcccgagcgcgccgacgccgcgcaattgcgcgaccgctacgaacaactgctgcgcgacctgctggagcagggcatggccacgggaacgctgcgccggctggacgtggcagccaccggccgcgcggtgctgtcgatgctgaactggatggtgcgctggtacaagcctggccagggcgacagcgccgagcagatcgccgacggctactacgacttgcttttcaacggcctgcgcatctga

SEQ ID NO: 88641 - protein, 220 aa, Bordetella bronchiseptica RB50
MQAGARLARQDNAMADAPAPAPKRARAGRPPTLAAPRERILEEAARLFARSGYENSSVADLAAAIGVSKAALYHYFPTKQDIYDAIILETLAGLLQAVTREVERQREACERLRAFMVGHARYFARHHEQFVTMLIGYSGMALPERADAAQLRDRYEQLLRDLLEQGMATGTLRRLDVAATGRAVLSMLNWMVRWYKPGQGDSAEQIADGYYDLLFNGLRI

SEQ ID NO: 88642 - DNA, 654 bp, Bordetella bronchiseptica RB50
  CDS (1)..(654): transl_table=11
gtggcgacatggaataacgcagtgcccacgcgcaaggccatgcatcaattgaagcgcgaagcgctgttgcgcgaggccattgctgcgttcaaccagaaagggttccacgcgacatcgctgggcgacatcgccaccagccttggggtgaccaaggccgcgctctatcactattttcccaacaagcacgcgctgctgttcgaagcgttcgccgaggcgctgcgcgtgggcttcgaagcgatcgaggccgccgagcggcaaggcggcagcggtctggacaagctgcagatggcggtgcgcgaatacctgcaggtgacgctgagcgagatgagccgctgcgtgatcatcaccgaggaacacgcgctcgagccgcaggaccgcgccaagatcgtcgagcagcgcgaccgcttcgaggccaagctgcgcggcttcgtgcgcgagggcatcgaggacggcagcgtcatcccctgcgatcccaagctggccatcttctcgatattcggcgcggtcaactgggtgccgaagtggttctcggattcgggcaactggtccaacaagcaattggccaagggcatgtccgagctgctgtgccgcgcggtcgccaggcatccggccgaggcgttcgcgccggacatcggcaagatgcgggtcgaatga

SEQ ID NO: 88643 - protein, 217 aa, Bordetella bronchiseptica RB50
MATWNNAVPTRKAMHQLKREALLREAIAAFNQKGFHATSLGDIATSLGVTKAALYHYFPNKHALLFEAFAEALRVGFEAIEAAERQGGSGLDKLQMAVREYLQVTLSEMSRCVIITEEHALEPQDRAKIVEQRDRFEAKLRGFVREGIEDGSVIPCDPKLAIFSIFGAVNWVPKWFSDSGNWSNKQLAKGMSELLCRAVARHPAEAFAPDIGKMRVE

SEQ ID NO: 88644 - DNA, 615 bp, Chromobacterium violaceum ATCC 12472
  CDS (1)..(615): transl_table=11
ttgtccccatcgcacaggattgacatgagcccagtggaacccacccgcccccccgaggaaaatggccggcgcatggagctggtccgcgccgccgccatcctgttccgcgaccagggctacgaacgcaccaccgtgcgcgacctgggcaacgccgtcggcatgcagtccggcagcctgttctaccatttccgcaccaaggaagaaatcctggtggcggtgatggcgctgggcatcaccagcaccaccgagcagctcgccgccgcgctggacgccgcgcccgacatccgcgacaagctcgccgccctgttccgcgttcatctgaactccctgctgggagacaaccaggcggcgctggaagtgatgctgtacgaatggcgcagcgtgtcggaatccgccaaacccggactggtggtgctgcgcgaccgctacgagacgctgtggcagcaggtgctggacgaggccgccgacgccggcctggtcaagcgggacacccgtttgctgcgccgcacgctgctgggcagcctgcactggaccgtgcaatggtatcgacgcgacggcgagctcgacgtggatgcgctggcccagcgcatgttgcaactggtactgttcgactag

SEQ ID NO: 88645 - protein, 204 aa, Chromobacterium violaceum ATCC 12472
MSPSHRIDMSPVEPTRPPEENGRRMELVRAAAILFRDQGYERTTVRDLGNAVGMQSGSLFYHFRTKEEILVAVMALGITSTTEQLAAALDAAPDIRDKLAALFRVHLNSLLGDNQAALEVMLYEWRSVSESAKPGLVVLRDRYETLWQQVLDEAADAGLVKRDTRLLRRTLLGSLHWTVQWYRRDGELDVDALAQRMLQLVLFD

SEQ ID NO: 88646 - DNA, 579 bp, Gloeobacter violaceus PCC 7421
  CDS (1)..(579): transl_table=11
gtgtccgacaccacccgctcccgcattctcgaagccgccgaactgctcctgcgccgccacggtccggccaagctcaccgtgaccgacgtggctcgccacctgggcatgagccacgccaacgtctaccggcattttgcgagcaaagccgacttgctcgacgccgtcgccgagcgctggctgcacaccgtctcaggagcgctcgaaccgatcgccctggccgacgggccggcggcggagcgcctggaagactgggcggtgggcctctggcagcagaagcggcgcaaaatcagcgacgatcccgagcactttgcgatgtaccacggcgtggccgaggcggcgcgcggcgtcgtcgcccgccacgtcgagacgctgctgggtcaactggagcgcatcctggccgacggcgccgcctcagaagagtttcagatgaccgacccggcggccgccgcacgggcggtctggaacgccacggtgcgctttcaccacccgcacctggtaacggcagatccagcctgtgaagcagaactgcgagccgtccttgccctggtgacagccgggctgcgcaccggggcgctctaa

SEQ ID NO: 88647 - protein, 192 aa, Gloeobacter violaceus PCC 7421
MSDTTRSRILEAAELLLRRHGPAKLTVTDVARHLGMSHANVYRHFASKADLLDAVAERWLHTVSGALEPIALADGPAAERLEDWAVGLWQQKRRKISDDPEHFAMYHGVAEAARGVVARHVETLLGQLERILADGAASEEFQMTDPAAAARAVWNATVRFHHPHLVTADPACEAELRAVLALVTAGLRTGAL

SEQ ID NO: 88648 - DNA, 747 bp, Rhodopseudomonas palustris CGA009
  CDS (1)..(747): transl_table=11
atgccgttcgagagccgccgccgcgcccgcgacgaaaagcgcgaggcggtgctgcggacggcggtgcatctgtttctcgaacagggctatcatcgcgccacgctcaacgaagtggcggagcggctgaacatcaccaagccggcgctgtacaattacttccgcagcaaggaggagatcctgttcgagtgctgggcgctcggccaggagcaggtcgacgagatcatcgccggcatcaacgcttccggtgacgacgggctcggcaagctgcgcgcgctggtgcgtgcctatgccgcaacgatggccacggaattcggtgccagcatggtacggttcaatccgcgcgatctgtcgccggagaacgagaagacggtgcgcgccgccaagcgtggcatcgaccagacgtttcggcgcttcatcgcggaaggcgtcaccgacggatcgatcaagccgtgcgatccgaagctcaccgcgttcgcgatcgccggatcgctgaactggatcggccactggtatcagcgcgatggcgcgctgtcgccggaggcgatcgccgacgaattcgcgatgcgcctcaccgaggggctcgccatccgatcaaccaagaagaagagcacccttcaggtgcccgacggcaacaacaacaggaaacgacccaagggaggacaccatgaacatcacccacggcctgcggcgcgcgctgcagatcaacccggaagagctggccaccgtctgcgccggccgccggcgtaa

SEQ ID NO: 88649 - protein, 248 aa, Rhodopseudomonas palustris CGA009
MPFESRRRARDEKREAVLRTAVHLFLEQGYHRATLNEVAERLNITKPALYNYFRSKEEILFECWALGQEQVDEIIAGINASGDDGLGKLRALVRAYAATMATEFGASMVRFNPRDLSPENEKTVRAAKRGIDQTFRRFIAEGVTDGSIKPCDPKLTAFAIAGSLNWIGHWYQRDGALSPEAIADEFAMRLTEGLAIRSTKKKSTLQVPDGNNNRKRPKGGHHEHHPRPAARAADQPGRAGHRLRRPPA

SEQ ID NO: 88650 - DNA, 681 bp, Rhodopseudomonas palustris CGA009
  CDS (1)..(681): transl_table=11
atggcgcgcacgcgagccaccgactacgacgataaacgccgcggcattctcagccgttccgcacggctattcgccgaacacggctacaccggcacttcgatcaccatgatcgccgacgcctgcggcgtctcgaaggcgctgatgtatcactactacccgtcgaaggatgcggtgctgttcgatctgctcgaggatcacctgcagcatctggtgacggtggtcgacgccgccgcgcagggcgaaagcgatccgagcgaccggctgttcgcgatctcggcggcgctgctcgaagcctatcgcggcgccgatgccgaacatcaggtgcagatttccagcctcaagctgctgccgccggagcagcaggagacgctcaaggcgctggagcgcaagctggtggtgtcgatgtcggacgcgatcgccgctgcgatcccggccgcagccgccaagccggagctgctgaagccgctgacgatgtcgctgttcggcatgctgaactggcactatttgtggttccgcgaaggcaagggcctgtcgcgcgaaacctacgcgcagatggtaacgacgctgatgatcgccggcgccgaacaggcgatcgacgcgatcaccgaaccgccagccaaagccgagcgcgcagcgacgcggaagaagagcgagcgggcggcggtggcgcggcgggcgtaa

SEQ ID NO: 88651 - protein, 226 aa, Rhodopseudomonas palustris CGA009
MARTRATDYDDKRRGILSRSARLFAEHGYTGTSITMIADACGVSKALMYHYYPSKDAVLFDLLEDHLQHLVTVVDAAAQGESDPSDRLFAISAALLEAYRGADAEHQVQISSLKLLPPEQQETLKALERKLVVSMSDAIAAAIPAAAAKPELLKPLTMSLFGMLNWHYLWFREGKGLSRETYAQMVTTLMIAGAEQAIDAITEPPAKAERAATRKKSERAAVARRA

SEQ ID NO: 88652 - DNA, 642 bp, Geobacter sulfurreducens PCA
  CDS (1)..(642): transl_table=11
atggcagaacgggacaagagacggaccgaccacggagattcggcggtgcggagacgtttgctggcggcggcgacggagctttttaccgtaaagggatacgcggccacgtcggtacgggagatcgttgaggcggcaggcgtttccaagccggtcctctattactggtttggcaacaaggaaggcatctatctggagctgatgaccgagccgttcggccgttttaccgcactgctggaagagtacctgggcgctgccggaagcccgtgcggccggctcgtggatctgctcgaccatacgctcatgctcgttcaggagaacctgggcggcacgaggctcatgtactccatttactacgggccgccccagggcgctccctttatcgacttcgagggctaccaccgccatttccaggatgccattcggaagctggtttccgaaggcatggaggggggtgcgctgcgttcggaaaacgtggacgacgtgatgtggattctgctcggagtcttcaatgttgccctggaggagcagttgtgcgggcgcccggaccgtccgcccggcattgaccgggagggggtgaggcgtatgttgactcttgtcctgagcggatttgcggcccggacggccgacgaggtggaacgatga

SEQ ID NO: 88653 - protein, 213 aa, Geobacter sulfurreducens PCA
MAERDKRRTDHGDSAVRRRLLAAATELFTVKGYAATSVREIVEAAGVSKPVLYYWFGNKEGIYLELMTEPFGRFTALLEEYLGAAGSPCGRLVDLLDHTLMLVQENLGGTRLMYSIYYGPPQGAPFIDFEGYHRHFQDAIRKLVSEGMEGGALRSENVDDVMWILLGVFNVALEEQLCGRPDRPPGIDREGVRRMLTLVLSGFAARTADEVER

SEQ ID NO: 88654 - DNA, 636 bp, Mycobacterium avium subsp. paratuberculosis K-10
  CDS (1)..(636): transl_table=11
atgcccgccgacagcagcaccccgaatgggcaaacccgccgcgaagagctgctggccgtcgccaccaagctgttcgccgcgcgcgggtatcacggcacccggatggacgacgtcgccgacgtgatcggcctgaacaaggcgaccgtctaccactactacgccagcaagtcgctgatcctctacgacatctaccagcaggccgccgagcggacgctggccgcggtccacgacgacccctcgatgaccgcccgcgaggcgctgtaccagtacaccgtgcggctgctcgaccagatcgccgccaaccccgagggcgccgccgtctacttccaggagcagccctacatcaccgagtggttcaccaaggaacaggtcgccgcggtccgggaaaaggagacccaggtctacgagcacgtgcacgggctcatcgaccgtgggatcgccagcggggagttctacgagtgcgactcgcacgtcctggcgctcggctacatcggcatgacgctcggcgcctaccggtggttgcgcccgagcggacgccgcagcgccaaggagatcgccgccgagttcagcaccgcgctgctgcgcggcctgatccgcgacgaggagatccgcaccacctcgccgctgggcccctga

SEQ ID NO: 88655 - protein, 211 aa, Mycobacterium avium subsp. paratuberculosis K-10
MPADSSTPNGQTRREELLAVATKLFAARGYHGTRMDDVADVIGLNKATVYHYYASKSLILYDIYQQAAERTLAAVHDDPSMTAREALYQYTVRLLDQIAANPEGAAVYFQEQPYITEWFTKEQVAAVREKETQVYEHVHGLIDRGIASGEFYECDSHVLALGYIGMTLGAYRWLRPSGRRSAKEIAAEFSTALLRGLIRDEEIRTTSPLGP

SEQ ID NO: 88656 - DNA, 630 bp, Bacillus cereus ATCC 10987
  CDS (1)..(630): transl_table=11
atgcgaatagtaaaggagtatgaggagcgtagaaaagaaattttagaaagggctgaacgcttgtttgttacgaaaggttatacgaaaacaacagtaaatgacattttaaaagagatagggatagcaaaggggacgttttatcactattttaagtcgaaagaagaagtaatggatgaaatcattatgaggatcattaaagaagatgttgctaaagcgaaagtaattgtctctaatcccaatatcccagtgttagaaaagttatttcgagttttaatggagcaatcgccaaaatcaggggatgtaaaagataaaatgattgagcaatttcatcaaccaaataatgcggaaatgcatcaaaaaagtatagtgcaatccattattcatttatctcctgttttagcagagattttagaacaaggaatcgatgaaggtgtattttctacaccatacccacaagaaacgattgaactattactatcctccgcgcaagtcatatttgatgatgggttattccaatggaaaccggaagaaatgatgagaagagcgaaagcttatattaaaatgatggaagtatctgttggagcgaaagaaggatcctttgattatatgatggaggttttaatgaagtag

SEQ ID NO: 88657 - protein, 209 aa, Bacillus cereus ATCC 10987
MRIVKEYEERRKEILERAERLFVTKGYTKTTVNDILKEIGIAKGTFYHYFKSKEEVMDEIIMRIIKEDVAKAKVIVSNPNIPVLEKLFRVLMEQSPKSGDVKDKMIEQFHQPNNAEMHQKSIVQSIIHLSPVLAEILEQGIDEGVFSTPYPQETIELLLSSAQVIFDDGLFQWKPEEMMRRAKAYIKMMEVSVGAKEGSFDYMMEVLMK

SEQ ID NO: 88658 - DNA, 648 bp, Mycobacterium sp. JLS
  CDS (1)..(648): transl_table=11
gtgagcacctccgcagccggccagccgccgacccgtcgcgacgagctcctcgagctcgccgcgacgatgttcgccgagcgcgggctgcgggccaccacggtgcgcgacatcgccgactcggcgggcatcctgtcgggcagcctgtaccaccacttctcctccaaggaggagatgatcgacgaactgttgcgcggcttcctggactggctgttcgagcggtaccaccagatcgtggccaccgaaccgaatccgctcgaacggctcaaggggctgttcatggcgtccttcgaggcgatcgcgactcgacacgcgcaggtggtcatctaccaggacgaggccaagcggctctcgtcgcagccgcggttctcgtatgtcgaggagcgcaaccgggagcagcgcaagatgtgggtcgaggtgctcaaccagggcatcgcggagggctacttccggccggacatcgacgtcgacctgatctaccgcttcatccgggacaccacctgggtctcggtccgctggtaccaaccgggtggcccgctcacggccgaagaggttggccgccaatacctttccatagtcctcggcggaatcaccgccggcgatgagcgcttgcgcgaagagcgttcaccatcagcatccgaaggagaatga

SEQ ID NO: 88659 - protein, 215 aa, Mycobacterium sp. JLS
MSTSAAGQPPTRRDELLELAATMFAERGLRATTVRDIADSAGILSGSLYHHFSSKEEMIDELLRGFLDWLFERYHQIVATEPNPLERLKGLFMASFEAIATRHAQVVIYQDEAKRLSSQPRFSYVEERNREQRKMWVEVLNQGIAEGYFRPDIDVDLIYRFIRDTTWVSVRWYQPGGPLTAEEVGRQYLSIVLGGITAGDERLREERSPSASEGE

SEQ ID NO: 88660 - DNA, 606 bp, Burkholderia vietnamiensis G4
  CDS (1)..(606): transl_table=11
atggcccgtacccgagcgcccgaccacgaatcccagcgcgagcagatcctcgatctcgccgccgagaaatttgcgcagacgagctatccgagcacgtcgatgtccgatctggcgaccgcgagcggcacgtcgaaggcccgcctctatcactactacgagagcaaggaagcgatcctgttcgacctgctcgatcgctacacgaagcggctgatgctgatcatcgccgaggtcgaaggcgcgagccagcggcgcgggctcagcgagcgcgacgcattcgccgagctcgtgcgcgcgttcctcgccgagtatgagacgtcgcacagccgccacgtggcgctgctcaacgacgtcaagtatctggaggacgcacagcgcgagatcgtgctcgatcgccagcgcgatatcgtcgcggcgttcgcgcgccagctcgcacgcgcgtatcccgaccggatctcgaaggaaaaccagacgtcggtcacgatgatggtgttcgggatgatcaactggaccttcacatggctgaagcccggcggccgcctgggctaccgcgacttcgccgaacaggtgatcgacctgatggagcgcgggctgtccggcacggcatga

SEQ ID NO: 88661 - protein, 201 aa, Burkholderia vietnamiensis G4
MARTRAPDHESQREQILDLAAEKFAQTSYPSTSMSDLATASGTSKARLYHYYESKEAILFDLLDRYTKRLMLIIAEVEGASQRRGLSERDAFAELVRAFLAEYETSHSRHVALLNDVKYLEDAQREIVLDRQRDIVAAFARQLARAYPDRISKENQTSVTMMVFGMINWTFTWLKPGGRLGYRDFAEQVIDLMERGLSGTA

SEQ ID NO: 88662 - DNA, 630 bp, Novosphingobium aromaticivorans DSM 12444
  CDS (1)..(630): transl_table=11
atggaacagtccccagacagccctgaatccccgttcccctcacccgagcagaaacgcaccgttcgcgaggcaaagcgggcggcagtcctgcgtgcggcagtgcagatgttcaacgagcgcggcttccaccagacctcgctagacgacgtggcggcgcgacttgggatcagcaaaccgacgatctaccactacctcggcaacaaggaccaggttctgctggaatgcgtgaccatcgggctgggccagttgatcgaggcggccgaggaggcgcggcgtagcgaggggaccggcgcgcagcggctggccgcgttcctttcgcgctatgcccggatcaacatggacgatttcggccgctgcgtgatccgcaccggagacgaggcgctggtgcctgaaagccgggcacggtttcgcgaattgaagcggaatatcgacacgggaatgcgccgcctcatcgccgagggaatcgcggacgggtctatcgcgccatgcgaccccaagatgctggccttcaccatcgcgggggcgttgaactggcccgcgcgctggcacgatcccgagggaagcgaaagtccggaggcaatcgccgaccagatgatccggctgctcggccagggatacctgccgcgctga

SEQ ID NO: 88663 - protein, 209 aa, Novosphingobium aromaticivorans DSM 12444
MEQSPDSPESPFPSPEQKRTVREAKRAAVLRAAVQMFNERGFHQTSLDDVAARLGISKPTIYHYLGNKDQVLLECVTIGLGQLIEAAEEARRSEGTGAQRLAAFLSRYARINMDDFGRCVIRTGDEALVPESRARFRELKRNIDTGMRRLIAEGIADGSIAPCDPKMLAFTIAGALNWPARWHDPEGSESPEAIADQMIRLLGQGYLPR

SEQ ID NO: 88664 - DNA, 645 bp, Bradyrhizobium sp. ORS278
  CDS (1)..(645): transl_table=11
atggcgcgcacgatcgggtcgcatggtccgacgacgatggaggccatccgcaaggccggcctgcggctgatcttcgagcatggctacgaggcgatgagcctgcgtcagctcgcggccgaggtcggcatccagcctggctccctttataatcacatcagcaccaagcaggagctgctctccgagctgatccaggaccatatcaacgatctgctcagcgagctggagcaggcgttgcacgacaaggagggccccgtcgagcgtctcagggcgttcgtcgcctttcatgtcagctatcacatgacccgcaagcgcgaagtcttcatcgccaattccgagctgcgcagcctcgagccgcgcaactatcaggcggtggtggcgctgcgcggcgcctatgagcggcggctggcggagattctcgccgatggcgtggcgcagggcgtattcgacgtcgacgacgtccaggtcgcgaccttcgcaatcatcgcgcttctgacggggttgtgcagctggtatcgccccggcggtcgcctcacgaaggacgccatcatcgccgcgcatgagaagctcgtgctgtccggcgtcatgccgcaccgcgtgacctcgcgaccgaacggcgccggcggtccggccgacgcacaggtctag

SEQ ID NO: 88665 - protein, 214 aa, Bradyrhizobium sp. ORS278
MARTIGSHGPTTMEAIRKAGLRLIFEHGYEAMSLRQLAAEVGIQPGSLYNHISTKQELLSELIQDHINDLLSELEQALHDKEGPVERLRAFVAFHVSYHMTRKREVFIANSELRSLEPRNYQAVVALRGAYERRLAEILADGVAQGVFDVDDVQVATFAIIALLTGLCSWYRPGGRLTKDAIIAAHEKLVLSGVMPHRVTSRPNGAGGPADAQV

SEQ ID NO: 88666 - DNA, 612 bp, Thermus thermophilus HB27
  CDS (1)..(612): transl_table=11
atggaccgccggagccagatcctcaccatcgccgggcacctcttcagccggaagggctaccacgccaccagcatgcgggagctcgcccgccacctgaacctccagggcgggagcctctacgcccacatccagtccaaggaggagctcctcctggaggtggtgcgccaggcggcggagaggttccagaaggtcttggaggagcttccttcgggagaccccgtgacccggatgaaggccctcgtcaagggccacctccgggtcatcgccgaggagcttccccgggccacggtcttcttccacgagtggaagcacctctcccctcccctcctcgaggaggccaaggccctgaggcgccgctacgaggagggggtgcaggccgtggtggaggaaggggtgcgggcgggggtcttccgggtggagaacgtgcggctcgccaccctcttcgtcctctccgccctcaactggacctaccagtggtaccggcccgacggccccctctccctggaagcgctcgcagaggcctacgccgagctggtcctcaaggcccttggcgtggcggcttccccggaaggggaacgccgtgagaaaggaggcgaagatggtgaagcttag

SEQ ID NO: 88667 - protein, 203 aa, Thermus thermophilus HB27
MDRRSQILTIAGHLFSRKGYHATSMRELARHLNLQGGSLYAHIQSKEELLLEVVRQAAERFQKVLEELPSGDPVTRMKALVKGHLRVIAEELPRATVFFHEWKHLSPPLLEEAKALRRRYEEGVQAVVEEGVRAGVFRVENVRLATLFVLSALNWTYQWYRPDGPLSLEALAEAYAELVLKALGVAASPEGERREKGGEDGEA

SEQ ID NO: 88668 - DNA, 618 bp, Acinetobacter sp. ADP1
  CDS (1)..(618): transl_table=11
atgagcccagaaaatccgtttttaaatcatgaaaagaaagaacaagagcgtcaagccaaacgtgatgctgtgcttttagcagcggtaaaaatttttaatgaacaaggttttcactcaacctcactcgatgacgttgcaaagagtttgggaatttccaaaccgacgatttatcactatttaggcaataaagaacaggttttgcttacttgtgtcgaaattggattacaacagttgatcgaagccgcaaaagatgtcgaaaagcaatcaatctctggttttgaaaaacttagacgttttttattcttatatggttgccgcaatttagatgactttggtcgttgcgtgattttaactcatgatgatgcactttcgaaagaaggtttagttaaatttaaagcactcaaacgcgttgtacatgaagcacttttaaatattattcgtgatgctcagctagatcaatccataaatgcagaacacgatcccaaaattctagcagcgactttaacaggtgccattaactggtcggcaaaatggtataatccaaatggtgttttaagcaaagaagagaccattcaaaaaatggttgatattttaacctacggtttcgaaaaaaaataa

SEQ ID NO: 88669 - protein, 205 aa, Acinetobacter sp. ADP1
MSPENPFLNHEKKEQERQAKRDAVLLAAVKIFNEQGFHSTSLDDVAKSLGISKPTIYHYLGNKEQVLLTCVEIGLQQLIEAAKDVEKQSISGFEKLRRFLFLYGCRNLDDFGRCVILTHDDALSKEGLVKFKALKRVVHEALLNIIRDAQLDQSINAEHDPKILAATLTGAINWSAKWYNPNGVLSKEETIQKMVDILTYGFEKK

SEQ ID NO: 88670 - DNA, 642 bp, Erwinia carotovora subsp. atroseptica SCRI1043; identical to SEQ ID NO: 29320
  CDS (1)..(642): transl_table=11

SEQ ID NO: 88671 - protein, 213 aa, Erwinia carotovora subsp. atroseptica SCRI1043; identical to SEQ ID NO: 29321

SEQ ID NO: 88672 - DNA, 591 bp, Erwinia carotovora subsp. atroseptica SCRI1043; identical to SEQ ID NO: 25712
  CDS (1)..(591): transl_table=11

SEQ ID NO: 88673 - protein, 196 aa, Erwinia carotovora subsp. atroseptica SCRI1043; identical to SEQ ID NO: 25713

SEQ ID NO: 88674 - DNA, 672 bp, Symbiobacterium thermophilum IAM 14863
  CDS (1)..(672): transl_table=11
atgggccgaaaccggcgcagggaggccatgctgcaggccgccatcggcctgttcagcgacaaggggtaccacgccaccaccgtacgggagatcgcccaggcggtggggatcctccccgggtcgctgtacgcgcacatggcctccaaggaggacctgctctacgaggcggtggtgcaggcgtcggaacgcttccaggaggcggtcgcgccgattgcggagtcccccggacacgccggagagcggctccggcaggcgatggcggcgcacatccgggtcgtcgccgagtcgccggccgcggccaccgtcttcctgcacgagtggcgggctctgtctccccagcggcgggcgatggcggtggcccaccgccgggcgtacgaggagctcctggcccgcatcatccgcgagggggtcgagtccggcgtcttccggcccgttgacgagaagtttgtccggctgctggtcctgagcgcggtgaactggacgtaccagtggtaccgcgccgacggcccgctcagccccgagcaggtcgcggaccagttctacgccatcatcgccggggggctgctgcgcaacgcggcggatccggggagcgcggccctgccggcgagcgccgatggggagcccgcgccgcagggcccttcgcgcgtggccgcgggcggggagagcgggtag

SEQ ID NO: 88675 - protein, 223 aa, Symbiobacterium thermophilum IAM 14863
MGRNRRREAMLQAAIGLFSDKGYHATTVREIAQAVGILPGSLYAHMASKEDLLYEAVVQASERFQEAVAPIAESPGHAGERLRQAMAAHIRVVAESPAAATVFLHEWRALSPQRRAMAVAHRRAYEELLARIIREGVESGVFRPVDEKFVRLLVLSAVNWTYQWYRADGPLSPEQVADQFYAIIAGGLLRNAADPGSAALPASADGEPAPQGPSRVAAGGESG

SEQ ID NO: 88676 - DNA, 600 bp, Burkholderia mallei ATCC 23344
  CDS (1)..(600): transl_table=11
atggcccgcacccgcgcccccgatcacgaatcccagcgcgagcagatcctcgatctcgccgccgccaagtttgcgcagacgagctacccgagcacgtcgatgaccgatctcgcgaacgcgagcggcacgtcgaaggcgcgcctctatcactattacgagggcaaggaagcgatcctgttcgatctgctcgaccgctacacgaagcggttgatgctgatcatcgccgaggtcgaaggcgcgagccagcggcacgggctcaccgagcgcgaagcgttcgccgagctcgtgcgcgcgtttctcgccgaatatgagacgtcgcacagccgccatgtcgcgctgctgaacgacgtgaagtacctcgaggacacgcagcgccagatcgtcctcgaccgccagcgcgacatcgtcgccgcgttcgcgcgccagctcgcgcgcgcgtatccggaacgaatctcgaaagacaaccagacgcccgtgacgatgatggtgttcgggatgatcaactggaccttcacgtggctgaagcccggcggccgcctcggctatcgcgatttcgccgagcaggtgatcggcatgatcgagcacgggcttggcggctga

SEQ ID NO: 88677 - protein, 199 aa, Burkholderia mallei ATCC 23344
MARTRAPDHESQREQILDLAAAKFAQTSYPSTSMTDLANASGTSKARLYHYYEGKEAILFDLLDRYTKRLMLIIAEVEGASQRHGLTEREAFAELVRAFLAEYETSHSRHVALLNDVKYLEDTQRQIVLDRQRDIVAAFARQLARAYPERISKDNQTPVTMMVFGMINWTFTWLKPGGRLGYRDFAEQVIGMIEHGLGG

SEQ ID NO: 88678 - DNA, 597 bp, Silicibacter pomeroyi DSS-3
  CDS (1)..(597): transl_table=11
ttggccagaacgattgcgaaggaccacgatcagaagcgcgcccagatcttgaagtctgcggcgcgcgtcttcgcgcgcgagggtttcgaccgcgcctcgatgacccagctcgcgcgcgaatgcgggatatcaaaggccaatatctatcactattacgacagcaaggatgcgatcctgttcgacatcctagaaacctatctgcacgagctgcgcgaccgcatctgcggcatcgatatcgccgggctgagcgggcccgagcggctgcataccgtggtgcgggaaatcctgctggcctatcagggcgtggatgacgaacaccgcgtgcagaccagtggcatgtcggccctgccggacgagcagcagaaacagctgcgcggctaccagcgcgacatgatcgggtttctcagcaatatcctgaacggcatcgcgcccgagacctttgccggcaacccgggcaagctgcggggcgccaccatgtcggtctttggcatgctgaactggtattacatgtggaattccggcgccgacaccgccgcgcgcgaggaatatgcccgcatggtcagcgacctgacgctgcacgggctaaaaggactctga

SEQ ID NO: 88679 - protein, 198 aa, Silicibacter pomeroyi DSS-3
MARTIAKDHDQKRAQILKSAARVFAREGFDRASMTQLARECGISKANIYHYYDSKDAILFDILETYLHELRDRICGIDIAGLSGPERLHTVVREILLAYQGVDDEHRVQTSGMSALPDEQQKQLRGYQRDMIGFLSNILNGIAPETFAGNPGKLRGATMSVFGMLNWYYMWNSGADTAAREEYARMVSDLTLHGLKGL

SEQ ID NO: 88680 - DNA, 585 bp, Silicibacter pomeroyi DSS-3
  CDS (1)..(585): transl_table=11
atggcacgtacgcaaggctctcattccgatatcaccggcccgcgcattcaggatgcggcgctcaggctgtttgcgcggcacgggtttgccgcggtgtcgatgcgccagatcgccggagaggtgggggtgcaggcgggggcgctctacaattacacaccggacaagcagagcttgctgttcgggctgatgcaccggcatatggacgaattgctatcggcgcgccgcgatcaggcgcggggcgatgcgctgacccggttgcgcgatttcgtgggctttcacatccggttccacctgaaccggcccgacgaggtgttcatcgcctatatggaactgcgcaatctcacgcccgagaatttcgcgaccatcgaggggctgcggcgacgctatgaggatgatctggaggcgatcctgcgggcgggggtggcggagggcgtctttgcggtgcctgataccaagatcgcgactctggcggtgatcgccatgctgaacggggtcaatacctggtaccgggccgaggggcggttgtcgctcgacgaggtcgaaagcgtctattgggacatggtgcgcaaggcggtggcggcctag

SEQ ID NO: 88681 - protein, 194 aa, Silicibacter pomeroyi DSS-3
MARTQGSHSDITGPRIQDAALRLFARHGFAAVSMRQIAGEVGVQAGALYNYTPDKQSLLFGLMHRHMDELLSARRDQARGDALTRLRDFVGFHIRFHLNRPDEVFIAYMELRNLTPENFATIEGLRRRYEDDLEAILRAGVAEGVFAVPDTKIATLAVIAMLNGVNTWYRAEGRLSLDEVESVYWDMVRKAVAA

SEQ ID NO: 88682 - DNA, 618 bp, Silicibacter pomeroyi DSS-3
  CDS (1)..(618): transl_table=11
atgcacccgcgcaagatcgagatcgtcaccgccgcggtgacctgttttcttgagcgggggtaccatcagacaggcattcgcgacattgcccggcaagcgggtgtcagcctgggcaatctctacaatcacttcgccggaaaagaggcggttctggccttcatcgccgagcttgaggggcgcgagcttgccgcgtttgtggacatgctgtcggatccggaagagccatatgcggcactggagcggttcatatgggcctatgccgcttatgccgcgcgtccggaaaacgccttgcttggtctcgagctcatggccgaggcgctgcgcaacccgaccatatcacaggtgttcgacggcaaccgtcatcagctggtagcagcgctgatgggctgtcttgagcggggcgtttccacggggcggttccggcatctggacgatacccgcgcgctggcgctgatgatcctggacacgctcgaagggcaggggctgcgccaactcgaccgcaagacgccggacccggacgcggtgcggaccctgtgcgcggtgctgacgaccggcctgctggcccgggatcagagcccgccgccggtgccctgcaacacgccatgttccagcgcatag

SEQ ID NO: 88683 - protein, 205 aa, Silicibacter pomeroyi DSS-3
MHPRKIEIVTAAVTCFLERGYHQTGIRDIARQAGVSLGNLYNHFAGKEAVLAFIAELEGRELAAFVDMLSDPEEPYAALERFIWAYAAYAARPENALLGLELMAEALRNPTISQVFDGNRHQLVAALMGCLERGVSTGRFRHLDDTRALALMILDTLEGQGLRQLDRKTPDPDAVRTLCAVLTTGLLARDQSPPPVPCNTPCSSA

SEQ ID NO: 88684 - DNA, 582 bp, Pseudomonas fluorescens Pf-5
  CDS (1)..(582): transl_table=11
gtgcgtcccaaggagttcgaccccgagcagattgccgatgcggccatgcaggtgttctggcagcgcggttacgccgccacgtccattcaggacctggtggaaggcaccggcctgagccgcagcagcctgtacaacgccttcgacagcaagcacggcctgtacacctgtgccctcaagcgctaccagcagatgaccagcgccaatatcgagctgctgggcgccgacgcacccgccagggaactggtccggcgattgctgatgcgcatcgtcgacaacgagctggaagacacccggcgcctgggctgcctggcggccaatgcttccctggaaatggccgggcaggacgcggcggtggctcagctcgtggcgcagaatttccagcgcatcgaggcggccctggagcaggtgctgcgtcgcggccaggagcagggcgagatcgacccgcagaagaatccccgggccctggccagctttgtggtgtgcaccgtgcagggcttgcgggtgctggccaagggcagcctggcggagcaacgacgccagcgcctgctggatgtggtcgaggtggtcctggccagcctgtag

SEQ ID NO: 88685 - protein, 193 aa, Pseudomonas fluorescens Pf-5
MRPKEFDPEQIADAAMQVFWQRGYAATSIQDLVEGTGLSRSSLYNAFDSKHGLYTCALKRYQQMTSANIELLGADAPARELVRRLLMRIVDNELEDTRRLGCLAANASLEMAGQDAAVAQLVAQNFQRIEAALEQVLRRGQEQGEIDPQKNPRALASFVVCTVQGLRVLAKGSLAEQRRQRLLDVVEVVLASL

SEQ ID NO: 88686 - DNA, 624 bp, Pseudomonas fluorescens Pf-5
  CDS (1)..(624): transl_table=11
gtggacgagcaaaaagcccagcaggtagtacgcgagctgatcgccagtggccaggtgaccgaccccgagagcgcccggggcaagctgctgcaaaccgcagcgcacctgtttcgcaacaagggttacgagcgcaccaccgtgcgtgacctggccagcgcggtgggcatccagtcgggcagcatctttcatcacttcaagagcaaggacgacatcctgcgggcggtgatgcaggaaaccatccactacaacaccgccttgatgcgcgctgaactggccgaggccggcagcgtgcgcgaacgggtgctggcgctgatccgctgtgaactgcagtcgatcatgggcggcagcggtgaagccatggcggtgctggtgtacgagtggcgctcactgtccccggaaggccaggcagccgtcctggcgctgcgcgatatctacgaacagatctggctgcaggtgctgggggaggccaaggaggcggggttcatcaagggcgatgtgttcattacccggcgctttctcaccggcgccctgtcctggaccaccacctggtttcgtgccgagggcagcatgactctggaacagctggcccaggaggccctgctgctggtgctcaaggatcattga

SEQ ID NO: 88687 - protein, 207 aa, Pseudomonas fluorescens Pf-5
MDEQKAQQVVRELIASGQVTDPESARGKLLQTAAHLFRNKGYERTTVRDLASAVGIQSGSIFHHFKSKDDILRAVMQETIHYNTALMRAELAEAGSVRERVLALIRCELQSIMGGSGEAMAVLVYEWRSLSPEGQAAVLALRDIYEQIWLQVLGEAKEAGFIKGDVFITRRFLTGALSWTTTWFRAEGSMTLEQLAQEALLLVLKDH

SEQ ID NO: 88688 - DNA, 609 bp, Thermobifida fusca YX
  CDS (1)..(609): transl_table=11
atgcctgccctccagaggttgtcggagaagacccgtgcgcgccgcgaggaactcctcgacggtctgcgccgcctgttcctcgctgaggggtttgcgcgcttcagcgtgagtgacatggcggaacggctgcgctgctccaagagcaccttgtatctggtggcgccgagcaaagagcagatcgtggttgccgcggtgcgttcctatttcaagagggcagccgaacgcatcgaggcccgcgtggccgaagcgccgcccgagaagcggctcgtggtctacttggaggcagtcgccgcagagttggagccggtgtcggagcagttctacgccgatttggcggcgttcgctcccgccaacgaggtctaccaggagaacacgctggtagcggcccggcgggtgcaggaactggtcgccgaaggggtggctgctggcgtgctgcgcccggtcaacgctgcttttgtgggggctgcggtggcccgggtcatgacggggatccaggacggcacgatcaaagaggccacggggctcgacgatgccgaggcctaccgccacttggctgacctggtgatggcgagtctgacccgggaggccaccgagtcgccgctggcttag

SEQ ID NO: 88689 - protein, 202 aa, Thermobifida fusca YX
MPALQRLSEKTRARREELLDGLRRLFLAEGFARFSVSDMAERLRCSKSTLYLVAPSKEQIVVAAVRSYFKRAAERIEARVAEAPPEKRLVVYLEAVAAELEPVSEQFYADLAAFAPANEVYQENTLVAARRVQELVAEGVAAGVLRPVNAAFVGAAVARVMTGIQDGTIKEATGLDDAEAYRHLADLVMASLTREATESPLA

SEQ ID NO: 88690 - DNA, 651 bp, Thermobifida fusca YX
  CDS (1)..(651): transl_table=11
gtgagcgaacagagtcccaaaacccgtaaaaagcagcgcatgaccggcaaggagcgccgggaacagcttctcgcaattggtagggaactgttcgccgaacgcggcttcgccgccacttccgtggaggagatcgcggcccgcgccggggtctccaaaccggtggtctacgagcacttcggaggtaaagaaggggtctacgcggtcgtcgtcgaccgcgagatgcagcgcctgctcggccttgtcagcgacgctctcgtcgaggggagtccacgccagaagctggagcgggcggccctcgccctcctgcagtacatcgaggagcacagcgaagggttccggatcttggcgcgcgactcgcacgccgcgtccgggaccgggagcttcgcgagcctcatcagcgatatcgccacccaggtggagcacgtgctcgccgaagagttccgggcccgcggctacgacccgaagctcgctccgctctatgcccaggccctggtgggcatggtggcgttgaccggccagtggtggctggaggtgcgccgtccccgccgggaggtggtggcagcccacctggtgaacctggcgtggaacggcctgtcccgtctggacaccaaaccgcgagtggagggagcccggtctcgacggcgagaataa

SEQ ID NO: 88691 - protein, 216 aa, Thermobifida fusca YX
MSEQSPKTRKKQRMTGKERREQLLAIGRELFAERGFAATSVEEIAARAGVSKPVVYEHFGGKEGVYAVVVDREMQRLLGLVSDALVEGSPRQKLERAALALLQYIEEHSEGFRILARDSHAASGTGSFASLISDIATQVEHVLAEEFRARGYDPKLAPLYAQALVGMVALTGQWWLEVRRPRREVVAAHLVNLAWNGLSRLDTKPRVEGARSRRRE

SEQ ID NO: 88692 - DNA, 603 bp, Thermobifida fusca YX
  CDS (1)..(603): transl_table=11
atgacgcagtcagcggagtccaccacggtctccccttccgtgccggaccgcctcctggccgaggccacccggctgtttgcccagcgtggtttcgaccgcgtctcagtccaagaattggttgaggcagccggggtcaccaagggggcgatgtaccactacttcacctccaaggacgacctgctcttcgcgatctaccagcgcgtgctgcagttgcagatgagccggctcgcccagatcgtcgagagaggtggagacgtcaccgaacgcctgcacgcagcggccgccgatgtcgtcaagaccaccgtggacaaccttgacgacatggtcatcttcttccgctcactgcacatgctctcgccggaccgccagcgcgaggtgcgcaaggagcgccgcgcctaccacgagctgttccgctccctggtcgaggaggggatgcgtgaaggggtattccaagacaagatcccggcggacatcgtggtcaactacttcttcggctccatccaccacttgagcatgtggtaccgggccgacggcgagctggacggcgcccagctgggcgagtactacgccgacctgctgctcgcgagcctgcgcgccgactga

SEQ ID NO: 88693 - protein, 200 aa, Thermobifida fusca YX
MTQSAESTTVSPSVPDRLLAEATRLFAQRGFDRVSVQELVEAAGVTKGAMYHYFTSKDDLLFAIYQRVLQLQMSRLAQIVERGGDVTERLHAAAADVVKTTVDNLDDMVIFFRSLHMLSPDRQREVRKERRAYHELFRSLVEEGMREGVFQDKIPADIVVNYFFGSIHHLSMWYRADGELDGAQLGEYYADLLLASLRAD

SEQ ID NO: 88694 - DNA, 654 bp, Thermobifida fusca YX
  CDS (1)..(654): transl_table=11
gtgggacaacgatccgattcggaccatgtgatggctgaggcaacaacagacaaacggcagggccacacccggggacggaccggcaacgatcggcgtacccagatcatcaaggtcgccaccgaactcttccgcgaaaagggctactacgccacgtccctggacgacattgcggaccgcatcggattcaccaaaccggccatctactactacttcaaaagcaaagaagacgtgctgttcgcgatcgtgaacagcatcgtggacgaggccctggaacgattccacgccattgcggccggtcccggcagccctggggaacgcatccacgccctcctcgttgagcacacccgcaccatcctgcggaacctcgacgccaacacggtcttctacaacgagcgcggtctcctctcccccgaacgggaacgggagatgcgcaaacgggaacgcgaatacaccgagatcatgcagcgcctctacgccgaaggcgtggccaccggggaactgctcgacgtcgacccaaccgtcgccacggcgaccctgctcggcgccgcgatctggacataccgctggtacgaccccgaaggccgactctccgccgacgaagtcgtcgaacagatcacgcggctgctcctcaacggctaccgccgccccgcctga

SEQ ID NO: 88695 - protein, 217 aa, Thermobifida fusca YX
MGQRSDSDHVMAEATTDKRQGHTRGRTGNDRRTQIIKVATELFREKGYYATSLDDIADRIGFTKPAIYYYFKSKEDVLFAIVNSIVDEALERFHAIAAGPGSPGERIHALLVEHTRTILRNLDANTVFYNERGLLSPEREREMRKREREYTEIMQRLYAEGVATGELLDVDPTVATATLLGAAIWTYRWYDPEGRLSADEVVEQITRLLLNGYRRPA

SEQ ID NO: 88696 - DNA, 663 bp, Ralstonia eutropha JMP134
  CDS (1)..(663): transl_table=11
atggaaagcaacggaaacccgccggaagcggtcctgccgggcgggcaggatgccgcgccggctactgaaaccgcgccgcctgcgcgcaagcggccgcggccgggcgagcgccgcgtgcagatcctgcagacgctggcagcgatgctcgagcacccgcgcggggaaaagatcaccaccgccgcgctggcagcacgcctgagcgtgtcggaggccgcgctgtaccgccatttcgcgagcaaggcgcagatgtacgaaggcctgatcgccttcatcgagcagaccgtgttcggcctgatcaaccagatcacgacgaccgaggagcatggcctgcgccaggtgcaggccatcgtgcgcatgctgctgtcgttcgcggagaagaaccccggcatgacgcgcgtgttgaccggcgaggcgctcgtcggcgagcacgagcgcctgcaggaccgcatcaaccagatggtcgaccgcatcgaggcctcgctgcgccagtgcctgaagatcgccgtgacgcagggcgcgttcccggccgatgccgatgtcgcgctgcgcgccgcgctggtcatggcgtacgtgcagggccagtggcatcgttatgccaagagcggtttccgcaagtcgccgggcgagcgcgtggacgcgcagttgcgcgtgctgctcggctag

SEQ ID NO: 88697 - protein, 220 aa, Ralstonia eutropha JMP134
MESNGNPPEAVLPGGQDAAPATETAPPARKRPRPGERRVQILQTLAAMLEHPRGEKITTAALAARLSVSEAALYRHFASKAQMYEGLIAFIEQTVFGLINQITTTEEHGLRQVQAIVRMLLSFAEKNPGMTRVLTGEALVGEHERLQDRINQMVDRIEASLRQCLKIAVTQGAFPADADVALRAALVMAYVQGQWHRYAKSGFRKSPGERVDAQLRVLLG

SEQ ID NO: 88698 - DNA, 636 bp, Ralstonia eutropha JMP134
  CDS (1)..(636): transl_table=11
atgtcaattgcaccgaaacccgcagcggaagccgaggaagcgccggcccgcccgcatattgccgaacgccaggaagcgcgccgccgccagattctggacgcggccgcgcagctcttctacaccaagggctatcccggcatgaccatgaatgacctgtgccgcgcgctgggcgtgaccaagccggccgtctactactacttcaccgacaagtacgagatcttcgacatcctgtgccgcgaatcggcgcagacctgcttgcctgtcatccgcgagacggccgatccgtcgctgccggtccgcgaacggctgcacgcgtgcgtgctcgaaatggcgcgccgctgcgtgtcgtgccacgtggcggccacgctgagtttccgcgacaaccagtacctcaagcctgagacggtggcctggctcgatagcatggcgcgcgatttctatcgcgacctgtatgcgctgctcgaggaaggcaagcgcgaaggcgtgttcgcgtttggcgatgcgcgcgtcgcggcccattcgatcggcagcgtggtcggcttcatgtacacgtggcaccagccgggccgcatggaacccgaggcgctcgcgcaggagctggcgtccaacatgttgaagctggtgctgccagcctga

SEQ ID NO: 88699 - protein, 211 aa, Ralstonia eutropha JMP134
MSIAPKPAAEAEEAPARPHIAERQEARRRQILDAAAQLFYTKGYPGMTMNDLCRALGVTKPAVYYYFTDKYEIFDILCRESAQTCLPVIRETADPSLPVRERLHACVLEMARRCVSCHVAATLSFRDNQYLKPETVAWLDSMARDFYRDLYALLEEGKREGVFAFGDARVAAHSIGSVVGFMYTWHQPGRMEPEALAQELASNMLKLVLPA

SEQ ID NO: 88700 - DNA, 636 bp, Ralstonia eutropha JMP134
  CDS (1)..(636): transl_table=11
atggcgcgaaccaaggcacccgatttcgaagcacagcgcgagcagatcctggaactggcggccgccgcctttgccaacagcagctacccaagcacctcgatggccgacctggccgccgcgtgcggcacgtcgaaggcgcgcctgtaccactattacgagagcaaggaagcgatcctgttcgacctgctggaccgctacacgcgtcggctgatgctgatcgtcaccgaggtcgaggccgactccgaacgccagggccgcaccgaccgcgagagcttcgccagcctgatccgcgcattcctggccgagtacgagaactcgcagacgcgccatatcgcgctgatcaacgacgtcaagttcctggccgaggaacagcgtgacctgatcctcggccgcgagcgcgacgtggttgcggcgttctcgcgcatgctgcggcgcgcctacccggagcgcgtcacgcgcgaaaaccagaccgcgctgaccatgaccgtgttcggcatgatcaactggaccttcacctggctcaagccgggcggcaagctgtcctacggggcgtttgccgatatggtcgtggacctgctcgaaggcggcctgccgggcaaggccgccgcgtccgcggaattgctggcgcggcgctga

SEQ ID NO: 88701 - protein, 211 aa, Ralstonia eutropha JMP134
MARTKAPDFEAQREQILELAAAAFANSSYPSTSMADLAAACGTSKARLYHYYESKEAILFDLLDRYTRRLMLIVTEVEADSERQGRTDRESFASLIRAFLAEYENSQTRHIALINDVKFLAEEQRDLILGRERDVVAAFSRMLRRAYPERVTRENQTALTMTVFGMINWTFTWLKPGGKLSYGAFADMVVDLLEGGLPGKAAASAELLARR

SEQ ID NO: 88702 - DNA, 618 bp, Ralstonia eutropha JMP134
  CDS (1)..(618): transl_table=11
atgactgagaccacgaccaccacgccggcccagcgcgggccgtccgaccacgccatccgcactcagatcgtggaggcggccaccaagcatttcagcctctatggctacgagaaaaccacggtgtccgacctcgccaaggcgatcggcttctccaaggcgtacatctacaagttctacgattcgaagcaggcgatcggtgaagtgatctgcgcgaactgcctgaccgcgatcgtcaaggcagtggacgaagcggtggcgggtgtgccgtcggccgctgaccggctgcggcgtatgttccgcgcgctcgtggaagaaagcgtccgcctgttcttccaggatcgcaagctctacgccatcgccgcggccgccgctgcggagaggtggccgccggtgaaagcctacgaagtccacgtcaggcagctggtcctgcagatcgtccgcgaaggacgggaatcgggcgagttcgagcgcaagacaccgcttgacgaagccaccagcgcgatttacctgaccatgcgcccgttcttcgatccgctgctgttgcagcacaacctcgatcttgcggaagaggcgccggccctgctttcgagcctcgtcctgcgcagcctggcgccttga

SEQ ID NO: 88703 - protein, 205 aa, Ralstonia eutropha JMP134
MTETTTTTPAQRGPSDHAIRTQIVEAATKHFSLYGYEKTTVSDLAKAIGFSKAYIYKFYDSKQAIGEVICANCLTAIVKAVDEAVAGVPSAADRLRRMFRALVEESVRLFFQDRKLYAIAAAAAAERWPPVKAYEVHVRQLVLQIVREGRESGEFERKTPLDEATSAIYLTMRPFFDPLLLQHNLDLAEEAPALLSSLVLRSLAP

SEQ ID NO: 88704 - DNA, 648 bp, Pseudomonas fluorescens PfO-1
  CDS (1)..(648): transl_table=11
atgatcgactgtaggagacaatgggtggatgagcaaaaagccctgagggtcatgcgtgaactggtcgatgccggccagctgaccgatccggacagcgctcgcggcaaactgctgcaagtggcggcccacctgtttcgcaacaagggctacgagcgcaccacggtgcgcgatctggccggtgccgtggggattcagtccggcagcatctttcatcacttcaagagcaaggatgaaatcctgcgcgcagtgatggaggaaaccatccgctacaacaccgcgctgatgcgcgcagcccttgccgaagccgccgatgtgcgtgagcgggtgctggcgctgatccgctgcgaattgcagtcgatcatgggcggcagcggcgaagcgatggcggtgttggtgtatgagtggcgctcgctgtccgaagatggccaggccaaagtgctggcgctgcgagacatttatgaagacctctggctgcaagtgctgggcgaggccaaggaggcggggttcatccgtggcgacgtgttcattacccgacgttttctcacgggggcgctgtcctggaccaccacctggttccgtgccggcggcagtctgagcctggatcaactggccgaagaggcgctgattctggtgctcgaagagcgctag

SEQ ID NO: 88705 - protein, 215 aa, Pseudomonas fluorescens PfO-1
MIDCRRQWVDEQKALRVMRELVDAGQLTDPDSARGKLLQVAAHLFRNKGYERTTVRDLAGAVGIQSGSIFHHFKSKDEILRAVMEETIRYNTALMRAALAEAADVRERVLALIRCELQSIMGGSGEAMAVLVYEWRSLSEDGQAKVLALRDIYEDLWLQVLGEAKEAGFIRGDVFITRRFLTGALSWTTTWFRAGGSLSLDQLAEEALILVLEER

SEQ ID NO: 88706 - DNA, 591 bp, Rhodobacter sphaeroides 2.4.1
  CDS (1)..(591): transl_table=11
atggcgcgaacggcaggatctcatgcggagacgacgggcccgcgggtccgggcggcggcccagcggctgatcgcccggcacggctatgccgccgtctcgatgcgccagatcgcggccgaggtgggggtgcaggcgggcgcgctctatctctatacgcccgacaagcagacgctgctcttcgacctgatgcggctccatatggaggagctgctcgccgcctgcgaggcgctgcccgaaccctgcgacccgcgcgcggcgctggcgcagttcgcgcggttccacatcggctatcacatcgaccggcccgaggccgtcttcatcgcctatatggagcttcggaacctgagccccgagaatttcgccgtcatcgagggcctgcggcggcgctatgaggagcgtcttgaggcgatcctcagggccggcacggcggtgggggtgttcgctctgcccgatctccgcctcgccacgcgggccatcatcgccatgctgacgggcgtcacgcactggtttcgcgacatggggccgatggggcgcgacgaggtggccgaccagtatgccgagatggtgctgaagaccgcctcggcccggtga

SEQ ID NO: 88707 - protein, 196 aa, Rhodobacter sphaeroides 2.4.1
MARTAGSHAETTGPRVRAAAQRLIARHGYAAVSMRQIAAEVGVQAGALYLYTPDKQTLLFDLMRLHMEELLAACEALPEPCDPRAALAQFARFHIGYHIDRPEAVFIAYMELRNLSPENFAVIEGLRRRYEERLEAILRAGTAVGVFALPDLRLATRAIIAMLTGVTHWFRDMGPMGRDEVADQYAEMVLKTASAR

SEQ ID NO: 88708 - DNA, 633 bp, Burkholderia sp. 383
  CDS (1)..(633): transl_table=11
ttgttgcggctcgccgcgcgttcctttgcgacgcagggctatgcggcgacgacgatgcgtttcatcgcggatcaggcggggatcgaggcggccagcatctactatcacttctcgtcgaaggaagagctggtcgacgtcgtgatggagcacggtgcggagagcatcgtgcagcacatcaacgagcacttcgcggcactgccgcccggtgcgacggccgacgcgcgtttcaaggccgcgctgatcgggcagatgagcgcgctgatcaagttcggcgactacgcgctggcgcacagccggctcctgacccagcttccggacaaggtgcgggagcgccaggtcaagcggcgcgagcggcatcagcagctctggaccgcggtgttcgacgacctgcgcgccgaagggtggctgcgcgaagacgtcgacgacgcgctgtgccgcgtcttcgtgctcggctgcatcaactcggtccagacctggttcgatccgaagaaagggtcgctcgaccacgtcgcggaccagctcgtcacgatgttcttcgaaggtgtccggccggccgcgaaggcccctgccgcaaaagcccccgccgcgaaaacgcggcgcggcagccgcaagacggaactcgccgcctcctga

SEQ ID NO: 88709 - protein, 210 aa, Burkholderia sp. 383
MLRLAARSFATQGYAATTMRFIADQAGIEAASIYYHFSSKEELVDVVMEHGAESIVQHINEHFAALPPGATADARFKAALIGQMSALIKFGDYALAHSRLLTQLPDKVRERQVKRRERHQQLWTAVFDDLRAEGWLREDVDDALCRVFVLGCINSVQTWFDPKKGSLDHVADQLVTMFFEGVRPAAKAPAAKAPAAKTRRGSRKTELAAS

SEQ ID NO: 88710 - DNA, 606 bp, Burkholderia sp. 383
  CDS (1)..(606): transl_table=11
atggcccgtacccgagcgcccgaccacgaatcccagcgcgagcagatcctcgatctggccgccgacaaattcgcgcagacgagctacccgagcacgtcgatgtccgatctcgcgaccgcgagcggcacgtcgaaggcacgcctctatcactattacgagagcaaggaagcgatcctgttcgacctgctcgaccgctacacgaaacggctgatgctgatcatcgccgaggtcgaaggggcgagccagcgacgcggcctcagcgagcgcgacgcgtttgcggagctggtgcgcgcattcctcgccgaatacgagacgtcgcacagccggcacgtcgcgctgctcaacgacgtgaagtatctcgaggacgcgcagcgtgaaatcgtgctcgaccgccagcgcgacatcgtcgcggcgttcacaagacagctcgcccgcgcgtatccggaccgcatctcgaaggaaaaccagacgtccgtgacgatgatggtgttcgggatgatcaactggacgttcacgtggctgaagccgggcggccgcctcggctaccgcgacttcgccgagcaagtgatcgacctgatcgagcgcgggctgtcgacggccgcctga

SEQ ID NO: 88711 - protein, 201 aa, Burkholderia sp. 383
MARTRAPDHESQREQILDLAADKFAQTSYPSTSMSDLATASGTSKARLYHYYESKEAILFDLLDRYTKRLMLIIAEVEGASQRRGLSERDAFAELVRAFLAEYETSHSRHVALLNDVKYLEDAQREIVLDRQRDIVAAFTRQLARAYPDRISKENQTSVTMMVFGMINWTFTWLKPGGRLGYRDFAEQVIDLIERGLSTAA

SEQ ID NO: 88712 - DNA, 696 bp, Burkholderia sp. 383
  CDS (1)..(696): transl_table=11
gtggcaaaggtcaatgccgacgcgcaaaaagaacagatcctgaacgcggcggcgaagctcttcatcgagaaggggttcggcggcgcgtcgatgcaggagatcgcggaatcgctcggcgtcacgcgtaccgcggtctactactacttcaagaacaaggatgagatcctgaccgcgctggtcgaggaagtcacgctgcgcgcgcggcgtgagtcgagtcgcgtggcggcggaagcggacgccgatccgaaagcgcggctgcgtgcgctggtgcaccagcatgcaatgctgatcctgaagcatcacaacgaattccgcgtgatcgaccgtaccgaacggcaactgcccgaacgcgcgtaccgcgcgaacgaagaggccaagcgcgcggtgctggacaacttcacggcagccatcgaggccggtgtgcagactggcgtgttccgtgtggtcgatgcgaaggtggcggcgttcacgatgatcggcatgtgcagctggccggcattctggtacaagccggacggcgcgaagagcgcggaggaaatcgcggacgagatcgccgaactcgcggtgcactcggtcatgcggcccgccaaacgtcagctcaagcgggccggcgacgtgtcggaagcgctggcgctgctgcgcgaggatctcgatcatctggaactgattgtcgaaaaggcgccgaaagcaggctag

SEQ ID NO: 88713 - protein, 231 aa, Burkholderia sp. 383
MAKVNADAQKEQILNAAAKLFIEKGFGGASMQEIAESLGVTRTAVYYYFKNKDEILTALVEEVTLRARRESSRVAAEADADPKARLRALVHQHAMLILKHHNEFRVIDRTERQLPERAYRANEEAKRAVLDNFTAAIEAGVQTGVFRVVDAKVAAFTMIGMCSWPAFWYKPDGAKSAEEIADEIAELAVHSVMRPAKRQLKRAGDVSEALALLREDLDHLELIVEKAPKAG

SEQ ID NO: 88714 - DNA, 597 bp, Burkholderia sp. 383
  CDS (1)..(597): transl_table=11
atgcgttattccgtcgagcacaagcacgaaacccgcacgcgcatcctcgatgccgcgagccgactgttccgccaggaggggtatggcgggtccggcatcggtccgctgacgaaggcggcgggcgtcaccaacggcgcgttctacggccatttcaagacgaagggcgaagcgttccggcaagtcgtcctcgacggcctcgcccagctccggcaaggcgtcgcgacgttcaaggccgagcatggcgcgcgctggcggcgcccgttcgtgtcgttctacctcggcccgcgacgcacctgcgaactcggcgaaagctgtgcgctgccgagcctttccccggaagtgatgcgcgccgatgacgagacgcgcgacgcgtacgagcacgcattacggcagatcgtcgacgaagtgtcggccgggatgggcgacactccggatgacgatcgcgcgatcgcgttcctcgcgctgctatcgggcggcgtcacgctcgcgcgtgcggtgcgcgatcccgagctggcgcagcgcatcgccgatgcggtcggccgctacgcggtggtgatcgccgaacgcacggacgtgaagccggagcaacaggcgtaa

SEQ ID NO: 88715 - protein, 198 aa, Burkholderia sp. 383
MRYSVEHKHETRTRILDAASRLFRQEGYGGSGIGPLTKAAGVTNGAFYGHFKTKGEAFRQVVLDGLAQLRQGVATFKAEHGARWRRPFVSFYLGPRRTCELGESCALPSLSPEVMRADDETRDAYEHALRQIVDEVSAGMGDTPDDDRAIAFLALLSGGVTLARAVRDPELAQRIADAVGRYAVVIAERTDVKPEQQA

SEQ ID NO: 88716 - DNA, 624 bp, Geobacter metallireducens GS-15
  CDS (1)..(624): transl_table=11
atgcgcatcagcgaacaggccaagcaggaaaaccgcggccgcatcctggagaaggcggcgaaactgttctgcggcaaggggttcgaagccaccaccacccgggacatcgccctggcggccgggctggccaccggcaccatgttcaactatttccccagcaaggagaccctggccatgaccatggttgccgaagcgctcagccgcgggggggatgactatgagcaacgccgcagcgggaatgaagaactggcagaggagctgtttctgttcatcgcgtcgggactccggcggctgcggccgctgcgcccctttctcgggccggttctggagcgctccttgagccccttcccccggaagacggtctgcccggagggggaagctgcccggcaggaccaccttgccgccgtgcaccgtatcataggccggcacggcttcaccactgcccccgattacgttgccataaccatctactggtccctctatctgggagtgctcgccttctgggccagcgacgagtcgcccaaccaagaagcatcccgggccttgatagactattcgatccggatgttcgtacaggtgatctccggcagcggtccggatggaggaggcgcgcatgaagcctga

SEQ ID NO: 88717 - protein, 207 aa, Geobacter metallireducens GS-15
MRISEQAKQENRGRILEKAAKLFCGKGFEATTTRDIALAAGLATGTMFNYFPSKETLAMTMVAEALSRGGDDYEQRRSGNEELAEELFLFIASGLRRLRPLRPFLGPVLERSLSPFPRKTVCPEGEAARQDHLAAVHRIIGRHGFTTAPDYVAITIYWSLYLGVLAFWASDESPNQEASRALIDYSIRMFVQVISGSGPDGGGAHEA

SEQ ID NO: 88718 - DNA, 570 bp, Geobacter metallireducens GS-15
  CDS (1)..(570): transl_table=11
atggaaaatacctacgacaaactgattacggctgcgatcgaattgatgaatattgaggggtatcccggtgcatccatcggcatgcttgcctccaaagtcggtatttccaaaagtacggtgatccattatttcaaaagcaaagaagggattcttcttgccatactggaaaatttcctccccggatatattgatgctttcaaaccggtacttaaagatcccgatatggatggggttgaaaaactgcacaaattccttcacttccatatgaaactggtggttgaaaggagggatgtgttaacgatcaatctaagggataccaaatacctgacaggtaaaaacaaagttatttaccagaatcaacaacggctctatgaagagcaggtagtgaagattatcgaacaaatccagaaggaggggcatggtttgttcagagggttaaagccttccattaccgcgaaggcgatcctgggcatgtgtaactatgccaccatctggtacaaggaggacgaccggttaagcatagaagaccttgcagagcacttctttgccattttgaccagaggtaagtag

SEQ ID NO: 88719 - protein, 189 aa, Geobacter metallireducens GS-15
MENTYDKLITAAIELMNIEGYPGASIGMLASKVGISKSTVIHYFKSKEGILLAILENFLPGYIDAFKPVLKDPDMDGVEKLHKFLHFHMKLVVERRDVLTINLRDTKYLTGKNKVIYQNQQRLYEEQVVKIIEQIQKEGHGLFRGLKPSITAKAILGMCNYATIWYKEDDRLSIEDLAEHFFAILTRGK

SEQ ID NO: 88720 - DNA, 609 bp, Rhodospirillum rubrum ATCC 11170
  CDS (1)..(609): transl_table=11
atgacccgctggaaaaccaccgatcttgattccgcggccctcttccagcgcaagcgggatgcggtgattcacgaagcggcgcaggctttcagtcggtttggctaccacggcacctcgcttgacgatatcgcccgcgtgctcaacgtcaccaaggcggcgctttactactatgtcgccagcaaacaggagcttctggcccattgccatgccatcgggctggggatctgcgaggcgtccctggccgatggccgggccaaggccaccagcggtctggatgcgatcgacggcttcgtccgcgcctatgtcgatcgcgccaccggggaattgggggtctgtctgctgattggcgatctgtcgtgcctggctccggcggcgcggaccgaggtgatggcgcgacgcgacgccttcgaggggtcgttgcgcgatctgatccgcgccggccgcgaggacggcgggatcaggcccgatgtcgatcccaagctcagctgttttcagatccttggcgcgctcaatcacatcccgcgctggtacagcccaacgggcccgaactcgcccgccgagcttgcccagtatttcgcccgccagatccacgccagcctgtcgatctga

SEQ ID NO: 88721 - protein, 202 aa, Rhodospirillum rubrum ATCC 11170
MTRWKTTDLDSAALFQRKRDAVIHEAAQAFSRFGYHGTSLDDIARVLNVTKAALYYYVASKQELLAHCHAIGLGICEASLADGRAKATSGLDAIDGFVRAYVDRATGELGVCLLIGDLSCLAPAARTEVMARRDAFEGSLRDLIRAGREDGGIRPDVDPKLSCFQILGALNHIPRWYSPTGPNSPAELAQYFARQIHASLSI

SEQ ID NO: 88722 - DNA, 609 bp, Moorella thermoacetica ATCC 39073
  CDS (1)..(609): transl_table=11
atggaaaggagcgcgaaaggcagccgggagcgcatcctggctgccgccgaagaggtcttcgccgccaaaggcatcgacggggcacgggtagatgaaatcgcccacctggcgcaggtaaataaacgtatgctctatcactactttaacagcaaggaagacctatatacttacgtcctcaaggtgaatttcgaaaaaagccttgccgccgggaaaaaggccttcagcgagaagggcgatctgaagcagcaggtcgcggaggccatccgcaattacttttatttcctggcagccaaccccaactacccccggctaatggcctgggaagccctccaggggggcaactacgcccgcaaggtgctgccggagatctgggaagaagggctgcccagcctcaaggccatcctcgaagaaggcgtagcccggggcgtatttcgtcccgacctggacctcaaacaagtgctggccagcatcaccaccctctgctccggctatttcaccaataaggacatcctggccatcctctgggaagaggaccccttaagccccgacaatagggaaaaaaggttaaaacatattatagatctcattttacgcagcatcgtaatatga

SEQ ID NO: 88723 - protein, 202 aa, Moorella thermoacetica ATCC 39073
MERSAKGSRERILAAAEEVFAAKGIDGARVDEIAHLAQVNKRMLYHYFNSKEDLYTYVLKVNFEKSLAAGKKAFSEKGDLKQQVAEAIRNYFYFLAANPNYPRLMAWEALQGGNYARKVLPEIWEEGLPSLKAILEEGVARGVFRPDLDLKQVLASITTLCSGYFTNKDILAILWEEDPLSPDNREKRLKHIIDLILRSIVI

SEQ ID NO: 88724 - DNA, 615 bp, Novosphingobium aromaticivorans DSM 12444
  CDS (1)..(615): transl_table=11
atgccgagagccacgcccagcgatcgccgtgaacgcattctcgattccgcgcgtgaggagtttgccgagcgcggtttcgccgccgcgcggatggaggacatcgcaaggcgcgtgggcataagccgcgccgcgctgtaccttgcgttcgacagcaaggaggcgatgttccgcgcgctcgtttccgaagtcatcaccgagatgatgccgacactgctgccgagcgactatggcagcctgcccgcgcccgcgctgctgcgtgccttcgtcaagaacgcgatgaagcggatcgccagtcccgacatggcgttcctgccgcggctgatcgtgggcgagggacgcaactttccagaactggcacggttctatcacgagactgcactgatctgcgtgctgggcgcggtagagcgcctgatcatccacggcatcgaccggggcgagttcgcctgtgccgacccgaagatggcggcccgcagcgtcgcgggcggaatcatcttcgccgcgctgtggcgcaatgtcttcgagccggtcggtgccgagccgctggacgtcgaatggatggcggaaaatcacgcagggcttatcctggccggcctgcgcaggggagacgtggcatga

SEQ ID NO: 88725 - protein, 204 aa, Novosphingobium aromaticivorans DSM 12444
MPRATPSDRRERILDSAREEFAERGFAAARMEDIARRVGISRAALYLAFDSKEAMFRALVSEVITEMMPTLLPSDYGSLPAPALLRAFVKNAMKRIASPDMAFLPRLIVGEGRNFPELARFYHETALICVLGAVERLIIHGIDRGEFACADPKMAARSVAGGIIFAALWRNVFEPVGAEPLDVEWMAENHAGLILAGLRRGDVA

SEQ ID NO: 88726 - DNA, 660 bp, Novosphingobium aromaticivorans DSM 12444
  CDS (1)..(660): transl_table=11
gtgagtaaagtcagcaatatctcccgacggcgtcgttcggctcagacagagggtggcgccgattataccgccaaacgagaggaacttgtccggatcgcggcccgcctgttcaaggaacaaggctaccagtctaccaagctggctgagatcgctcgcgaggccgggctcgaccgcgccacgatttattattacgtcggcagcaaggaagagctgttccgcgaaacggtcgaaggcgtgcttgatgacatcagcgccgaagccaaacgcctgcttgccgaccagagcctgacctggcgagaacgcctgcatgccatctacgtcaggctgatggcctcgtatgaggagaattatccggcaaccttcgtgtacatcaaggaacagatgcacgaagttgcggctgaagaatcgatctgggcgcaggagatcatgagaaaaacgcgcgcgttcgaccaagtgcttatcaacctcattcgtgaggccattgccgccggcgagctgcgctcgaatatcccgcctcgcttggtggagcacgccctgtttggcatgctgaactggtctcaccgctggtttacgcctggcggtccgatgactggcgcgcaagtagccgaagcgttctggtcgattttcatcgacggtatgaaccccgaaaaggggaactga

SEQ ID NO: 88727 - protein, 219 aa, Novosphingobium aromaticivorans DSM 12444
MSKVSNISRRRRSAQTEGGADYTAKREELVRIAARLFKEQGYQSTKLAEIAREAGLDRATIYYYVGSKEELFRETVEGVLDDISAEAKRLLADQSLTWRERLHAIYVRLMASYEENYPATFVYIKEQMHEVAAEESIWAQEIMRKTRAFDQVLINLIREAIAAGELRSNIPPRLVEHALFGMLNWSHRWFTPGGPMTGAQVAEAFWSIFIDGMNPEKGN

SEQ ID NO: 88728 - DNA, 651 bp, Novosphingobium aromaticivorans DSM 12444
  CDS (1)..(651): transl_table=11
atgaccaagtccagcaccgccgccaagccgcgtcaacgtgccgccggcgcgcctaccgggcgcgagatcaagcccggtgtcgtcgcgttcaagcgggcccgcattctcgaagaggccgctgcgctgttcttcgagaaggggtacgaggcggcgacgctggaaatgctcgccgaccggctgagcgcgaccaagccgtttctctatacctacttcaggggcaaggcagcgatcctgtgcgccatatgcgaactcggcgtgaccgaatcgctcgcggcgctggacaggatcgcggaaacggaaaggacgtcgatagacctgctcaaggcttcgctccgcgaagtcgcggagatcatcatcgcgcgcaacgaatacctcgttgtctatcagcgcgagatgatgaaccttgatcggggcgacgctcagcgcatcctgcgcctgcgtcatgaattcgacctgcgcatcggcaagatgatcgaggattgcgtgcgtgacgggtacatcaccgtgcccgatgcgccggcaatgtcgatctggatcggcgggctgctcagctggataacctattgctaccgcccgggcagcagtcggtctggcgaagcggttgcggatcaggcgatgaaggcctgtctgcgactgatcggcctcgactga

SEQ ID NO: 88729 - protein, 216 aa, Novosphingobium aromaticivorans DSM 12444
MTKSSTAAKPRQRAAGAPTGREIKPGVVAFKRARILEEAAALFFEKGYEAATLEMLADRLSATKPFLYTYFRGKAAILCAICELGVTESLAALDRIAETERTSIDLLKASLREVAEIIIARNEYLVVYQREMMNLDRGDAQRILRLRHEFDLRIGKMIEDCVRDGYITVPDAPAMSIWIGGLLSWITYCYRPGSSRSGEAVADQAMKACLRLIGLD

SEQ ID NO: 88730 - DNA, 660 bp, Burkholderia xenovorans LB400
  CDS (1)..(660): transl_table=11
atggaagaaggtagcaatatttcgcgcaggcgcaggacggctcttactgagggtagcgccgattacaaactcaagcgtgatgaaatagtccaggccgcagtaaaattattcaaggaaaaaggctacaagtccacaacgcttagcgatatcgcaaagcgcgcaggccttgaccgcgctacggtgtattactacgttggtagcaaggaagaactgtttcacgaggcggtcaaaggaattctggatgagaatgtcattgaagcagagcgcctgctgcgcgttaccacgatgggtccgcgggagaagctcgagcgactgatcgagcgcttgatgacttcctacgaggagaactatccacacgtgtatgtctacatacaggaagagatgttcgaagtcgaaggcgagcgcacgccgtgggcaaagcaaatggttcgacagaccaggcgttttgaaagcgctgtctccactctcctggatcaaggcgttacgcaagggatttttcgggacgatattcctgtgaggctcgccgcaaatgcaatatttggcatgttcaactggactcatcgatggttcaagccgggcggcaagcaaacagctcggcatgttgcttcagctttctgcaagatttttttcgacggcatgcaagatgccaaacaaccataa

SEQ ID NO: 88731 - protein, 219 aa, Burkholderia xenovorans LB400
MEEGSNISRRRRTALTEGSADYKLKRDEIVQAAVKLFKEKGYKSTTLSDIAKRAGLDRATVYYYVGSKEELFHEAVKGILDENVIEAERLLRVTTMGPREKLERLIERLMTSYEENYPHVYVYIQEEMFEVEGERTPWAKQMVRQTRRFESAVSTLLDQGVTQGIFRDDIPVRLAANAIFGMFNWTHRWFKPGGKQTARHVASAFCKIFFDGMQDAKQP

SEQ ID NO: 88732 - DNA, 633 bp, Burkholderia xenovorans LB400
  CDS (1)..(633): transl_table=11
ttgctgcaggcggcactcatcgaattcggcgagaagggattggacggcgcgcgggtcgacatgatcgcgcaacagagcagtgccaataagcagttggtctatcactattttggtagcaaggaagggctttacacggccgttctcgaatatgcgtatctgcaatatcgtggggaccatgcagcaatacaatcggccgtgcagggactcgacgccgaaaaagcccttcgacgattcgttgatctgatgtttcgtcaatccactgccgcgacctatttcgctcgcctcattcacgacgagaatatgcgcgggggcgttcaccttcctcctctcgcggcagtcaggcccgcttacgaccatattatcgaaatcgtgtcccagattctcgatcgcggcgtcgccgaagacaagtttcggccaggtatcgatccccgggaattctacgtgtcaattttgggaatattcaccatacggataaccaatgcaacaactctctcgttcgcgatcggcctgccattatctgatccgaagggtgcagcggaatcaagggaacaggcgtttgaccttatcctgcggggcatccgaacgcctgccgcgaccagcccgacgactcgccgcggaaggaaacgtccctag

SEQ ID NO: 88733 - protein, 210 aa, Burkholderia xenovorans LB400
MLQAALIEFGEKGLDGARVDMIAQQSSANKQLVYHYFGSKEGLYTAVLEYAYLQYRGDHAAIQSAVQGLDAEKALRRFVDLMFRQSTAATYFARLIHDENMRGGVHLPPLAAVRPAYDHIIEIVSQILDRGVAEDKFRPGIDPREFYVSILGIFTIRITNATTLSFAIGLPLSDPKGAAESREQAFDLILRGIRTPAATSPTTRRGRKRP

SEQ ID NO: 88734 - DNA, 678 bp, Burkholderia xenovorans LB400
  CDS (1)..(678): transl_table=11
atgacgtcaatggtcagcacgcccgttcccgccatatcgacgagggcagccgcatcggcagacagcggcgatgccgcggcgcccgcaactgctgccagcgactcgcgccgcacgatcctcgatacggctgcacgcctgtttcgtaaagaaggctacgcggccgtgtcgttgcgcgacatctcggcggcttgcggcatgaaagcgggcagcctgtattaccactttgcgtcgaaagacgagatcgtgtccgaggtcctgcgaatcggcgtggagcgtgtgttcgccgaagtgcgcgcgtcgatcgacgcattaggcaaagacgccgcgcccgagcaggtgtttcgtacggcggttcgcgcgcatttgcgcgcgttgctcgaatcgcacgactatacgtcggccaacatccgcatttttggtcacgtgcccgcgcagatccgggcggcgcaattgccattgcgcgacgaatatgaagcggtgtgggccgacatcattgcgcgacttgtaccacggcggaaaaagcgcagtgacgagttgcgtttcgtgcggttcttcctgctcggcgcgatgaacggcacgctcgactggtttcatgcgggccacgcttcagtcgacgaagtggcgcaacggtatgcgtcgctggcgctgtcgggcctgctgggcgcaagccggggctga

SEQ ID NO: 88735 - protein, 225 aa, Burkholderia xenovorans LB400
MTSMVSTPVPAISTRAAASADSGDAAAPATAASDSRRTILDTAARLFRKEGYAAVSLRDISAACGMKAGSLYYHFASKDEIVSEVLRIGVERVFAEVRASIDALGKDAAPEQVFRTAVRAHLRALLESHDYTSANIRIFGHVPAQIRAAQLPLRDEYEAVWADIIARLVPRRKKRSDELRFVRFFLLGAMNGTLDWFHAGHASVDEVAQRYASLALSGLLGASRG

SEQ ID NO: 88736 - DNA, 702 bp, Burkholderia xenovorans LB400
  CDS (1)..(702): transl_table=11
atgagcacctggaagaatgcggtgttgggcgcgagcgagcaattcgatcgcaagcgcgaggtgctgttgcgcgaggcggcggcgtcgttcaaccggagcggctatcacggcacgtcgctcgctgaaatcgcgaagaaactcggcgtgacgaaagccgcgttgtatacgtatgtaccgagcaaggaagagctgctttatttctgccacgattcggcaatggacagcgcgatggagattctcgtgcaggcgcgcgcgggaaccggaaccggcctgcagaaactcgcggccacgctgcgcggctatctgaacctgatgctcggcgaggacggcagctacgtggttctgctcgaagagaacgcaatgaagcccgtgcacatgcgcgcgatcatcaagcggcgggacaggttcgaacaggggttgcgcgatctggtcgaggaaggcattgcggacggcagcatcgtgtcatgcaatgcgaagctcgccattttcatgatcatgggcgcaatgaactggagccggaagtggtatcagccgagcggcagctggtcgggcgctcagattgcggtggcgcttaccgagattctcgaacgttcgttagcgggcacacccgtcgcgcagctgatcgcggatccgggcagcattgaggtagaggagccggccgaggaggcgccggtcgccaaggcaaggcggcggccggcgtaa

SEQ ID NO: 88737 - protein, 233 aa, Burkholderia xenovorans LB400
MSTWKNAVLGASEQFDRKREVLLREAAASFNRSGYHGTSLAEIAKKLGVTKAALYTYVPSKEELLYFCHDSAMDSAMEILVQARAGTGTGLQKLAATLRGYLNLMLGEDGSYVVLLEENAMKPVHMRAIIKRRDRFEQGLRDLVEEGIADGSIVSCNAKLAIFMIMGAMNWSRKWYQPSGSWSGAQIAVALTEILERSLAGTPVAQLIADPGSIEVEEPAEEAPVAKARRRPA

SEQ ID NO: 88738 - DNA, 660 bp, Burkholderia xenovorans LB400; identical to SEQ ID NO: 29342
  CDS (1)..(660): transl_table=11

SEQ ID NO: 88739 - protein, 219 aa, Burkholderia xenovorans LB400; identical to SEQ ID NO: 29343

SEQ ID NO: 88740 - DNA, 609 bp, Burkholderia xenovorans LB400
  CDS (1)..(609): transl_table=11
atggcccgtacccgagcccccgaccacgaaacccagcgcgagcagattctcgagcttgccgcggcgaaattcgcccagaccagctatcccagcacctcgatggccgatctcgccgccgcgagcggcacgtcgaaagcacggctctatcactactacgcgagcaaggaagcgatcctgttcgatctgctcgaccgttacaccaagcggctcatgctgatcatcgccgaggtggaaggcgcgagccagcggcgcggcttgtcggagcgggaaacctttgcggagctgatccgtgcgtttctgtcggaatatgagacatcgcacagccggcacgtcgcgttgttaaacgacgtgaagtaccttgtcgacgcccagcgcgaggtgatcctgaaccgccagcgcgacgtggtcgcggcatttgcgcggcagttggcgcgtgcttatccggagcgcgccacgcgcgaaaaccagaccgcgctcaccatgatggtgttcggcatgatcaactggacattcacctggctgaagccggatggccgcctgggttaccgcgaattcgccgagcaggtggtcggcatggtggaccacgggctgggttcgaatccgggctga

SEQ ID NO: 88741 - protein, 202 aa, Burkholderia xenovorans LB400
MARTRAPDHETQREQILELAAAKFAQTSYPSTSMADLAAASGTSKARLYHYYASKEAILFDLLDRYTKRLMLIIAEVEGASQRRGLSERETFAELIRAFLSEYETSHSRHVALLNDVKYLVDAQREVILNRQRDVVAAFARQLARAYPERATRENQTALTMMVFGMINWTFTWLKPDGRLGYREFAEQVVGMVDHGLGSNPG

SEQ ID NO: 88742 - DNA, 702 bp, Ralstonia metallidurans CH34
  CDS (1)..(702): transl_table=11
atggtggtgcgcacgggccgtgcgagaatggccgacatgcctcgcgccctcaaaagaaccggccatacgcctcgtgccgccgaagccaccacgctggcagaaagcggccctgcacgcgcgcacgttgccgaacgccaggaagcgcgtcgtcgccagattctcgacgcggcgggccagctcttctacacgaagggctacccaggcatgacgatgaacgatctgtgccgggcgctcggcgtgaccaagcccgccgtctattactacttcgctgacaagtacgagatcttcgacatcctgtgtcgcgagtcggcacagacctgtctgacggtgatccgcgagaccgccgacccggcactgccggttcgcgagcggctgagcgcctgcctgctggaaatggcgcgacgctgcgtccgctgccatgtggccgccgccctgagctttcgcgacaaccagtacctgaggccggacacggtggaatggctcaacaccatggcgcgcgatttctatcgcgacctgtacgcgcttctggaagaaggacgtgaggcgggcgtgttcgagttcggcgatgcgcgcgtgaccgcgcattccatgggcggcgtgattggattcatgtacacgtggcacgagccgggacgcatggacccggagacgctggcgcaggagttggccaggaacatgatgaaactggtcctgccgaattga

SEQ ID NO: 88743 - protein, 233 aa, Ralstonia metallidurans CH34
MVVRTGRARMADMPRALKRTGHTPRAAEATTLAESGPARAHVAERQEARRRQILDAAGQLFYTKGYPGMTMNDLCRALGVTKPAVYYYFADKYEIFDILCRESAQTCLTVIRETADPALPVRERLSACLLEMARRCVRCHVAAALSFRDNQYLRPDTVEWLNTMARDFYRDLYALLEEGREAGVFEFGDARVTAHSMGGVIGFMYTWHEPGRMDPETLAQELARNMMKLVLPN

SEQ ID NO: 88744 - DNA, 621 bp, Ralstonia metallidurans CH34
  CDS (1)..(621): transl_table=11
atggccagaaccaaagcgcccgatttcgaggcgcaacgagaacaaatccttgacctggcagcggctgccttcgcggccaccagctacccgagcacgtcgatggccgatctggccgccgcgtgcggcacgtcgaaagcccggctgtaccactactacgagagcaaggaggcgatcctgttcgacctgctggaccgctatacgtgtcagctcatgcaaatcgtcagcgaggtggaagcggatagcacgcggcgcggactgaacagccgggagacgttcgggcacctgctgcgcgccttcctggccgaatacgaaacgtcgcagacacgccatatcgcactgatcaatgacgtgaagttcctggccgaagaacagcgcgaccagatcctcaggcgtgagcgcgacgtggtggccgctttcactcgcctgctgcgcctcgcctatccggaccgggtcacggccgagaaccagaccgcgctgaccatgacggtgttcggcatgatcaactggacgttcacgtggctcaagcccggcggcaagctgtcatacgcccagttcgcggagatggtggtcgacctcctcgaaggcggcctgaccccgcgcgggccgggcgtcaccggatag

SEQ ID NO: 88745 - protein, 206 aa, Ralstonia metallidurans CH34
MARTKAPDFEAQREQILDLAAAAFAATSYPSTSMADLAAACGTSKARLYHYYESKEAILFDLLDRYTCQLMQIVSEVEADSTRRGLNSRETFGHLLRAFLAEYETSQTRHIALINDVKFLAEEQRDQILRRERDVVAAFTRLLRLAYPDRVTAENQTALTMTVFGMINWTFTWLKPGGKLSYAQFAEMVVDLLEGGLTPRGPGVTG

SEQ ID NO: 88746 - DNA, 660 bp, Acidobacteria bacterium Ellin345
  CDS (1)..(660): transl_table=11
atgcagtcggctggtcatcgttccggtgcagcgaagaaacctgtcccagcaagtacagcgaaagcggagaacggaactccggggggcaagtccgacaaataccagcgcattctcgatgcagcgatcgcggtgattgcggagaagggcttcttcacggcgcggatctcggacatcgccgaacgggccgatgtggcggacggtacggtctatctctatttcaaaagcaaagaagacatcctgatgaaagccatcaacgcggcgttcgatggcttcatgcggcacgccctaacggagctggcaaagatcgaatcgccggagaagcagttgcgcagattggcgtatctgcatcttgaggcgatgggttcaaatcggaacgcggcgaaggtctttcagatggaactgcgtcagagcacgagatttctggaagaatttagtcacgaccacatggtcgagtattttgcgctcgtacgtgaggcgattcgccgcggccagcatgacggaactttccgtgccgaactttcagacaaagtagcggcgaattgcttcttcggctctctggatgaaatggtgacttcgtgggtgctgagcggagaggattatccgctggcacatgcggctgagcacgtctgcgatgtcatcttaaagggattggagaagtaa

SEQ ID NO: 88747 - protein, 219 aa, Acidobacteria bacterium Ellin345
MQSAGHRSGAAKKPVPASTAKAENGTPGGKSDKYQRILDAAIAVIAEKGFFTARISDIAERADVADGTVYLYFKSKEDILMKAINAAFDGFMRHALTELAKIESPEKQLRRLAYLHLEAMGSNRNAAKVFQMELRQSTRFLEEFSHDHMVEYFALVREAIRRGQHDGTFRAELSDKVAANCFFGSLDEMVTSWVLSGEDYPLAHAAEHVCDVILKGLEK

SEQ ID NO: 88748 - DNA, 630 bp, Silicibacter sp. TM1040
  CDS (1)..(630): transl_table=11
atgccgcttttatctgaacatatgttcagatactctgtatatatggcacgtactcaaggttctcattccgacatcaccggcccgcgtattcgcgcagcggcgcaggagctgtttgcccgtcatggctatgcggcggtctccatgcgtcagatcgccggggcggtgggcgtgcaggcgggcgcgctttataactacactgctgacaagcagagcctgctgtttgacttgatgcaggctcatatggaggggcttctgacggcctgggcagcggaggatctgcctgaggacgtaatggggcagttggaacggtttgtgcggtttcacatccgttataacctcgaacgccctgatgcggtctttattgcgtatatggagttgcgcaacctgaccgatgagaacttcgcccgcatcgaagaacgccgccgcacctatgaaaaccagctcgaaggcatcctgaaggccggggtcacgcaagggctgtttcaggtgcccgataccaagatcgcagcacttgcggtgattgcgatgctgaacggggttttgacgtggtatcgtgatggcgggcggttgtcgcttgtagaggtggagacgctctattgggatatggtgcgcaaatctgtcggggtgtag

SEQ ID NO: 88749 - protein, 209 aa, Silicibacter sp. TM1040
MPLLSEHMFRYSVYMARTQGSHSDITGPRIRAAAQELFARHGYAAVSMRQIAGAVGVQAGALYNYTADKQSLLFDLMQAHMEGLLTAWAAEDLPEDVMGQLERFVRFHIRYNLERPDAVFIAYMELRNLTDENFARIEERRRTYENQLEGILKAGVTQGLFQVPDTKIAALAVIAMLNGVLTWYRDGGRLSLVEVETLYWDMVRKSVGV

SEQ ID NO: 88750 - DNA, 687 bp, Myxococcus xanthus DK 1622
  CDS (1)..(687): transl_table=11
gtgacgaacaccggaggacggaagccggacgagggcgagcgctaccgagccatccttgaaacggcggcgcggctcatctgtgaccgggggtacgagggcacgtcgatgcaggagatcgccgccgcgtgccggatgacgaaggcgggcctctaccaccacatccagaacaaggagcagttgctcttcgccatcatgaactacgggatggacctgttcgaggagcaggtcctctcgcgggtgcaggacatcgcgaatccggtggagcggcttcgcgcgtgcatgcgccacaacatcctgctggtgacgcgggggtggagcaaggaggtcatcatcatcctccacgagcacgccacgctcaccggcgagacgcgcgccttcatcgacgcccggaagaagaagtacgtggacttcctggaggaggccttttcgcaggcctcgcagcagggcctcatccgccccgtggacccgacggtgggcgccttctcgttcctgggaatggtgctgtggatctacaagtggttcaagccggacgggcgcctcacggatgagcagatcgccgacggcatggtgggcatgttgttcccgcccttcgccgccgctggggacaccgctggacaggcagggccctccccgttgcgcatggtgccgagcgtgtcggccaccggcacggattcggaggacgcatga

SEQ ID NO: 88751 - protein, 228 aa, Myxococcus xanthus DK 1622
MTNTGGRKPDEGERYRAILETAARLICDRGYEGTSMQEIAAACRMTKAGLYHHIQNKEQLLFAIMNYGMDLFEEQVLSRVQDIANPVERLRACMRHNILLVTRGWSKEVIIILHEHATLTGETRAFIDARKKKYVDFLEEAFSQASQQGLIRPVDPTVGAFSFLGMVLWIYKWFKPDGRLTDEQIADGMVGMLFPPFAAAGDTAGQAGPSPLRMVPSVSATGTDSEDA

SEQ ID NO: 88752 - DNA, 651 bp, Myxococcus xanthus DK 1622
  CDS (1)..(651): transl_table=11
atgagcacctccccccgctctcgcctgcgcgccacggccgcccgtctcccccccacggcggcggccccccccgaaggcacgcgccgacgcatcctggagacggccctgcagctcttcgcgagccgcggctatcacgacacgtccattcgggacctggcgtcggccctggagctgcggcccagcgcgctgtacgcccacttcgcggccaaggaccacgtcctcgcggagctggtgcgcattggccacgaggcccacttcgaggcgctggagaccgcgttccagggcgcgaagcccacgccggcggaccaggtgcgcgcgctggttcatgcgcacacgcgcgtccacgcggagcatccgcagctcgcgctggtggtgaacgaggagttctacgcgctgagcctggagctggcggcgcccgcgcaagcgctgcgggacaaggccaacgccatgttgatagacgccatccaacgcggcatggcccaggggcagttctccccgctccatccccaaatcaccgccgcggcgattgtgggcatgggctctcgcatcccccactggttcgaacccggcggccccatcgcggtggagaccctggcgaagacccacgccgagctggcgctgcggatgctgggaagtgtctccggcgcgtga

SEQ ID NO: 88753 - protein, 216 aa, Myxococcus xanthus DK 1622
MSTSPRSRLRATAARLPPTAAAPPEGTRRRILETALQLFASRGYHDTSIRDLASALELRPSALYAHFAAKDHVLAELVRIGHEAHFEALETAFQGAKPTPADQVRALVHAHTRVHAEHPQLALVVNEEFYALSLELAAPAQALRDKANAMLIDAIQRGMAQGQFSPLHPQITAAAIVGMGSRIPHWFEPGGPIAVETLAKTHAELALRMLGSVSGA

SEQ ID NO: 88754 - DNA, 660 bp, Mycobacterium sp. MCS
  CDS (1)..(660): transl_table=11
atgtctgccgaagcctcgccgaacggctcgacgcggcgcgatgagctgctgagggtcgccaccaagctgttcgccgcccgcggctaccacggcacccggatggatgacgtcgccgacgccgtcggcctgaacaaggccacggtgtaccactactacgcgagcaagtcgctcatcctctacgacatctacaaaggcgccgccgacttcaccgtcgacgcactgcacgacgatccgacggcgtcggcccgcgagacgatctaccacttcacccgccggttgctcgtcggcatcgccaacgacatcgagcgcgccgccgtgtacttccaggagggcccctacatcggcgagtggttcaccgaggagcaggtcgagtacatccgcgagaaggagacccaggtctacgagcacgtgcgtgacgtgatcgaccggggcatcgccagcggcgagttctacgactgcgattcgcacgtgctggcgctcggctacatcgggatgacgctgggcgcctaccgctggctgcggccccagggccggcgcaccgcacaggagatcgccgaggagttcagcaccgcactgctgcgcgggctgatccgcgacgaggcggtgcgcaccgagtcaccgctgggcgtggacgtccggacgggagtaggcagtgactga

SEQ ID NO: 88755 - protein, 219 aa, Mycobacterium sp. MCS
MSAEASPNGSTRRDELLRVATKLFAARGYHGTRMDDVADAVGLNKATVYHYYASKSLILYDIYKGAADFTVDALHDDPTASARETIYHFTRRLLVGIANDIERAAVYFQEGPYIGEWFTEEQVEYIREKETQVYEHVRDVIDRGIASGEFYDCDSHVLALGYIGMTLGAYRWLRPQGRRTAQEIAEEFSTALLRGLIRDEAVRTESPLGVDVRTGVGSD

SEQ ID NO: 88756 - DNA, 603 bp, Rubrobacter xylanophilus DSM 9941
  CDS (1)..(603): transl_table=11
gtggctgaacgctttgattcgacctcggcccggttacacgccgctgcggccgggctcttctggaacaaggggtatgccgccaccaccacgcgggagctggcgtctcttctgggccttcagaaggcctcgctctaccaccacatggagagcaaggaggagcttctgtacagcctctgcgtcgagtccctcgggaacatccggtcggcggtggaggaggctgtgggcgaggcgggagatccactcgagcgggtgcgcgccctgatcagggcgcacgtcgtgtcgatgctggtagataaggagaagcacgccaccatgctcacggagctgcgctcgctctcggaggagcgcaggagagaggtgatccggctgcgcgacgagtacgagcggatcgtgcgctccgtgctggccgagggccagcgggcgggcgtgctgcgcggcgaccttccggccaaacacctcgccctgtgcctgctcgacctcatgaactgggcgatcttctggttccgttccggagaggagctctccccggaacgcctggccggggtgtttacgaccctgtttctcgagggggccggcagcaaaggcgagccaccgccatcatag

SEQ ID NO: 88757 - protein, 200 aa, Rubrobacter xylanophilus DSM 9941
MAERFDSTSARLHAAAAGLFWNKGYAATTTRELASLLGLQKASLYHHMESKEELLYSLCVESLGNIRSAVEEAVGEAGDPLERVRALIRAHVVSMLVDKEKHATMLTELRSLSEERRREVIRLRDEYERIVRSVLAEGQRAGVLRGDLPAKHLALCLLDLMNWAIFWFRSGEELSPERLAGVFTTLFLEGAGSKGEPPPS

SEQ ID NO: 88758 - DNA, 585 bp, Rhodococcus sp. RHA1
  CDS (1)..(585): transl_table=11
atgagcaccaagtacgacctcaaccgcaccgagattctgcgcgtgtccgccgagctgttcgcgaggtcgggctaccacggcaccgggatcgccgacctgggcacggcggtggggctcggccgcggggccctgtaccactacatcggcagcaaggaggaagtcctgttcgcgatcagcagccgacaactcgcgcagatgaacgacgtggccgacgaactcgccctgaccgaaccggatccggagctacgcctccgcggtctcgcccgggccctgctccgcaacatcgccgagcaccgcgcggagtggacggtgttcttccgcgagtaccacgccctgaccggtgatcggcgggtgcgggtcgtcgcggcgcgcgaacggtacgaatcacattggcggcatgcgttcgagcagggcgtccgggacggcgcgttcaccctgttgccgccgttgatgatcaagggtgtactcggcatgttcaactacagctacctctggctcaccgccgacggcgcccgcacccccgaggagatcgccgacggctttctcgacgccctgatcaccgggctggccgcgccgaacccgtga

SEQ ID NO: 88759 - protein, 194 aa, Rhodococcus sp. RHA1
MSTKYDLNRTEILRVSAELFARSGYHGTGIADLGTAVGLGRGALYHYIGSKEEVLFAISSRQLAQMNDVADELALTEPDPELRLRGLARALLRNIAEHRAEWTVFFREYHALTGDRRVRVVAARERYESHWRHAFEQGVRDGAFTLLPPLMIKGVLGMFNYSYLWLTADGARTPEEIADGFLDALITGLAAPNP

SEQ ID NO: 88760 - DNA, 576 bp, Rhodococcus sp. RHA1
  CDS (1)..(576): transl_table=11
atgagcgacaagtacgacgccaaccgggaccgagtcctgcaggtggccgccgaattgttcgcgaagtctggctaccacggcaccggggtcgccgagatcggtgaggccaccgggctgggccggggcgcgctgtaccactacatcggcagcaaggaggcaatcctctacgagatcagcagccggcaactcgcgcaaatgaacacggtcgccgacgaactcgcgctgtccgaggccgacccggagaaacggctgcgcggcctcgcacgggcgctcatgcggaacatcgccgagcaccgtgccgagtggacggtcttcttccgcgagtaccacgccctgacggacgagcgtcgcgatcgcatcatcgccgaacgtgaacgctacgaatcccattggcggaacgcgctggagcagggcatccgcgacggacagttccgtgccctcccgcggctgatggtcaagggcctgctgggcatgttcaactacagctacctctggatcacccccgcgggcgccgagacacccgaggagatcgcggacgagttcctcgacgccgttgtcacggggatgcgggcgtga

SEQ ID NO: 88761 - protein, 191 aa, Rhodococcus sp. RHA1
MSDKYDANRDRVLQVAAELFAKSGYHGTGVAEIGEATGLGRGALYHYIGSKEAILYEISSRQLAQMNTVADELALSEADPEKRLRGLARALMRNIAEHRAEWTVFFREYHALTDERRDRIIAERERYESHWRNALEQGIRDGQFRALPRLMVKGLLGMFNYSYLWITPAGAETPEEIADEFLDAVVTGMRA

SEQ ID NO: 88762 - DNA, 621 bp, Rhodococcus sp. RHA1
  CDS (1)..(621): transl_table=11
atgacggtagagggcacccagcgcggcagttcctggcgtgagtacaccgaccagggcttgtccaaggttctggccgcggcgctggcggcgttcgtcgagaaggggtacgacggcgcgtcgatccgtgagatcgcgtcccgcgccggtctgtcggtccccggtctctatcatcactacccctccaagcaggcgctgctggtggggttgacgaacgcggtgatgcgcgaactcctcgatcgcagccacgcggcggtggccgaggcgggcccgacaccgggcgagcggttcgacgcggtcgtcgagtcgttgctgcggttccacatgtaccggcgcgagcaggcgttcgtcgcgtcccgggagacgcggagcatggaaccggagagccggaaggcgtacatcgcgctgcgcgacgagcagcaggagatgctggacgacatcgtccgcgagggggtggcggccgggctgttccggacgccgttcccggaggacgcgagccgcgccgtcgtcacgatgtgtgtcgcggtgtccacctggtaccgggaggacgggccgctgtcgcccgacgaactggtcgagcggtacctggcgatcgcgaggagcacggtcggcgcgtccggctga

SEQ ID NO: 88763 - protein, 206 aa, Rhodococcus sp. RHA1
MTVEGTQRGSSWREYTDQGLSKVLAAALAAFVEKGYDGASIREIASRAGLSVPGLYHHYPSKQALLVGLTNAVMRELLDRSHAAVAEAGPTPGERFDAVVESLLRFHMYRREQAFVASRETRSMEPESRKAYIALRDEQQEMLDDIVREGVAAGLFRTPFPEDASRAVVTMCVAVSTWYREDGPLSPDELVERYLAIARSTVGASG

SEQ ID NO: 88764 - DNA, 636 bp, Rhodococcus sp. RHA1
  CDS (1)..(636): transl_table=11
ttgtcaacagccgcgcagccgaggatggagaaagacatgagcgaatcaccgaaccaggtgatcagcccttccaaggctgccgcccgcatccgcgccgcagccgtcgacgcgttcgcgaccagcggttacgggggcaccaccacccgcgagatcgccgcccgcctcgagatgagccccgccgcgatgtacccgcactaccgatccaaggaagagctgctcttcgcgatcagttacgaaggccacaccgcagcgctcgacgttgtcgtgagtgcagacctccccgacgaggcgccctccatcaggctgcaggcgctgatcggcgcattcgcgagctggcaggccacgcaccacgcacaggctcgcgtcgtgcagtacgaactcaacgccctcacgcccgagcactaccgcgacgtggtcaaactgcgccgcgacatcacccacatcgtccgcgccgtcgtcgacgcaggggccgcatccggcgaattcacggtccccgacggcgaaggcgtcaccctcgccctcatgtctctgtgcgtcgacatctgccgctggttcccggccggcgcctacaccgagcccgaggccgtcgcagacctctacgccgacctcgccatgcgcatggtgggtgccggctag

SEQ ID NO: 88765 - protein, 211 aa, Rhodococcus sp. RHA1
MSTAAQPRMEKDMSESPNQVISPSKAAARIRAAAVDAFATSGYGGTTTREIAARLEMSPAAMYPHYRSKEELLFAISYEGHTAALDVVVSADLPDEAPSIRLQALIGAFASWQATHHAQARVVQYELNALTPEHYRDVVKLRRDITHIVRAVVDAGAASGEFTVPDGEGVTLALMSLCVDICRWFPAGAYTEPEAVADLYADLAMRMVGAG

SEQ ID NO: 88766 - DNA, 606 bp, Rhodococcus sp. RHA1
  CDS (1)..(606): transl_table=11
atgaacactcggtcaagcggtgcggtgattccctccgtccggcagcggatcctggacgcggcgctggaggagttctataccgccggctttcatgcggcgaccatgcgcaccatcgccaaacgcgcgggctgcagtgccgccaacgtgtacaaccacttcgagaacaaggacgagctcctggtcgagattctgcggtccgccagtgacgagcagttcaccgccacccggaccgctctgcggaaggcggggtccgcgccggcggagcagtggacggccgcggtggtcgcgcattcgctgtacaccgcccgtaaccagcaagcctgcctggtggcgaataccgagctgcggtacctcgacgaggtggaccgtaaacgggtcgtgggctcgcgcgacgcgcaggagcacctgttcgtcaccatcgcggaggcgggtgtggccggcggtgacttctacgtcccccatgttcaccaggcggtgaccgcggtgctcaccatgtgcgcgggaatcgcgctctggtaccgcccggacggaccgttgtccgcgcaggcggtcgcggactcatatggcgtttatgcgctcaacctggtcggataccgtcccgcctaa

SEQ ID NO: 88767 - protein, 201 aa, Rhodococcus sp. RHA1
MNTRSSGAVIPSVRQRILDAALEEFYTAGFHAATMRTIAKRAGCSAANVYNHFENKDELLVEILRSASDEQFTATRTALRKAGSAPAEQWTAAVVAHSLYTARNQQACLVANTELRYLDEVDRKRVVGSRDAQEHLFVTIAEAGVAGGDFYVPHVHQAVTAVLTMCAGIALWYRPDGPLSAQAVADSYGVYALNLVGYRPA

SEQ ID NO: 88768 - DNA, 615 bp, Rhodococcus sp. RHA1
  CDS (1)..(615): transl_table=11
atgacggagccgctgtacgccgactggcggacgttcgaggccctgccgctgacgcccatcctcgagcaggcattggatctgttcaacgagaacggttaccacggcacgacggtgcggcagatcgcccgtcgtgtcggggtgaccgtccccgccctctactaccaccacgagagcaaggaagccgttctcgtggccctgttcgaactgcagatgcgcgaactgaacgaccgcgccgaggcagccgcccgcgaggccggtgacgacgtggtggcgcaattctccaacgtcgtcgaggcgatcgtcctgtacatgacgtaccgggtgcggcacgtctccctcgacaccgagttgcggcacgtctcggccgacagccgcagccgctacgccgcgtcccgcaagcggctcgaactgatgttggtcgacctcgtcgccgacggcgtcgcccgcggcgtgttccacagcggggacgtccccgagaccgtgcgcgccctcctcgggatgtgccagtccattccgcgctggtaccagccgggcggggcactgacccccgagcaggtcgcagaccgctacgtgaacatcgccctacacaccgtcgggtatctacccgcccactga

SEQ ID NO: 88769 - protein, 204 aa, Rhodococcus sp. RHA1
MTEPLYADWRTFEALPLTPILEQALDLFNENGYHGTTVRQIARRVGVTVPALYYHHESKEAVLVALFELQMRELNDRAEAAAREAGDDVVAQFSNVVEAIVLYMTYRVRHVSLDTELRHVSADSRSRYAASRKRLELMLVDLVADGVARGVFHSGDVPETVRALLGMCQSIPRWYQPGGALTPEQVADRYVNIALHTVGYLPAH

SEQ ID NO: 88770 - DNA, 606 bp, Rhodococcus sp. RHA1
  CDS (1)..(606): transl_table=11
atgtgcgctgcaaaggtggccgccgtggcaacgggtaccgggcggcaggtgatcctcgactccgcggtggccaacatgaacgaacgcggctatcatggcacgtccatgcgcgacatcgcccgcggcgccgacatcaccgtcgcctcgatctaccaccacttcgcgtcgaagcaggagatcctgcaggacatcatggtgcgcgcactccacgacgccatcgcgatgacccgcggtgccctgctgcgctcgggtggcgcccccgccgaccagttgcaggcgctgatgcgggcgtgggtcatgttccacaccacccggcaactggacgcaatggtcggcgccaccgagatacgcagcctcgacgacgccggccgccggctcgtcgtcgccctccgcgacgaacaggagcacctcttccgcgacgtcgtcgagcgtggtgtcgaggagggcgacttcgcgaccgaattcccgcgggacgccgtccgcggcatcatcaacatgggtcaatcggtgtgcacgtggtggcacgccgacggtccgctgaagcccgaggaactcgccgagcgctacgccgacctcgccctggcgatggtgaaaccgaccgtctga

SEQ ID NO: 88771 - protein, 201 aa, Rhodococcus sp. RHA1
MCAAKVAAVATGTGRQVILDSAVANMNERGYHGTSMRDIARGADITVASIYHHFASKQEILQDIMVRALHDAIAMTRGALLRSGGAPADQLQALMRAWVMFHTTRQLDAMVGATEIRSLDDAGRRLVVALRDEQEHLFRDVVERGVEEGDFATEFPRDAVRGIINMGQSVCTWWHADGPLKPEELAERYADLALAMVKPTV

SEQ ID NO: 88772 - DNA, 615 bp, Rhodococcus sp. RHA1
  CDS (1)..(615): transl_table=11
atgacgccaccccccgccgacgacacgtccggcaagtccggacgccggaccgaactcctcgacatcgcggccaccctgttcgccgaacgcggcctgcgggccaccaccgtgcgcgacatcgccgacgccgcgggcatcctgtcgggcagcctgtaccaccacttcgactcgaaggagtcgatggtcgacgagatcctacggggcttcctcgacgacctgttcggcaagtaccgcgagatcgtcgcgtccggcctcgacagccgcgccaccctcgaagcgctggtcaccacgtcctacgaggcgatcgacgcgtcgcattccgcggtcgcgatctatcaggacgaggtgaagcacctcgtcgcgaacgagcgcttcacgtacctgtccgaactgaacaccgaattccgcgagctgtggatgggtgtgctcgaggcgggtgtgaaggacggcagcttccgatccgacatcgacgtcgagctcgccttccgattcctccgcgacaccgcctgggtcgccgtccgctggtaccggcccggcggctcggtcacggtcgacaccgtcgccaagcaatacctctcgatcgtcctcgacggacttgcgagtccccataactga

SEQ ID NO: 88773 - protein, 204 aa, Rhodococcus sp. RHA1
MTPPPADDTSGKSGRRTELLDIAATLFAERGLRATTVRDIADAAGILSGSLYHHFDSKESMVDEILRGFLDDLFGKYREIVASGLDSRATLEALVTTSYEAIDASHSAVAIYQDEVKHLVANERFTYLSELNTEFRELWMGVLEAGVKDGSFRSDIDVELAFRFLRDTAWVAVRWYRPGGSVTVDTVAKQYLSIVLDGLASPHN

SEQ ID NO: 88774 - DNA, 624 bp, Rhodococcus sp. RHA1
  CDS (1)..(624): transl_table=11
gtgtccgtagaagccatgacgctccgcgatggtccgcgttcgaagcgcgggctcattctgacggccgcgatcgaacgcttcggggaggtcggcttcgagcacacgaagtgggcgtcgattgccgacgaggtgggcatcggccagacggcgctctatcactatttcgagtcgaagggtcactgcctgctgaccatcatgcgtctcgaactggcgcagtcgctcgagcgattcaccgccgcgatcgagggcgtcgacgacccggtcgaggcgttgagtgccgccgtcaccagcgctctggaagcgaccccgcgggacgcccttcagcggcgcatccttcaaagccacatggatctgctcgccactccccgccaatcggagaaggaagaggccgagcgtcagacctcgcgcgcgctggtgaactcgatcgaagaagaatggtctcttctcattgcgcgggggatgggtgcgggcgtattcgccgacagtgatccacgattgatggcccggctgattctcggactcgtcgtcagtgtgtggcggtggtatcgacccggcggggacatgaccctcgaccagctcaaccagcacgttcgcgacgccaccctgcgcatcgtccgcgcgtaa

SEQ ID NO: 88775 - protein, 207 aa, Rhodococcus sp. RHA1
MSVEAMTLRDGPRSKRGLILTAAIERFGEVGFEHTKWASIADEVGIGQTALYHYFESKGHCLLTIMRLELAQSLERFTAAIEGVDDPVEALSAAVTSALEATPRDALQRRILQSHMDLLATPRQSEKEEAERQTSRALVNSIEEEWSLLIARGMGAGVFADSDPRLMARLILGLVVSVWRWYRPGGDMTLDQLNQHVRDATLRIVRA

SEQ ID NO: 88776 - DNA, 621 bp, Rhodococcus sp. RHA1
  CDS (1)..(621): transl_table=11
atgtctgatgtcaagctgggtagttcgacgcgtcgaactactcgcatcggcgtggaatccaggcagcgcatcatggatgcggcggccaagctcttcgctgagaacggctaccacggcaccggtgtcgaggagatctcgaaggaaacccagctcggcaagggcgcgctctatcaccacatcgggaacaaggaagcagtgttgttcgagatctgccacacgcgcatggcggacctgctgacgcagtcgggccgggtcctggcgatggacagcacctaccaggagcggtttcgggaactgatgcgtgtggcgttgcgcaacatcgccgacaacgtggtggagtggacggtgtcgttccaagagttcaaggccctgactgggcagcggcgtgtcgtgatccaggaggcccgcgaacgatacgagagcatggtggtcgaggtcttggagggtggtgccagagccggtgagttccgggtcctggaccccctggtcacaaagggtattctcggtctctacaactactcgtactcgtggatccgtccagacggtgatcggactccagaggagatcgcggacctgttcagcgactcgttgctggagggagtgctcgagcgggacctctga

SEQ ID NO: 88777 - protein, 206 aa, Rhodococcus sp. RHA1
MSDVKLGSSTRRTTRIGVESRQRIMDAAAKLFAENGYHGTGVEEISKETQLGKGALYHHIGNKEAVLFEICHTRMADLLTQSGRVLAMDSTYQERFRELMRVALRNIADNVVEWTVSFQEFKALTGQRRVVIQEARERYESMVVEVLEGGARAGEFRVLDPLVTKGILGLYNYSYSWIRPDGDRTPEEIADLFSDSLLEGVLERDL

SEQ ID NO: 88778 - DNA, 594 bp, Sphingomonas sp. KA1
  CDS (1)..(594): transl_table=11
atgcgtgtgaaaaccgacgagcggcgtcaggccattctcgacgccgccgcgcagatatttcgtgaggtcggctatgagcgggcgagcatggccgcgatctcgacaaggctcggcggctccaaaacgacgctctataattattttgaatcgaaggaagagttgttcgccgccgccatgatcggcgcgatggaagagcagagcgacgaaatgctcgaactgctcgaaaccgacgatcgggacgtcgcagccgtgttgaggcgttttggccttgcctatgtgaggttcgtgacatcgcccggggccttgtcgatcacgcgaaccgccatcgccgatggcgccagcagcggccttggcccggcgctttatgaggccggggcaaagcagggatgggaggagatcggcatctatctcagtcgctttgttgcgagcggcgcgcttcgagatgcggatcccgcgattctgtccgcgcatctcaaggcgctgctcgaggccggccttgtcgaaccccgtctgtacggcgccgctgcgcggttcgccgatgaagctgcggtggatgctgcgatcaacacgttcatgcgtgctttcggagtgtag

SEQ ID NO: 88779 - protein, 197 aa, Sphingomonas sp. KA1
MRVKTDERRQAILDAAAQIFREVGYERASMAAISTRLGGSKTTLYNYFESKEELFAAAMIGAMEEQSDEMLELLETDDRDVAAVLRRFGLAYVRFVTSPGALSITRTAIADGASSGLGPALYEAGAKQGWEEIGIYLSRFVASGALRDADPAILSAHLKALLEAGLVEPRLYGAAARFADEAAVDAAINTFMRAFGV

SEQ ID NO: 88780 - DNA, 678 bp, Rhizobium leguminosarum bv. viciae 3841
  CDS (1)..(678): transl_table=11
atgaacgacagcggggggaatggggaaaagaaaaggtctcggcgcccatctgccgaacggacggcccaacgcgatccggagcggacacgcgctgctatccttgacgcggcaacccgggaatttgccgaaaacggcatgggcggggctcgtgtcgacgccatcgccgagcgcgccggcaccaacaagcgcatgctctatcattatttcggcgacaaggagcagctctacctcagagtgctcgaagaggcctatgtcggcatccgcaccgccgagcgcgcgctgcatatcggcgaccgcagccccgaggaaggcatcagcgaactggcgctcttcacctggcgttattttctccagcatccggaattcctcagcctgctcggcacggaaaatctgcatcgggcccgctggctgcgccagtccgtccggctcaaggaactgcactcgcatctgatcggcgagctttcggacgtgctcgagcagggaaagaaacagggggtcttcatcgagactgccgatcccctgcatgtctacctgacgatcgcctcgctcggttatttctacctgtccaatcaatacacgctttcgacgatcttcggccgcgacctgatggagccgacccatctcaatgcctgggaaaggcatatcgtccacgtcacgctcgcctcgatcaagcgctga

SEQ ID NO: 88781 - protein, 225 aa, Rhizobium leguminosarum bv. viciae 3841
MNDSGGNGEKKRSRRPSAERTAQRDPERTRAAILDAATREFAENGMGGARVDAIAERAGTNKRMLYHYFGDKEQLYLRVLEEAYVGIRTAERALHIGDRSPEEGISELALFTWRYFLQHPEFLSLLGTENLHRARWLRQSVRLKELHSHLIGELSDVLEQGKKQGVFIETADPLHVYLTIASLGYFYLSNQYTLSTIFGRDLMEPTHLNAWERHIVHVTLASIKR

SEQ ID NO: 88782 - DNA, 603 bp, Rhizobium leguminosarum bv. viciae 3841
  CDS (1)..(603): transl_table=11
atggtaagaaggccaagacgcaaggccgaggaaacgcgggaagacattctttccatggcggagatgctgtttcgcgagcgcggcttcgtcgcggtgtcgatcgccgatatcgccggcgcgctccacatgtcgcccgctaatgtcttcaagcatttccgttccaaggtggcgctcgtcgatgcgatcgccggacgccatctcgatgatgccgccgagcgcttcgccgccttcgatgaaaagctgccgccaaaggaacaactgctgcgcttcatcctgcgcctgctggaaagccacctgcaggacatccagaagaacccttatatcttcgaaatggtgctttcgacgatcgaggccaaactcgaggccggcaatcgctatcgcgcccgcatcgaggcgaagctcggcgagatcatccgtgaaggcatggcggagggaagttatcattgccgcgatcccgagagcgcggcgcgtaccgttgcagacgtcctggcctgcgtgctgcaccctgtcctgatcgctcgcgacgacaaggagacccttgtgcaccgcgccgaaaaaatcgtgtgtttcgtcgatgccgcactgcaaaatagcgcttgctaa

SEQ ID NO: 88783 - protein, 200 aa, Rhizobium leguminosarum bv. viciae 3841
MVRRPRRKAEETREDILSMAEMLFRERGFVAVSIADIAGALHMSPANVFKHFRSKVALVDAIAGRHLDDAAERFAAFDEKLPPKEQLLRFILRLLESHLQDIQKNPYIFEMVLSTIEAKLEAGNRYRARIEAKLGEIIREGMAEGSYHCRDPESAARTVADVLACVLHPVLIARDDKETLVHRAEKIVCFVDAALQNSAC

SEQ ID NO: 88784 - DNA, 681 bp, Rhizobium leguminosarum bv. viciae 3841
  CDS (1)..(681): transl_table=11
atgacgctgaaacccgaccacgccgccgtattcagtcctcccgctgccggaggccgatttgccgcaggcgaagatccggccaagcgccagcagatcctcgccggcgccaagcgcgtcttcatgaagatggggttcgacgccgccagcatgaacgacgtgacccgcgaggccggagtctccaagggaacgctctacgtctatttcaccaacaaggaagaactgttttcggcgatgatcgagaccgagcgcgccgccttcgtggcggccgtgcgcacggcgcttgccgaacatgacgatcccgaagccggcctgtacgaattcgggataagcttcgtcacccatatgaccgatgaaaaggtcatcagcgcgatgcgcaccgttctcggcgttcgcgaccgcatgccggtgctctgtcaacgcttcttcaagggtccggaaaatctgcgcaccatcatgcgcgacttcctggaacgctacatcgccgaaggcaggtttgagatcgacgacatcgatctggccgccggccagttcctcgatctcgccagcggtagtttcttcaagctccgcctgttcggaagcatggaagaaccgccgtcgcgcgatgaaatcgagcgcgtcatccgcggcgcgatccgggtcttcatggccgcctacggcgcgcgccggcacgagaccgcctga

SEQ ID NO: 88785 - protein, 226 aa, Rhizobium leguminosarum bv. viciae 3841
MTLKPDHAAVFSPPAAGGRFAAGEDPAKRQQILAGAKRVFMKMGFDAASMNDVTREAGVSKGTLYVYFTNKEELFSAMIETERAAFVAAVRTALAEHDDPEAGLYEFGISFVTHMTDEKVISAMRTVLGVRDRMPVLCQRFFKGPENLRTIMRDFLERYIAEGRFEIDDIDLAAGQFLDLASGSFFKLRLFGSMEEPPSRDEIERVIRGAIRVFMAAYGARRHETA

SEQ ID NO: 88786 - DNA, 597 bp, Pseudomonas aeruginosa UCBPP-PA14
  CDS (1)..(597): transl_table=11
atgctggagctggtggctaccggacagctcaccgatccggaaagcgcccgcggcaagctgctgcagactgccgcccacctgttccgcagcaaaggctacgaacgcaccacggtgcgcgacctggccagcgcggtgggcatccagtcgggcagcatcttccatcacttcaagagcaaggacgagatcctgcgctcggtgatggaagagaccatcctctacaacaccgccctgatgcgcgccgccctggccgacgccgaggacctgcgcgagcgggtgctgggactgatccgctgcgagctgcaatcgatcatgggcggcaccggcgaggcgatggcggtgctggtctacgagtggcgctcgctgtccgccgaaggccaggcgtacatcctcggcctgcgcgacatctacgagcagatgtggctcgacgtgctgggggaggcgcggctggccggctactgccagggcgatccgttcatcctgcggcgcttcctcaccggcgcgctgtcctggaccaccacctggttccgtccggaaggaccgatgagtctcgaccagctcgccgaggaggccctggcgctggtgatcaagaacgcctga

SEQ ID NO: 88787 - protein, 198 aa, Pseudomonas aeruginosa UCBPP-PA14
MLELVATGQLTDPESARGKLLQTAAHLFRSKGYERTTVRDLASAVGIQSGSIFHHFKSKDEILRSVMEETILYNTALMRAALADAEDLRERVLGLIRCELQSIMGGTGEAMAVLVYEWRSLSAEGQAYILGLRDIYEQMWLDVLGEARLAGYCQGDPFILRRFLTGALSWTTTWFRPEGPMSLDQLAEEALALVIKNA

SEQ ID NO: 88788 - DNA, 618 bp, Pseudomonas aeruginosa UCBPP-PA14
  CDS (1)..(618): transl_table=11
atgaacaagaccccctcccccaaagttgcagcacgtggtccggtggatcacgaggtgcgtgatcagatcgtggcagcggcgaccgagcacttccgcctgtatggctacgagaagaccacggtttccgacctggccaaggccatcggtttttccaaggcctatatctacaagttcttcgagtccaagcaggccatcggcgagatgatctgctcgagctgcctgcagcagatacagaccgaggtgaatgctgccatccatgaggtggacagcccgccggagaagctgaggcgcatgctcaaggtgctgatggaagcctgcctgcggctgttcttccaggatcgcaaactctacgaaatcgccgcctccgccgcctccgggcgctggccggcaaccctgctctacgaaggcttcatcgagcagacccttcgcgagatcctgcagcagggccggcagagcggcgacttcgagcgcaagacgcctctggatgaaaccacccgcgcgatccacctgatcatgcgcccctatttcaacccgctgctgctccagtacgggctcgaaaccaccgatgaagcgccggccctgctgtccagcctggtgttgcgcagtctgtcaccctga

SEQ ID NO: 88789 - protein, 205 aa, Pseudomonas aeruginosa UCBPP-PA14
MNKTPSPKVAARGPVDHEVRDQIVAAATEHFRLYGYEKTTVSDLAKAIGFSKAYIYKFFESKQAIGEMICSSCLQQIQTEVNAAIHEVDSPPEKLRRMLKVLMEACLRLFFQDRKLYEIAASAASGRWPATLLYEGFIEQTLREILQQGRQSGDFERKTPLDETTRAIHLIMRPYFNPLLLQYGLETTDEAPALLSSLVLRSLSP

SEQ ID NO: 88790 - DNA, 639 bp, Solibacter usitatus Ellin6076
  CDS (1)..(639): transl_table=11
atgaagactcgcatgaaaagcgaagcgcgtcgcgccgccatcgttcgctcggcgatccatctcttcgcggagaagggatttcgcgggacgacgacgcgcgaactcgcggccgcggccggcatcaccgaaccggtcttgtaccagcatttccgcgcgaagagcgacctctattctgcgatcatcgaagccaaagccgccgaggtctcgggcaatgccgtcgcgcttgatatgctggcgaaagctgacgatgaccgcgccttttttcaggccctcggcgtcctcatgctgcgccgctatcaggaggatccggaattgagccggctgctgttcttcagttcgctcgagcggcacgagctggccgaactctttttcgaacgcctgtattccggcttctacaaacgtgtgagcgggtatatccgccgccgcgttcggcagggagccttccgcaaggtcgatgccgaagtcgcggcacgcggattgatcggcatggtctcctatcacgggctcgtcactctcctgtttccgggccggttttcgatcgctaatccgcggcgcatcgcggagcagatggtggacgtgtttctcgatgggatcgcgctaccgtccggaggaaccaaagccgcccgctccgcgcgttga

SEQ ID NO: 88791 - protein, 212 aa, Solibacter usitatus Ellin6076
MKTRMKSEARRAAIVRSAIHLFAEKGFRGTTTRELAAAAGITEPVLYQHFRAKSDLYSAIIEAKAAEVSGNAVALDMLAKADDDRAFFQALGVLMLRRYQEDPELSRLLFFSSLERHELAELFFERLYSGFYKRVSGYIRRRVRQGAFRKVDAEVAARGLIGMVSYHGLVTLLFPGRFSIANPRRIAEQMVDVFLDGIALPSGGTKAARSAR

SEQ ID NO: 88792 - DNA, 666 bp, Solibacter usitatus Ellin6076
  CDS (1)..(666): transl_table=11
atgtctaaagacgcctccgtaacgccgtctccccgcaaggtcttcgctagcaggcgacgggatccagctaccaagcgcgaggcggtgttgaaaaccgcggcacagcttttcctggaaaagagctttgggcggacgtcgatgaacgatgtcgccgaccggttaaatatcaccaagcccgcgctctaccactatttcgacaacaaggaagacattttgctggcctgttaccggctgggcgtcggcctcattgaggaaacgctcaacgagatcgccgatcactgtgggaacggactccagaaggtagaggcatttatccagtcctacgcgatcgtaatgacggtcaacttcggccgctgcgtgatgcggctggatgaaggcgacctgaccgccgaagcgcgggcagaggtgaggacgtacaagcggaagatcgatcgccggctgcggagctttctacaggaaggaatcgacgatggctccgtcgcgccatgcgatacgaagatcgcggcatttgccatcgcgggggcattgaactggatctgcatgtggtacgagcccgatggggccctgtcgccggaagagattgcggcgcagttcgcacgtactttgacgcagggtctggcggctaaagggcaattcccaaagaggagcaattcggatgagcgttga

SEQ ID NO: 88793 - protein, 221 aa, Solibacter usitatus Ellin6076
MSKDASVTPSPRKVFASRRRDPATKREAVLKTAAQLFLEKSFGRTSMNDVADRLNITKPALYHYFDNKEDILLACYRLGVGLIEETLNEIADHCGNGLQKVEAFIQSYAIVMTVNFGRCVMRLDEGDLTAEARAEVRTYKRKIDRRLRSFLQEGIDDGSVAPCDTKIAAFAIAGALNWICMWYEPDGALSPEEIAAQFARTLTQGLAAKGQFPKRSNSDER

SEQ ID NO: 88794 - DNA, 600 bp, Mycobacterium avium 104
  CDS (1)..(600): transl_table=11
gtgaccggtccggccaacagccggcgagacgagttgctggagctggccgcggccatgttcgccgagcgcggattgcgtgccaccacggtgcgcgacatcgccgacagcgccgggatcctgtccggcagcctgtatcaccacttctcctccaaggaggagatggtcgacgaggtgctgcgcagcttcctggactggttgttcgcccgctatcgcgaaatcatcgacagcgagagtaacccgctggagcggctcaagggcctgttcatggcgtcgttcgaggcgatcgagcaccggcacgcgcaggtcgtcatctatcaggacgaggccaaacggctgctgtcgcagccgcggttctcctacatcgaggacatgaaccgccagcaacgcaagatgtggctcgaggtactcaaccagggcgtcgacgagggctacttccggcccgacctcgacgtcgacctcgtctaccgattcatccgggacaccacctgggtgtcggtgcgctggtatcagcccggcggaccgctcaccgccgagcaagtgggtcagcagtacctcgccatcgtgttgggcgggatcacggtggacgcgaagaaagactaa

SEQ ID NO: 88795 - protein, 199 aa, Mycobacterium avium 104
MTGPANSRRDELLELAAAMFAERGLRATTVRDIADSAGILSGSLYHHFSSKEEMVDEVLRSFLDWLFARYREIIDSESNPLERLKGLFMASFEAIEHRHAQVVIYQDEAKRLLSQPRFSYIEDMNRQQRKMWLEVLNQGVDEGYFRPDLDVDLVYRFIRDTTWVSVRWYQPGGPLTAEQVGQQYLAIVLGGITVDAKKD

SEQ ID NO: 88796 - DNA, 660 bp, Mycobacterium smegmatis str. MC2 155
  CDS (1)..(660): transl_table=11
atgacttccgccgccaacaacggaacttcccgccgcgaagaactgctgaacgtcgcggcgaaactgttcgcagcccgcggctaccacggcacccggatggacgacgtggctgaagcggtcggcctgaacaaggccaccgtgtaccactactacgcgagcaaatcgctcatcctctacgacatctacaagagcgccgccgacttcacggtcgaggccctgcacgacgatccgacctcgtcagcgcgcgagaccatctaccacttcacccggcgcctgatggtggggatcgccaacgacctggagcgtgccgccgtgtacttccaggagggcccctacatcgccgagtggttcaccgaggagcaggtcgagtacatccggcactccgaggcgcaggtctacgagcatgtgcgcgacgtgatcgaccgggggatcgcaagcggcgagttctacgactgcgactcgcacgtgctcgcgctgggctacatcgggatggtgctcggcgcctaccgctggctgcgcccgcacggccgtcgcaccgccaaggagatcgcggtggagttcagcaccgcactgctgcgcgggctgatccgcgacgagaacatccgggtcgagtccccgttgggcatcgacgtgcaggccggcagcgaagagcagcgatga

SEQ ID NO: 88797 - protein, 219 aa, Mycobacterium smegmatis str. MC2 155
MTSAANNGTSRREELLNVAAKLFAARGYHGTRMDDVAEAVGLNKATVYHYYASKSLILYDIYKSAADFTVEALHDDPTSSARETIYHFTRRLMVGIANDLERAAVYFQEGPYIAEWFTEEQVEYIRHSEAQVYEHVRDVIDRGIASGEFYDCDSHVLALGYIGMVLGAYRWLRPHGRRTAKEIAVEFSTALLRGLIRDENIRVESPLGIDVQAGSEEQR

SEQ ID NO: 88798 - DNA, 591 bp, Mycobacterium smegmatis str. MC2 155
  CDS (1)..(591): transl_table=11
gtgagcaagaagttcgagtcgaaccgggatgagattctgcgcatttcggccgagttgttcgcgaagtcgggctaccacggaaccggtatctccgacctgggggccgcggtcggactcggccgcggcgccctgtaccactacatcggcagcaaagagacgattctctacgagatcagcagcaggcagttggcacagatgaacaacctggccgacgagcttgcgttgacggagaaggatccggagaaacggcttcgggggctggcgcgcgcgctgctgcgcaacatcgccgagcaccgtgccgagtggacggtgttcttccgcgagtaccacgcgctgaccggcgagcggcgtgaccgcgtcatcgccgcccgcgagcgctacgaggcgcactggcgcaacgccctggaccagggcgtccgggacggccagttccggccgttgccgacgctcatggtcaagggcctgctcggtatgttcaactacagctatctgtggctgaccttggacggccccgaaagccccgaggacatcgccgacgagttcctcgacacggtgctcgtcggcatgaacgcagatggtctgcgcagctag

SEQ ID NO: 88799 - protein, 196 aa, Mycobacterium smegmatis str. MC2 155
MSKKFESNRDEILRISAELFAKSGYHGTGISDLGAAVGLGRGALYHYIGSKETILYEISSRQLAQMNNLADELALTEKDPEKRLRGLARALLRNIAEHRAEWTVFFREYHALTGERRDRVIAARERYEAHWRNALDQGVRDGQFRPLPTLMVKGLLGMFNYSYLWLTLDGPESPEDIADEFLDTVLVGMNADGLRS

SEQ ID NO: 88800 - DNA, 678 bp, Mycobacterium smegmatis str. MC2 155
  CDS (1)..(678): transl_table=11
gtgaagtacaccccgggatggcagcccacaccggtggactgggcgtcgacgcggggcaggatactgctggccgcgtcgcaattgttcgctgctcgtgggtatttcggcacctcgacacgcgacatcgccgatgcggtctcgattcgccagccctcgctcttccaccacttcaccgccaagcaggagatcttccgcacgctggtggagctggatctcggtccgtcgatcgaccgggtgcgccaacgcctcgccgaagaatcgacgtgggccgagaagctccatctgaccgtggcgtgcgacgttcgcgagatcctcgcgcaaccgttcgacgcccgcggcctgtatcaggacgcggtcctggccatgccggagttcgacgaggagcggcgcggcatcgatctgttccacgacctcgtcgagacgctcatccgatcggggaccgatgccggcgagttcgtcgacttcgaggccagcttcgtcctgcgagcggccaacggcgtgatgttcgagacgctgcgtgagcagggcggcccggccggccgtatgcgggtgcagcggcccctgcaggccgccgatttcgtcctgcgagcggtcatggtggaccccaccgacctgccacggatccgagccgtcaccgagaatcgcctggtcaagggcgtcctgccggccggtcgttga

SEQ ID NO: 88801 - protein, 225 aa, Mycobacterium smegmatis str. MC2 155
MKYTPGWQPTPVDWASTRGRILLAASQLFAARGYFGTSTRDIADAVSIRQPSLFHHFTAKQEIFRTLVELDLGPSIDRVRQRLAEESTWAEKLHLTVACDVREILAQPFDARGLYQDAVLAMPEFDEERRGIDLFHDLVETLIRSGTDAGEFVDFEASFVLRAANGVMFETLREQGGPAGRMRVQRPLQAADFVLRAVMVDPTDLPRIRAVTENRLVKGVLPAGR

SEQ ID NO: 88802 - DNA, 594 bp, Mycobacterium smegmatis str. MC2 155; identical to SEQ ID NO: 34286
  CDS (1)..(594): transl_table=11

SEQ ID NO: 88803 - protein, 197 aa, Mycobacterium smegmatis str. MC2 155; identical to SEQ ID NO: 34287

SEQ ID NO: 88804 - DNA, 618 bp, Mycobacterium smegmatis str. MC2 155
  CDS (1)..(618): transl_table=11
gtgacgccaccccaggggcaggccgaggctgccagaccctacgagaccctgctcgccaagggcgaagatcgcaggcagcgcatcctttcggtcgccgagaggctgctggcccgcaacgggtggcgcaacacctcactcgctcagatcgccaaggaggccggggtcaccacggccggtctgctgcatcatttcgaatccaaggagcatcttctcaacgcggtgctcgacgcgagggatctcgacgacgatgcacacgccgaccggtccggcgaccttgccgacgagatcaagcgggtggccgaacggttcgtccgggcacccgagttggtcggtacgttcacggtgctgctggtggagaacatccagcccgatgcgccactgcacgatcgtttgctgaaacgtcagcaggatgcgcgcgacatcgtcgcggacatcattcgccgcggccagcgcagcggccgctatcgccctgacttcgacccggtcatcaaggccgtggaaattctcgccttcgtcaacggaatggagacctcatggttactcgatccctcactgccgctgcaggacgtattcaagggatacgccgagatgttggcccgcgagatcgagctgacatga

SEQ ID NO: 88805 - protein, 205 aa, Mycobacterium smegmatis str. MC2 155
MTPPQGQAEAARPYETLLAKGEDRRQRILSVAERLLARNGWRNTSLAQIAKEAGVTTAGLLHHFESKEHLLNAVLDARDLDDDAHADRSGDLADEIKRVAERFVRAPELVGTFTVLLVENIQPDAPLHDRLLKRQQDARDIVADIIRRGQRSGRYRPDFDPVIKAVEILAFVNGMETSWLLDPSLPLQDVFKGYAEMLAREIELT

SEQ ID NO: 88806 - DNA, 633 bp, Mycobacterium smegmatis str. MC2 155
  CDS (1)..(633): transl_table=11
gtgagcgccgaactggaaatcgacgtcaagacccggatcctcgatgcggccgccgacgcgttcatggtccacgggttcgccaacaccaccatcgacgacatcgccgagcaggtcggggccaccaaaggcctgatctactaccacttccggtcgaagttcgacatcttcctggccgtgtacgaggacggtatgcgccgggtccgtgaacgcgtcgaaccgcacgcgggcggagcggggaccgggcgggagcgtctggtggcgatgtcggtcgcgcacctggagaacctgatgaccgaactcgggtaccaccacgtcgtgcatcaaggcgtgcgctaccaggcctcgaccgcgctgaagatccggcagcgcgacgcactcgccgcgctcaacgaactccggcgcgattacgagctgatgttccggcgtgtggtggccgaaggtatcgccgacggttccctacgcgtcgtcgacgaggcacttgccacccgcacactgctgagcaacctcaacgccgtcgacatgtggtaccgcaggatcgaggggcagaccctcgacgagatcaacgaactcgcgaccaacgtggtcgacctgttgatcaccggtatggcgaacccgcagggccgacctcgctga

SEQ ID NO: 88807 - protein, 210 aa, Mycobacterium smegmatis str. MC2 155
MSAELEIDVKTRILDAAADAFMVHGFANTTIDDIAEQVGATKGLIYYHFRSKFDIFLAVYEDGMRRVRERVEPHAGGAGTGRERLVAMSVAHLENLMTELGYHHVVHQGVRYQASTALKIRQRDALAALNELRRDYELMFRRVVAEGIADGSLRVVDEALATRTLLSNLNAVDMWYRRIEGQTLDEINELATNVVDLLITGMANPQGRPR

SEQ ID NO: 88808 - DNA, 618 bp, Mycobacterium smegmatis str. MC2 155
  CDS (1)..(618): transl_table=11
atggcgccggatacgcccagccagccggctagcagacgcgatgagctgctgcagctcgccgccaccatgttcgccgaccgtggcctcaaggccacgacggtccgcgacatcgccgactccgcaggcattctctcgggcagcctgtaccaccatttcaagtccaaagagcagatggtcgaagaggtcctgcgggacttcctggactggctgttcggccgctaccagcagatcctcgacaccgcgaccagcccgctggagaagctgacgggccttttcatggcgtcgttcgaggccatcgagcaccggcatgcgcaggtggtcatctaccaggacgaggccaagcggctctcggacctgccgcagttcgacttcgtcgagacgcgcaacaaagagcagcgcaagatgtgggtcgacatcttgcaggagggcgtcgccgacggctcgttccgtcccgacctcgatgtcgacctggtctaccggttcatccgggacaccacatgggtttcggttcgctggtacaaaccgggcgggcccctttcggccgaacaggtcggccagcagtacctcgccatcgttctcggcggaatcacgcagtcacaaggagataaacatgcctga

SEQ ID NO: 88809 - protein, 205 aa, Mycobacterium smegmatis str. MC2 155
MAPDTPSQPASRRDELLQLAATMFADRGLKATTVRDIADSAGILSGSLYHHFKSKEQMVEEVLRDFLDWLFGRYQQILDTATSPLEKLTGLFMASFEAIEHRHAQVVIYQDEAKRLSDLPQFDFVETRNKEQRKMWVDILQEGVADGSFRPDLDVDLVYRFIRDTTWVSVRWYKPGGPLSAEQVGQQYLAIVLGGITQSQGDKHA

SEQ ID NO: 88810 - DNA, 633 bp, Nocardioides sp. JS614
  CDS (1)..(633): transl_table=11
atgatttcgacgacacggacatccggatcgccgaccccacgcgctaacgctcgcggcgagcgcgccagactgcggctcctcgacgcggccctgtcggccttcgcgacacagggcttccacgggacgagcacacgtgacatcgccgaggccgcggcgatgagtccggccgcggtctacgtccactaccgcaccaaggaggaactgctcttccagctgtcgcttcacggccaccgcgagatccgccgtgtggtggaaacggcattgggccgccccgagccgcctgccgcccgactgcgaggactcgtcgccgactacacggcctggcacgcccgatcgcatgtgcaggcgcgcgtgctgcagtacgagttcgcggcactccttccggagcacgccgagcagatcgccgcgatccgcggtgccatcgaggcgatgttccaaggtgccatcaccgacggcgtggatgcgggcatcttccgcatcgacgacgtcaagatgaccagtctcgcgctcctgtcgctcgggatcgacgtcgcccgctggttccgcccgggcggagctcgctcgccggacgagatcggcaactactacggagagatcgcgctgcgggtctgcggtcaccccggcgatctctga

SEQ ID NO: 88811 - protein, 210 aa, Nocardioides sp. JS614
MISTTRTSGSPTPRANARGERARLRLLDAALSAFATQGFHGTSTRDIAEAAAMSPAAVYVHYRTKEELLFQLSLHGHREIRRVVETALGRPEPPAARLRGLVADYTAWHARSHVQARVLQYEFAALLPEHAEQIAAIRGAIEAMFQGAITDGVDAGIFRIDDVKMTSLALLSLGIDVARWFRPGGARSPDEIGNYYGEIALRVCGHPGDL

SEQ ID NO: 88812 - DNA, 591 bp, Nocardioides sp. JS614
  CDS (1)..(591): transl_table=11
atgagcgacacgaaggacacctcccgcgccgaggcgacccgagcccgcctggccgaggccgcggtggacgcgttcgccgaacgcggctatcacggcaccaccacccgggacatcgccagcgcagcggggatgtcccccgccgcgctctacgtgcaccacaactcgaaggaggagctcctctacctcatctccaaggcaggccatgagcaggcgctgaccgtgctccggcaggccgtcgacgcctccgaggacccggtcgagcagttgcgcgcagtgatgcgtggcttcgtcgaacaccacgttcgcacgcacacgtcggctcggatcgtgaactacgaactcgccgcgctttccccgcagcaccttgccgagatggccggaatacgcagcgagatcgacgcattgttctccgatctggtgaatcgcggcatctccaccggcgcgttccacacgcggtatccgcggatggccacggtggcgctccagtcgctcgggatcgacatcgcacgctggtaccgcgaaggtggctggtcggaggaggagatcgccgacggctacgtggacatcgcgttacgaatcgtcggagcgtga

SEQ ID NO: 88813 - protein, 196 aa, Nocardioides sp. JS614
MSDTKDTSRAEATRARLAEAAVDAFAERGYHGTTTRDIASAAGMSPAALYVHHNSKEELLYLISKAGHEQALTVLRQAVDASEDPVEQLRAVMRGFVEHHVRTHTSARIVNYELAALSPQHLAEMAGIRSEIDALFSDLVNRGISTGAFHTRYPRMATVALQSLGIDIARWYREGGWSEEEIADGYVDIALRIVGA

SEQ ID NO: 88814 - DNA, 609 bp, Nocardioides sp. JS614
  CDS (1)..(609): transl_table=11
atgttggacatgagcgcgtccagccccgttcccgatgcccggacccggctcgcggccgccgccgtggacgcgttcgccgtgcgcggcttccacgggacgaccacgcgcgacatctcgaccagcgccgggatgagcccggccgcgctctacgtccaccaccgctccaaggaggagctgctcttcgagctcgcgcgcgtggggcacctgcgagtgctggagctggtgcgcgcgtcggtggcgccgctgtccgaccccgtggcccagctcggtcagctggtcgaggacttcgtgcgcgaccacgccgaggcgcacaccggggcgcgggtgatcaactacgagctcgccgcgctcagtcccgagcaccatgccgaggtcctcgcgatccgccacgagatcgacctggtgctgcgtgacgtgctcgaccgtggcgtcgccgctggcgtcttcaccacgcccgacccccggatgacggccctcgccatcttgtccctgggcatcgacgtcgcccgctggtaccgcgacgaggggcgctgggcccccgacgaggtcgccgcccactaccgcctgctcgccctccggatggtcggcgccgagtcgccgcgtccctga

SEQ ID NO: 88815 - protein, 202 aa, Nocardioides sp. JS614
MLDMSASSPVPDARTRLAAAAVDAFAVRGFHGTTTRDISTSAGMSPAALYVHHRSKEELLFELARVGHLRVLELVRASVAPLSDPVAQLGQLVEDFVRDHAEAHTGARVINYELAALSPEHHAEVLAIRHEIDLVLRDVLDRGVAAGVFTTPDPRMTALAILSLGIDVARWYRDEGRWAPDEVAAHYRLLALRMVGAESPRP

SEQ ID NO: 88816 - DNA, 645 bp, Azoarcus sp. BH72
  CDS (1)..(645): transl_table=11
atggccaggggcaaatctcccaccttcgaactgcaacgcgaagccatcctgcaggaggcggcgcggctgtttgccgacaagggcttccacaacgcctcgatggccgaactcgccgccgcctgcggcgtctccaagccgctgctgtaccactactaccgcgacaaggaacacatcctgttcgacatcgccgacagctacatggaccggctgctggcgatcgtcgcgggcgtggaggcgcaggatctcgaaccgcagccgcagctggccgagctggtgatgcgcttcatggccgagtatgcccattcgcagagccagcacatggtgctggtgcaggacgtgaagttcctgcaggccgagcagtccgagcaggtggtgggcaagcagcgcaaggtggtggccgcgttcgcggccgcgatcgaagcggtcgaacccggcctgaagaagcgcaagctcgacaagccggtcgcgatgatcctgttcggcatgatcaactggaccttcacctggctgcgcgccgatggccgcctcacctacgccgacatggcgccggtggtcaccgccatcctgctcaacggcgtgaagggcctgctcgcgcagctgccggcgcgcggccgcaagccgccggccgaggccgatgccgcctga

SEQ ID NO: 88817 - protein, 214 aa, Azoarcus sp. BH72
MARGKSPTFELQREAILQEAARLFADKGFHNASMAELAAACGVSKPLLYHYYRDKEHILFDIADSYMDRLLAIVAGVEAQDLEPQPQLAELVMRFMAEYAHSQSQHMVLVQDVKFLQAEQSEQVVGKQRKVVAAFAAAIEAVEPGLKKRKLDKPVAMILFGMINWTFTWLRADGRLTYADMAPVVTAILLNGVKGLLAQLPARGRKPPAEADAA

SEQ ID NO: 88818 - DNA, 678 bp, Azoarcus sp. BH72
  CDS (1)..(678): transl_table=11
atgaaggtaaaggacgggcaggtggggagcggcggcgcgcagcggccgcgggtgcgtcgcaaggaggcccggccgcaggaattgcttgccgccgccctggcgctgtttgtcgagaaggggtacgccgccacgcgtctggaggaggtcgccgcgcgcgcgggggtgtccaagggcacgctctatctgtacttcgacagcaaggaagcgctgttcaaggcagtcatccgtgaaggcgtggtgcccgcgatcgacgcgggcgaagcgatgctgggaaccttcgccgacgacccggttgcgctgctgcgcgccttcctgcatgcgtggtgggagcgtatcggcagcaccgagctgggcggcctgcccaagctcatgatgtccgaggcgggcaatttcccggacgtggcggcctactacaacgaagcggtcatccagcgcgggctcgggctgctgcgcaccgcggtcaggcgcggcatcgatgccggcgtcttccgcgcggtcgatctcgatctggtcggcacgctgctgatcgcgccgctggtgcacctgtcgatgtggcgccattccttcgccacctgctgcgccaccgacatcgaaccgcgcgcctatgtcgacgcgcatatcgacctggtcctccacgggctgcgcaacgaccccgtgcccgccggagttgcccgatga

SEQ ID NO: 88819 - protein, 225 aa, Azoarcus sp. BH72
MKVKDGQVGSGGAQRPRVRRKEARPQELLAAALALFVEKGYAATRLEEVAARAGVSKGTLYLYFDSKEALFKAVIREGVVPAIDAGEAMLGTFADDPVALLRAFLHAWWERIGSTELGGLPKLMMSEAGNFPDVAAYYNEAVIQRGLGLLRTAVRRGIDAGVFRAVDLDLVGTLLIAPLVHLSMWRHSFATCCATDIEPRAYVDAHIDLVLHGLRNDPVPAGVAR

SEQ ID NO: 88820 - DNA, 639 bp, Magnetospirillum magnetotacticum MS-1
  CDS (1)..(639): transl_table=11
atgccagccgccacggcccacctcatcccgcccccagaagaggccgcaccgaccacccgggaccggatcctggaggaggcggcgcgctcctttcgcgagatcggctaccagaagaccacggtcgccgacatcgcccgcacgctgaagatgagcccggccaacgtctaccgcttcttcgaatcgaagaaggcgatcaacgaggcggtggtcgagcggctcacgggagagatcgaggcgatgatcgcggcgatcgccgacacgccgaagctcggtgcgccggagcggttgtcccggatcgtcacggcgctccacgacgacagccgccgccggttcgaggcgcatccgcgcgtccacgagatggtcgaggcggcgatgagcgagagctgggccgtctgtcaggcccatgtcgaccgcatcggcgcggtgctcgcgcgggtggtggccgacggggtgcgcgagggcgccttcgcggtgaccgacccgaagagcgcggcctcctgcatccacgccgcgatcacccgctactgccatccggtcctggtgaaccgccagcccgaccgcgtcgagccgccgctgccggtgatgatcgccttcctgctcggggcgctgaggcagcccccccgggacgccgagcggtag

SEQ ID NO: 88821 - protein, 212 aa, Magnetospirillum magnetotacticum MS-1
MPAATAHLIPPPEEAAPTTRDRILEEAARSFREIGYQKTTVADIARTLKMSPANVYRFFESKKAINEAVVERLTGEIEAMIAAIADTPKLGAPERLSRIVTALHDDSRRRFEAHPRVHEMVEAAMSESWAVCQAHVDRIGAVLARVVADGVREGAFAVTDPKSAASCIHAAITRYCHPVLVNRQPDRVEPPLPVMIAFLLGALRQPPRDAER

SEQ ID NO: 88822 - DNA, 621 bp, Magnetospirillum magnetotacticum MS-1
  CDS (1)..(621): transl_table=11
atggcgcggacgcggtcgcaggattacgagtccatcaagatcaccatcttggaccgggcggccgagttgttcgcgcgcaagggtttcgccgatacctccatcgtggagatctccgaagccagcgggttgtcgaagtcgggcatctatcactacttcaaatcaaagaacgacgtcttgaacaccctggtgtccgagcatgtggagaaggtcttcgacgtggtgggcgccgcgttgcagacctccctggacccggtcaagcagttcgaggccctgaccgccatgctgttggagacctacagccattccaagcaccggcacgcggtgatgatgaacgatctggacagcctgaaggagcgcgagcgcgagcgggtggtcgatctggagcgccgggtcgtgaagttcaccgaaggggtgatcgagagggtcaatcccggcctgctggccgatcccgccttccgccgtccggcggtgatgctgtttttcggtatgatcaactggacctatacgtggttcgacgccaatcggggaatgaatccccggcaattggccgcaatggcgtccggtattttcctgaacggccttctggccaccagactcgaggatatcaacgacgataactga

SEQ ID NO: 88823 - protein, 206 aa, Magnetospirillum magnetotacticum MS-1
MARTRSQDYESIKITILDRAAELFARKGFADTSIVEISEASGLSKSGIYHYFKSKNDVLNTLVSEHVEKVFDVVGAALQTSLDPVKQFEALTAMLLETYSHSKHRHAVMMNDLDSLKERERERVVDLERRVVKFTEGVIERVNPGLLADPAFRRPAVMLFFGMINWTYTWFDANRGMNPRQLAAMASGIFLNGLLATRLEDINDDN

SEQ ID NO: 88824 - DNA, 573 bp, Magnetospirillum magnetotacticum MS-1
  CDS (1)..(573): transl_table=11
atggaggcgatccgcaaggcgggcctcaaactgatctacgagcacggctatgaggccatgagcctgcgccagttggccgccgaggtcgggattcaggtgggctcgctctacaatcacatcagcaccaaggaagatctgctcttcgatctgatccgcgcccatatggacgaactgttcttgcagttcgacgccgccatggccttggtggaggggcaaggcgcggaagagcgtctgcgcgctttcgtggccttccacgtcacctatcacatcgtacgcaagcgcgaagtgttcatcggggcctctgaactgcgctcgctcgagcccaatcattacgaagagatcgtcaccctgcggcgccgttacgaacgccgcctggttgaaatcctcgaccagggcgaggcggcggggctgttccgctgtggcgacgcccatgtggctgcctatggcatcctcagcatgctgaccggcgtctgcacctggttcaggccccatggacggctgagcaaggaacaggtcatcgccatttattccgatcaggtcctgggcgggttgatggggccccgtgggtactga

SEQ ID NO: 88825 - protein, 190 aa, Magnetospirillum magnetotacticum MS-1
MEAIRKAGLKLIYEHGYEAMSLRQLAAEVGIQVGSLYNHISTKEDLLFDLIRAHMDELFLQFDAAMALVEGQGAEERLRAFVAFHVTYHIVRKREVFIGASELRSLEPNHYEEIVTLRRRYERRLVEILDQGEAAGLFRCGDAHVAAYGILSMLTGVCTWFRPHGRLSKEQVIAIYSDQVLGGLMGPRGY

SEQ ID NO: 88826 - DNA, 615 bp, Nostoc punctiforme PCC 73102
  CDS (1)..(615): transl_table=11
atgcgagtttttaattcttccccaccctcagaggctcagacgcgcacccgaattttacaggcagcacaacggttgttcgcctctcaaggatttgatggcactaccacccgtgatttagcgcaggcggcaggtgtagctgaaggcactttatttcgtcattttcccaataaaaaagcaattttagtagaagtagccacgagtggctgggtagaaattttaacagatttgctaacagaattaagtgaaatgggcagctataaagctgtagctcaagtgatgcgtcgccggatgtggaactttcaaaaaaatgccgatttgatgcgcgtttgttttatggaggtgcaatttcatcctgatttgcgcgatcgcattcaattagaagtcattactaaaatgaccgatgtcggcgaagcattcttccaaacagcaatggataaaggcatttatcgcaaaatggacgcaaagctagttgcgaaagttttcttgggaatgtttgcgatcgcaggtttttctaacaacaccctcatcgaacctgacgcttccccccaacaaatgcaggaaatggctgaaggactcgctgatatcttccttaatggtgttttagctaaggattag

SEQ ID NO: 88827 - protein, 204 aa, Nostoc punctiforme PCC 73102
MRVFNSSPPSEAQTRTRILQAAQRLFASQGFDGTTTRDLAQAAGVAEGTLFRHFPNKKAILVEVATSGWVEILTDLLTELSEMGSYKAVAQVMRRRMWNFQKNADLMRVCFMEVQFHPDLRDRIQLEVITKMTDVGEAFFQTAMDKGIYRKMDAKLVAKVFLGMFAIAGFSNNTLIEPDASPQQMQEMAEGLADIFLNGVLAKD

SEQ ID NO: 88828 - DNA, 573 bp, Croceibacter atlanticus HTCC2559
  CDS (1)..(573): transl_table=11
atgaaagtattaaatcgtaaatctgaaattcttaaagtagctaaagaccttatcacagagaaaggctacaatgctgtatctatgcgagatttggcaaaggctttagatataaaggcagctagcctatacaaccatattgcaaataagcaggaaatactttctacaattatacttgagattgctgaagcctttactgttggtatgactcaaatttttaatgaagagaccacttcaataaataaattacaggatttaataggtcttcatattgatattagcataaacaattcgggcgcaatggcaatgatgcataacgactggaaacatcttgaagcagatgagttaatacgttttgtaaccttaagaaatgcctatgaaaataatttcagaactataattaaacaaggtattaaccaaggagaaataataaataaaaacccagaagttattgtgttttctatgctttctacacttcagactatgtatttatggtatgaaaaacgtggtaaaatggatgtaaatatccttaaaacagacatggtttctgtgcttttagatggtataagaacttaa

SEQ ID NO: 88829 - protein, 190 aa, Croceibacter atlanticus HTCC2559
MKVLNRKSEILKVAKDLITEKGYNAVSMRDLAKALDIKAASLYNHIANKQEILSTIILEIAEAFTVGMTQIFNEETTSINKLQDLIGLHIDISINNSGAMAMMHNDWKHLEADELIRFVTLRNAYENNFRTIIKQGINQGEIINKNPEVIVFSMLSTLQTMYLWYEKRGKMDVNILKTDMVSVLLDGIRT

SEQ ID NO: 88830 - DNA, 588 bp, Sulfitobacter sp. EE-36
  CDS (1)..(588): transl_table=11
atggcgcgtacaaccggatcacattctgacatcactcggcccaaaatccgcgcggcagcgttgcggcttttcgcccgtcacggctttgctgccgtgtccatgcgggcactggcgacggaggtcggggtgcaggcgggcgcattgtataattacacgccggacaagcagacgctgttgttcagcctgttgcaggaccatatgaacgacctgcttgcggcctgtgacagggaccccagtcaaagcgcggtggatcgcttgcgcaaatttgtcgattttcacatccgctttcacgccgaccgcccggacgaggttttcatctcttatatggagctgcgcaacctcacgcccgagaatttcgccgaggtcgaagcattgcgccgccagtatgaagaccggctagagacgatcttgcgagacggggcagcggcgggggatttcgccatcgcggataccaagatcgcgaccttggcggtgattgcgatgctgacaggggtgaatacgtggtttcgcgccggcggacggctgtcgctggacgaggtgatcgcgcaatattgggatatggtgcgcaagtccgtcacggcggggtag

SEQ ID NO: 88831 - protein, 195 aa, Sulfitobacter sp. EE-36
MARTTGSHSDITRPKIRAAALRLFARHGFAAVSMRALATEVGVQAGALYNYTPDKQTLLFSLLQDHMNDLLAACDRDPSQSAVDRLRKFVDFHIRFHADRPDEVFISYMELRNLTPENFAEVEALRRQYEDRLETILRDGAAAGDFAIADTKIATLAVIAMLTGVNTWFRAGGRLSLDEVIAQYWDMVRKSVTAG

SEQ ID NO: 88832 - DNA, 657 bp, Sulfitobacter sp. EE-36
  CDS (1)..(657): transl_table=11
atggacgaacacatcgatgacgacacgctgacggacgccaccgaggggggcgcgcccaagcacgacagccgccgcgagatcatcgaggcggcggcgcagtgttttatgctcaaggggctcgacaaggcgacgatggacgatatcgccgatgttctgggcgcgaccaaggggcgggtgtaccaccatttccggtccaagaacgcgatctatttcgcggtgtaccgacaggcgatgcaatattgttttgacgcggttaccccgctgatatcattggatacttccaacatcagcaagcttgaattgatggcccatgcccatgcgcgggtgatgatggacacgctgccctatcagcgcagtatccgcttgggcgttgaggtctatttgcgcggctccaccaccgaagccgagcgcgctgtgctgcgcgagctgattaccctgcgcaacgactatgaaaatctctaccgcgaggtgctgcgcgcgggtgtggcgcagggggagctggacgtgccgaacatcgaaatcgccagccgtgcgttgatgggggcattgaacgggctggttgactggtaccgtatccgtcccgatcaatccgagggggagcgcgacgcgctggcccgtgccttggcgcatgccgtggtgcatggcaccacggcataa

SEQ ID NO: 88833 - protein, 218 aa, Sulfitobacter sp. EE-36
MDEHIDDDTLTDATEGGAPKHDSRREIIEAAAQCFMLKGLDKATMDDIADVLGATKGRVYHHFRSKNAIYFAVYRQAMQYCFDAVTPLISLDTSNISKLELMAHAHARVMMDTLPYQRSIRLGVEVYLRGSTTEAERAVLRELITLRNDYENLYREVLRAGVAQGELDVPNIEIASRALMGALNGLVDWYRIRPDQSEGERDALARALAHAVVHGTTA

SEQ ID NO: 88834 - DNA, 543 bp, Roseovarius nubinhibens ISM
  CDS (1)..(543): transl_table=11
gtgcgagaggcagcgcggcgtctgattgcgcggcatggctttgccgccgtgtcgatgcgcaagatcgccgccgaagtcggtgtgcaggccggcgcgctctacaattacatcccggacaagcaaacgcttctgttcgagattatgcaggcgcatatggaggaattgttaacggcgcgcgccgaactggacgcgcccgccgatccggtgcaggcgctcgagcaattcacccggtttcacatccgctttcactcgaaccggcccgacgaggtgttcatcgcctatatggagctgcgcaatctcacgcccgagaatttcgcagccatcgaagcgatgcgccgcacctatgaggatcagctcaccgagattctcgtcgcgggcgtggcggcggggcattttcggctggccgagcctcgggtgacgaccatggcgctcatcgcgatgctgaccggggtcaacacatggttccgcgaagagggccggctcagcctcgatgaggtggaggggatttatctcgacatggtgcgccggacggtcgccgcctga

SEQ ID NO: 88835 - protein, 180 aa, Roseovarius nubinhibens ISM
MREAARRLIARHGFAAVSMRKIAAEVGVQAGALYNYIPDKQTLLFEIMQAHMEELLTARAELDAPADPVQALEQFTRFHIRFHSNRPDEVFIAYMELRNLTPENFAAIEAMRRTYEDQLTEILVAGVAAGHFRLAEPRVTTMALIAMLTGVNTWFREEGRLSLDEVEGIYLDMVRRTVAA

SEQ ID NO: 88836 - DNA, 588 bp, Oceanicola batsensis HTCC2597
  CDS (1)..(588): transl_table=11
atggctcgtaccgccggttcccattccgccgacaccgccccgcgcattcgcgcggcggcacaacgcctgttcgcgcagcacggttatgccgccgtctcgatgcggcagatcgcggccgaggtcggggtccaggtcggtgcgctctacaattacacctccgacaagcagagcctgctgttcgatctgatggtcgtccatctcgaggatctgctggacgcgctgccggaaccggataccgcggcggggccgatgcaggcgctggacgagttcgtccgctttcacatccgattccacgccgcgcggcccgaagaagtcttcatcgcttatatggaactgcgcaacctgagcccggaaaacttcgccgcggtggaaagcctgcgccgcctgtacgaggaccggctgaccgcgatcctggatgccgggcaggcgcggggcgtgttccgggtcgccgacacccgtgtcgccaccatggccatcatcgccatgctgaccggggtgaacacgtggttccgggaaacgggacggctgagcctgagcgaggtcgaggcgatctacggcgacatgacccgccgtctcgtggcggggtga

SEQ ID NO: 88837 - protein, 195 aa, Oceanicola batsensis HTCC2597
MARTAGSHSADTAPRIRAAAQRLFAQHGYAAVSMRQIAAEVGVQVGALYNYTSDKQSLLFDLMVVHLEDLLDALPEPDTAAGPMQALDEFVRFHIRFHAARPEEVFIAYMELRNLSPENFAAVESLRRLYEDRLTAILDAGQARGVFRVADTRVATMAIIAMLTGVNTWFRETGRLSLSEVEAIYGDMTRRLVAG

SEQ ID NO: 88838 - DNA, 636 bp, Oceanobacter sp. RED65
  CDS (1)..(636): transl_table=11
atgaatttagacgcactcgatactgttgatacccgcgaccccgtccttaaagacttaatccataaaggccaagtcaccgatccgcactcggccaagggtaaactgatgcgtgctgccgcccacctatttaagagcaaaggctacgagcgcaccaccgtgcgtgaactgggtgctgccgtgggcatacaaagcggaagcctgttccaccactttaaaagcaaagaagaaatcctactggccgtgatggaagaaaccatcatcattaacatggcccgcatgaacgccgctttaagtgatagcaaagacgctggcgaaaaactgcacgcattaattcgctgcgaactggacagcgtacacacagataccggcgaagccatgagcgtattggtatatgaatggcgcagcctttcgccagacaagcaaaagtacgtactgcaattgcgggatgaatacgaaaccttatggctcaataccatcgaagaatgtaaacagcagggactgattcagcacgacgcgtttattttacggcgattattaaccggggccattggttggaccaccacctggtatcgcccagatggtaatttaagtttggaagacctggcaaaacagactttattgcttgctattaaatag

SEQ ID NO: 88839 - protein, 211 aa, Oceanobacter sp. RED65
MNLDALDTVDTRDPVLKDLIHKGQVTDPHSAKGKLMRAAAHLFKSKGYERTTVRELGAAVGIQSGSLFHHFKSKEEILLAVMEETIIINMARMNAALSDSKDAGEKLHALIRCELDSVHTDTGEAMSVLVYEWRSLSPDKQKYVLQLRDEYETLWLNTIEECKQQGLIQHDAFILRRLLTGAIGWTTTWYRPDGNLSLEDLAKQTLLLAIK

SEQ ID NO: 88840 - DNA, 645 bp, Desulfitobacterium hafniense DCB-2
  CDS (1)..(645): transl_table=11
atggcacgcaataagtatcctgaagtaacgataaaccgcattctcgatacagctatgaaattgttcatgtccaaaggatatgagcatacgacgatccaggatatcatcgatggattgggagatttgagcaagggcgctatttatcatcacttcaattcaaaagaagaaatcatggatgcggtgaataaaagattagctgagcaggggatagccgatataaaaacaattgctcacgagcgcagtctatccgggttggataaactttgcaagatgcttgtgttttctatccaatcggcccaacacgaggctctcgatcagaccgtaccgccgtttcttagaaatcctcagttattggctcttcatatgcgtgatactatgggctccgcagccgacctgcttacaggtgttattgaggaaggtattagagacggttctattcatacagctcaaccccgtcagcttgcccagatgattctcttgttttttaacgtttggtttaacccgtggatgtattcctggactcccaatgagttaaaggatatcatttcctttgcaagaaatgtatttgaagaaataggggtccctatagttacagaagaggttcttcaatccattggcgaactccattcgctttcccaaaaatag

SEQ ID NO: 88841 - protein, 214 aa, Desulfitobacterium hafniense DCB-2
MARNKYPEVTINRILDTAMKLFMSKGYEHTTIQDIIDGLGDLSKGAIYHHFNSKEEIMDAVNKRLAEQGIADIKTIAHERSLSGLDKLCKMLVFSIQSAQHEALDQTVPPFLRNPQLLALHMRDTMGSAADLLTGVIEEGIRDGSIHTAQPRQLAQMILLFFNVWFNPWMYSWTPNELKDIISFARNVFEEIGVPIVTEEVLQSIGELHSLSQK

SEQ ID NO: 88842 - DNA, 894 bp, Candidatus Desulfococcus oleovorans Hxd3
  CDS (1)..(894): transl_table=11
atggaaaacacgcagcatctgtttcgcatcggcgagctggaacgactgtccggcgtggcccggcgcaacattcatttttacatgcagcagggcctgctccatgcgccccaccgcaccggacggaccatggcctattatgacgcgtcccacctcaacaagctggcctatattattgaacagaaagccctgggccagccccttttttccattcgggaaaacatcgaacgcttggaggccgaaagccccggctgcttttcggcccgccggtccacaccggcccggaaggccggcaccaccgatcggcgaatgccccgccggggcaaaagcatgaaaacccgggaggccattcttgacctgggctccgccctgttccggcaaaaagggtaccgggccaccagggtcagtgacatcaccacccggctcaacatcggcaaaggcacgttctatttttatttttccgacaaaaaagagctgcttttagcctgcgtgcccagaatattcggcgaactgtttgccaacgggtgggatgtcatacgtcaggaggccgaccccctcaaacgtctggagttgcgggcccgggccgttctgccggtgttggacgagttttgcgccattctggccatctgcgaagaggcccatgaagacccggaccccaagctcaaacagatgggcgagcaaaccctggtaacgatccgaaagcccatggaatcggatattcgcaagggcatggcccagggcctgattcgaacggtggacccggccattgccgcggccctgatgatcggggccatgcgcagcatgcgggtgttgcgctccatggacccggacatctccgatgacgctgttttgcgcgaagtgatcggtgtggtgctttccggtattcggcgacattga

SEQ ID NO: 88843 - protein, 297 aa, Candidatus Desulfococcus oleovorans Hxd3
MENTQHLFRIGELERLSGVARRNIHFYMQQGLLHAPHRTGRTMAYYDASHLNKLAYIIEQKALGQPLFSIRENIERLEAESPGCFSARRSTPARKAGTTDRRMPRRGKSMKTREAILDLGSALFRQKGYRATRVSDITTRLNIGKGTFYFYFSDKKELLLACVPRIFGELFANGWDVIRQEADPLKRLELRARAVLPVLDEFCAILAICEEAHEDPDPKLKQMGEQTLVTIRKPMESDIRKGMAQGLIRTVDPAIAAALMIGAMRSMRVLRSMDPDISDDAVLREVIGVVLSGIRRH

SEQ ID NO: 88844 - DNA, 582 bp, Pseudomonas putida GB-1
  CDS (1)..(582): transl_table=11
atgcccccggtcaatgccgcaatgcgctgtgccaactttgaagagcgacgtgaccgggccatggcgctgtttgccgaaaagggctttggccaggtcagcatgcgcgagctggcggcccatgtggggctgaccgccggctcgctgtaccatcacttccccagtaagcaggacctgttgtacgacttgatcgaggagttgtacgaggagctgcaggccaccctggaccaaggacgacgggccatggcacgtggttcgtcggcattgagctgcctgattgccgcgcactggcagttgcatgccgagcgcccgctgcagtttcgcctggccgagcgcgacctgtgctgcctgagcgatgaccagcgggcacgcctggccttgttgcgcaagcgttacgaggcggggttgctgaggttgatcgcgccgcaggcggcgttgcagggggaggctttggtggccaccgcgcatgttgtggcgacgctgctgaaccagttgccggggatgttgaaggcactccccgaggaacaggggctggggttgatggagagcatgttgatgggtggattggagcggaccctgcgttag

SEQ ID NO: 88845 - protein, 193 aa, Pseudomonas putida GB-1
MPPVNAAMRCANFEERRDRAMALFAEKGFGQVSMRELAAHVGLTAGSLYHHFPSKQDLLYDLIEELYEELQATLDQGRRAMARGSSALSCLIAAHWQLHAERPLQFRLAERDLCCLSDDQRARLALLRKRYEAGLLRLIAPQAALQGEALVATAHVVATLLNQLPGMLKALPEEQGLGLMESMLMGGLERTLR

SEQ ID NO: 88846 - DNA, 786 bp, Pseudomonas putida GB-1
  CDS (1)..(786): transl_table=11
ttgcagggctttgtcgatcacctgcaggtcgagatgctgcatgttccgctacctcgctcgtatcgtgtcagcccagccgaaaaagccgcgcaatggcccaacgtctgtggcagtgttgggtatctggccagccccacagggaccgacatgcaaactcgcaaaaccggtgttcgcgcccagcaggccgaccgcacccgggacaacattctcaaggctgccgtgaaggtcttcagcaaggaaggcttcaccggtgggcgcatcgagcagatctccacgctggccaagtccaacgaccggatgatctattactacttcggcagcaaggaaaagctgttcatcagcgtgctggagcacatctacgccagcttcaaccaggccgaagccaagctgcgcctggacctcgccgacccggaacaagccctgcgcgagctggtggcgttcatttgggactactacgtgcgccaccccgagttcgtcaccatccttgccaccgaaaaccttcaccagggccagcacgcgcgcaagtcgcaaaacctcagggcgctgtccggcgaggcggtcggcgtgctgcggccgatcatcgaggccggccaggccaagggcctgttccgggacgacatcgacatcacccacgcctacctgatgattgcctcgctgtgctacttctataactccaaccgccatactctcagctcgttcctggccgtggacctggccgacaagcaggccaaggccgactggcttgcctttatcagcgaccttgccttgcgtggcctgcgccgctga

SEQ ID NO: 88847 - protein, 261 aa, Pseudomonas putida GB-1
MQGFVDHLQVEMLHVPLPRSYRVSPAEKAAQWPNVCGSVGYLASPTGTDMQTRKTGVRAQQADRTRDNILKAAVKVFSKEGFTGGRIEQISTLAKSNDRMIYYYFGSKEKLFISVLEHIYASFNQAEAKLRLDLADPEQALRELVAFIWDYYVRHPEFVTILATENLHQGQHARKSQNLRALSGEAVGVLRPIIEAGQAKGLFRDDIDITHAYLMIASLCYFYNSNRHTLSSFLAVDLADKQAKADWLAFISDLALRGLRR

SEQ ID NO: 88848 - DNA, 705 bp, Marinobacter sp. ELB17
  CDS (1)..(705): transl_table=11
gtgagcgttgatttttcgatttttggcgactttatgaaaacccgagaccgaattctgcagagcagtctgcagctatttaaccaaagtggtgaacgcgcgataagcaccaaccacattgcggcagaactggcgatttcgcctggcaatctttactaccatttccgcaacaaggccgacattgtttacgagctgtttctagcctatcagcagcaggttgattattacctggccgcacctggcagccagcctttggtgctggcagatctggcctggtacctggaggcagtgttcgacggtttgtggcaataccggtttttccatcgtgacctagagtcactgctagacgcagacccacgcctgcgcgcaggctacggtgattttaccggccgttgcctgagcgctatcaatggtatctttagccagctcgccagcggtggcattattacgccgcgccccgagccgctgcgttccgccatggcgctgaatgtgtggttggtcattaccaactggatggcctatttaaaaaccgctcacgcaaccgaagagccagcggtattatcgctggcggagttgaagcagggtatttatcaggtgctgactctggagctgccacacgtgacccctgaatatcgcgaaccggtgttggcactgcgggagacttatcgcccgggaactttttgccaagcggcgcatccaagtacgtaa

SEQ ID NO: 88849 - protein, 234 aa, Marinobacter sp. ELB17
MSVDFSIFGDFMKTRDRILQSSLQLFNQSGERAISTNHIAAELAISPGNLYYHFRNKADIVYELFLAYQQQVDYYLAAPGSQPLVLADLAWYLEAVFDGLWQYRFFHRDLESLLDADPRLRAGYGDFTGRCLSAINGIFSQLASGGIITPRPEPLRSAMALNVWLVITNWMAYLKTAHATEEPAVLSLAELKQGIYQVLTLELPHVTPEYREPVLALRETYRPGTFCQAAHPST

SEQ ID NO: 88850 - DNA, 744 bp, Marinobacter sp. ELB17
  CDS (1)..(744): transl_table=11
atggcaaggaaagctcacacagacatttcacggttaagcagaggggctctaagggctgtagacatgaatataaaacagaaaacagagcgacaactcgctcaaaagaaagtgagccggtcacccttcgaccgggagctcgtgcgagagagcaagcgtgatgccgttctgagcgtcgcggcgtctgcgtttaaccgcgggggttacgcgaacacgtcaatggataacgtggcagaggcgctgcagatcaccaaactaactctctaccggtatttcaagaacaaacaacagatccttttcgaactccacatgcacgccatgaaccacggcgaagaggcattgtggctcgcgcacgcgacaggctctaccggtcttgaaaaatttttgatttgttgccgacggtatatgcagggtattttcggcgaatttggcacctgtccggtgctggtggacgtcggctcgctgaaaaatcccgaaaaggatcgtgtgatcgagcggcgcgcaaaaatttcgaaagcaacggtgaaaattattcaggaaggaatcgccgatggcaccatcggcgcgtgcgacgctcggcttgctacactttacacactgagtgctctcaactggataccactctggtatcgcgacgacggtcgcaaaacagccgacgaagtagctgacgaatttctagaactcttcgaacgcacgctgactggacaagcgagtcaccaacgccctcttgcggactccaaagcttga

SEQ ID NO: 88851 - protein, 247 aa, Marinobacter sp. ELB17
MARKAHTDISRLSRGALRAVDMNIKQKTERQLAQKKVSRSPFDRELVRESKRDAVLSVAASAFNRGGYANTSMDNVAEALQITKLTLYRYFKNKQQILFELHMHAMNHGEEALWLAHATGSTGLEKFLICCRRYMQGIFGEFGTCPVLVDVGSLKNPEKDRVIERRAKISKATVKIIQEGIADGTIGACDARLATLYTLSALNWIPLWYRDDGRKTADEVADEFLELFERTLTGQASHQRPLADSKA

SEQ ID NO: 88852 - DNA, 651 bp, Janthinobacterium lividum
  CDS (1)..(651): transl_table=11
atgcaagccccgattgataccaagccccgctgggagcggcgcaaggatgcccgcccgcaggaattgctcgccgccgccctcgacctgtttgtcgaacggggcttcgcatcgacgcgcctggaggatgtggccaagcgggccggcgtgtcgaaaggcacgctgtacctgtactttgagaacaagcaagagctgttcaaggccgtcgtgcgcgacaatatcgtgcagtcgatcggcgaggcggaagacagcatggccgcctcggacagcagcagcgccgagctgttgcgcaaggtgatgatgcagtggtgggaagaattcggcgccaccaagctggccggtctgaccaagctgatgctggccgaagcgaacaattttccggaactggcgcagttttacaacgaagaagtcgtcacgcgcggcaatgggctgatcgtcagcctgctggaacggggcatgcagcgcggcgaattccgccaggtcgatcccgtgctggtcagcaccatcctcagcgcgcccgtcaccatgctgatgatgtggacgcactccttcctgccatgcgaggtcaagaatatcgatccgctcgcctatatggatgcctttatcgacatgagcttgcgcagcctgcaggtggaggcgcccgggaaaagttga

SEQ ID NO: 88853 - protein, 216 aa, Janthinobacterium lividum
MQAPIDTKPRWERRKDARPQELLAAALDLFVERGFASTRLEDVAKRAGVSKGTLYLYFENKQELFKAVVRDNIVQSIGEAEDSMAASDSSSAELLRKVMMQWWEEFGATKLAGLTKLMLAEANNFPELAQFYNEEVVTRGNGLIVSLLERGMQRGEFRQVDPVLVSTILSAPVTMLMMWTHSFLPCEVKNIDPLAYMDAFIDMSLRSLQVEAPGKS

SEQ ID NO: 88854 - DNA, 630 bp, Magnetospirillum gryphiswaldense
  CDS (1)..(630): transl_table=11
atggcgcgcaccgtcggttcccatggccccaagaccatggaggccatccgcaaggctggcctgaagcttattcatgaacacggctacgaggccatgaccctgcgccagctggccgccgaggtcggcgtgcaggtagggtcgctttacaaccacatcagcaccaagcaggatctgctttacgacctgatcaagacccacatggacgctttgttcgccgaattggccaaggtcgaggccaagaccgccggacaaggcccggtggaacgcctgaaggcattcatcttcttccacgtcacctatcacatcctgagaaagcgcgaggtgttcatcggcgcctcggagttgcgcagcctggaccccaatcattacgaagacatcgtcggtctgcgccgccagtacgaaaaacggctgatggccatcctggacgacggtcgcgcgcaaggtctgttccaaatccccgacatcgccgtcgccgcctatggcatcctggccatgctgaccggcgtatgcacgtggttccgcccatcgggccgcctgagccgcgaggacgtggcccaggtctattgcgacatggttctacgcggtttagtaccggacagccagctatcggacacctgtagcttgcgttaa

SEQ ID NO: 88855 - protein, 209 aa, Magnetospirillum gryphiswaldense
MARTVGSHGPKTMEAIRKAGLKLIHEHGYEAMTLRQLAAEVGVQVGSLYNHISTKQDLLYDLIKTHMDALFAELAKVEAKTAGQGPVERLKAFIFFHVTYHILRKREVFIGASELRSLDPNHYEDIVGLRRQYEKRLMAILDDGRAQGLFQIPDIAVAAYGILAMLTGVCTWFRPSGRLSREDVAQVYCDMVLRGLVPDSQLSDTCSLR

SEQ ID NO: 88856 - DNA, 618 bp, Arthrobacter oxidans
  CDS (1)..(618): transl_table=11
atgcccagcagcactgatacagccagcacagccaagcgcggccgccccggatacgaccagcagtcggtgctgcgcatcgccgtcgacgtcttcaaccgtcatggctacgacgcaacgtccatgggcatccttgcggacaacctgggcatctccaagtccgccatctaccaccacgtgccgtccaagggcgacctcctgaagctcgccctggagcacgccctcggcggacttgaggccatcctggaagagcctgccgccacgtccggcgcggccgatgcccgcctggagttcgtgctccggcagaccgtggccgtcctggtggaccggctgccgttcgtcacgctgctcctgcggctgcgcgggaacacggagatcgagcgggacgccctggagcgccggcgcaccttcgaccacaaggtggccgcactgatctccgcagcccgcgacgaaggctcgctgcgccaggacatcgatccgcggaccgtcaccaggctgctgttcggcatgatcaactcgatcgtggaatggtacaagccgggcggctccctctcccccgaacggctcgccgacgacgtgatcaccatggcgttcgacgggctgcactccacccagcactga

SEQ ID NO: 88857 - protein, 205 aa, Arthrobacter oxidans
MPSSTDTASTAKRGRPGYDQQSVLRIAVDVFNRHGYDATSMGILADNLGISKSAIYHHVPSKGDLLKLALEHALGGLEAILEEPAATSGAADARLEFVLRQTVAVLVDRLPFVTLLLRLRGNTEIERDALERRRTFDHKVAALISAARDEGSLRQDIDPRTVTRLLFGMINSIVEWYKPGGSLSPERLADDVITMAFDGLHSTQH

SEQ ID NO: 88858 - DNA, 597 bp, Pseudomonas citronellolis
  CDS (1)..(597): transl_table=11
atgctggagctggtggcgaacgggcaggtcaccgacccggagagcgcccgcggcaagctgctgcagaccgctgcccacctgttccgcgccaagggctacgaacgcaccacggtgcgcgacctggccggcgccgtgggcatccagtccggcagcatcttccaccacttcaagagcaaggacgaaatcctgcgctcggtgatggaggagaccatcctctacaacaccgcgctgatgcgcgccgccctggccgacgccgaggatttgcgcgagcgcctgctggcgctgatccgctgcgagctgcaatcgatcatgggcggcaccggcgaggccatggcggtgctggtctacgagtggcgctcgctgtcgctggagggccaggcctacatcctcggcctgcgcgacatctacgagcagatgtggctggacgtgctcggcgaggcgcgcgccgccggctactgcgagggcgacccgttcatcctgcggcgtttcctcaccggcgcgctgtcctggaccatgacctggttccgccaggacggcagcatgaccctcgacgacctggccgagcaggccctgctgctggtctacaaggccgcctga

SEQ ID NO: 88859 - protein, 198 aa, Pseudomonas citronellolis
MLELVANGQVTDPESARGKLLQTAAHLFRAKGYERTTVRDLAGAVGIQSGSIFHHFKSKDEILRSVMEETILYNTALMRAALADAEDLRERLLALIRCELQSIMGGTGEAMAVLVYEWRSLSLEGQAYILGLRDIYEQMWLDVLGEARAAGYCEGDPFILRRFLTGALSWTMTWFRQDGSMTLDDLAEQALLLVYKAA

SEQ ID NO: 88860 - DNA, 672 bp, Streptomyces tubercidicus
  CDS (1)..(672): transl_table=11
atgacgagcaagccgccgggccggctgcgggccgacgccgcccacaaccggcgtgcgctgctggacgccgccgcggcgacgttcgccgagcagggcatggacgcctcgatcgcgcagatcgcggcacgggccggaatcggcaagggcacggtcttccgccacttcgccaccaaagagcatctcgtcgccgcgatcctccgcgaccggctcgacgaactcaccgccgccggcgcggcgttgctggacgccaccgaccccgagtccgcgctgctggagttcatgaccgcctgcgtcgagatccaggctcgcgaccgttgcttctgcgaggcgggaaccggcatctcccacagcgaccccgaggtccgcgccgccggcgcccgcctcttcgagaccgcgtcggcgctcaccgaccgggcgcggcatcagggcagcgtgcgggacgacatcacgggagtggacatcctgctgctctcccgcgccgcctacgaggccaccgcgcccatggccgatgtcgcccccggtctgcggcgacgctacctgagcgtgatcttcgacggactgcgccctcaagcggcacgcccactgccgcatccagcgccgaccagcgcccagttcgccgccgccatggacgagaacccgacgaacaacgccccgaaggcccagcggcgctga

SEQ ID NO: 88861 - protein, 223 aa, Streptomyces tubercidicus
MTSKPPGRLRADAAHNRRALLDAAAATFAEQGMDASIAQIAARAGIGKGTVFRHFATKEHLVAAILRDRLDELTAAGAALLDATDPESALLEFMTACVEIQARDRCFCEAGTGISHSDPEVRAAGARLFETASALTDRARHQGSVRDDITGVDILLLSRAAYEATAPMADVAPGLRRRYLSVIFDGLRPQAARPLPHPAPTSAQFAAAMDENPTNNAPKAQRR

SEQ ID NO: 88862 - DNA, 666 bp, marine alpha proteobacterium SE45
  CDS (1)..(666): transl_table=11
atggaaaaagcaagcaaaccgcggagttggaagcagaaccccgaggccgtgcggtcggacatcctgcgcgtggcgcgggccgaatttgcgcggcgagggctgtcggggacgcgaatcgaggacatcgcggcggggacgaagacctcgaagcggatgatcttctactacttcggcgacaagcaatcgctctacgaggcggtgctcgaggactgctactccgaggtccgcgcgggcgaggccgagctcgatctcgaggggctgccgccggagcaggcgctgcgccggctgatcgagttcaccttcgaccaccaccgcagcaaccccgagttcatccggctcgtgatgatcgagaacgtgcacgaggcgcggcacatggagaagatgaagcgcctgcacgaccagaacatgcgcgcgatcggcgtggtcgagcgcatctgccaggccgggcgcgagtccggcgtgttccgcgacgacgtctcggcgctggcgctgcactggcagatctcggcgctcagcgtgttcaacgtggcgaaccgggccaccttctcgacgaacttcggcaccacgctcttcgaggaagacgggcaggacctgctccgccggactgcggtgcgcagcatcctgtgctcggtgctggcgcggcccgagagcttcgatccgacctga

SEQ ID NO: 88863 - protein, 221 aa, marine alpha proteobacterium SE45
MEKASKPRSWKQNPEAVRSDILRVARAEFARRGLSGTRIEDIAAGTKTSKRMIFYYFGDKQSLYEAVLEDCYSEVRAGEAELDLEGLPPEQALRRLIEFTFDHHRSNPEFIRLVMIENVHEARHMEKMKRLHDQNMRAIGVVERICQAGRESGVFRDDVSALALHWQISALSVFNVANRATFSTNFGTTLFEEDGQDLLRRTAVRSILCSVLARPESFDPT

SEQ ID NO: 88864 - DNA, 645 bp, Pseudomonas putida
  CDS (1)..(645): transl_table=11
atgaccaatactgaaagtacaaggaaagtaaagtctatcaaggctgatgttgatgccatgaagcgccaaagcgttctagatgaatccatccagcaattctttgataacggctacgaggcaacatccctggaatctatcgcagatgcgctgggcgtcaccaagcaattcatctattcacgctttaacagcaaatccgaaatactggtttcgatttgccgctctggagctaaggccgcagaaaaagctgttgaactgagcgaggagatagaaggcaatgcggctgtgcgactggcttgtatcctgcgtttttttgttcaattgcaaatcgaacaccgcagggaagttgctatctattttcgtgaattcaagaatttacccgccgacgaagcccatgcaattgatgcgtccaaactgcgctttcaccggatgctgtgcgccgtcttgaacgagggcaaggcagcgggactgttcgaattcgatgacacctctctcgctgcatcggccttgggcggcatggtttcttggccatttttctggttccagccggaagggcggtgggttccgaccctggtagcccatcaatttgcggcacttgccctcaagacagttggagtttcagacccgtcgattgttgccgctggctga

SEQ ID NO: 88865 - protein, 214 aa, Pseudomonas putida
MTNTESTRKVKSIKADVDAMKRQSVLDESIQQFFDNGYEATSLESIADALGVTKQFIYSRFNSKSEILVSICRSGAKAAEKAVELSEEIEGNAAVRLACILRFFVQLQIEHRREVAIYFREFKNLPADEAHAIDASKLRFHRMLCAVLNEGKAAGLFEFDDTSLAASALGGMVSWPFFWFQPEGRWVPTLVAHQFAALALKTVGVSDPSIVAAG

SEQ ID NO: 88866 - DNA, 681 bp, Rhizobium sp
  CDS (1)..(681): transl_table=11
atggacaagctgcaggcggaaggaaaggcgcggaaagaggcgaccagcgggcgggcggaccgggccggaagccgcgacccggagcgcacgcgggcctcgatccttgccgcggcgacggtcgagttcgccgagaacggcatcggcggggcgcgggtcgacgcgatcgccgagcgggccggtaccaacaaacggatgctctaccactatttcggcgacaaggagcagctctaccttgccgttctcgaggaagcctatatcggcattcgaacggctgagaaatctttgaatctcagcgacttgacgccggagcagggcgtggcggagctggccatgttcacctggagatacttcctcgagcacccggaattcctgagcctgctcggcaccgagaacctgcatcgggcccggtggctgcgccagtcgacgcggctcaaggagctgcattcgcatttcatcgacaagctcgccgacctgctcgatcgcggcaaggcgaagggcctgttccgcgtcgacgccgatcccctgaacgtctatctgacgatcgccgcgcttggctatttctacatctccaaccagcatacgctgacgacgattttcggccgcgacctgatggaagaggcgaatatcgaggcctggaagcagcatatcgtccaggtgactctggcctccattcgccgctga

SEQ ID NO: 88867 - protein, 226 aa, Rhizobium sp
MDKLQAEGKARKEATSGRADRAGSRDPERTRASILAAATVEFAENGIGGARVDAIAERAGTNKRMLYHYFGDKEQLYLAVLEEAYIGIRTAEKSLNLSDLTPEQGVAELAMFTWRYFLEHPEFLSLLGTENLHRARWLRQSTRLKELHSHFIDKLADLLDRGKAKGLFRVDADPLNVYLTIAALGYFYISNQHTLTTIFGRDLMEEANIEAWKQHIVQVTLASIRR

SEQ ID NO: 88868 - DNA, 621 bp, Rhodococcus sp
  CDS (1)..(621): transl_table=11
atgccccggcagtcccgtgcccgcgcttcggcaccgaagaaaccgaccaagcaggaacggctcatggcggcagcggtgcgtctgttcagccggcaaggctatgctggtacctccgtgcgcgacctcggcgaggcgctgggaatccagccgggcagcgtgtacgcccacatcgacagcaagcacacgatgctggtcagtctcgtcgagagcggcatcgaccagtacctcgacgctgtggccgagttgcccggcactccgaccgaacaactgcggcacttcgtcgaggcccacgtgcgggtcgtggccgaagacgtcaaccgcgcccgagtcgtctaccaccagtggcgccacatccaaccaccggagcgcacccggatcgtggccaagcgctacgcctacgaacaccggctccgggacatcatcgacgccggggtagcggccggcgaattcgcccccgacctcgatcgtccgaccgccgtacgcgccgtcctcggcatggtgaactggtgcccggaatggttgcccgcggacggctcggagccggccgaggcggtcgctgcgggcgtggccgagatcgtgctggcgagcgtgcgcgtcggccacggcgcagcccacgcctag

SEQ ID NO: 88869 - protein, 206 aa, Rhodococcus sp
MPRQSRARASAPKKPTKQERLMAAAVRLFSRQGYAGTSVRDLGEALGIQPGSVYAHIDSKHTMLVSLVESGIDQYLDAVAELPGTPTEQLRHFVEAHVRVVAEDVNRARVVYHQWRHIQPPERTRIVAKRYAYEHRLRDIIDAGVAAGEFAPDLDRPTAVRAVLGMVNWCPEWLPADGSEPAEAVAAGVAEIVLASVRVGHGAAHA

SEQ ID NO: 88870 - DNA, 624 bp, Pseudomonas fluorescens
  CDS (1)..(624): transl_table=11
atggatgagcacaaagccctgggggtgatgcgcaccatggtcgacagtggccaattgaccgaccccgagagcgcccgcggcaagttgctgcaaaccgcggctcatctgtttcgcaacaagggtttcgagcgcaccaccgtgcgagatctggccagcgccgtgggcatccagtccggcagcatctttcatcacttcaagagcaaggatgagatattgcgtgccgtgatggaggaaaccacccattacaacaccgcgatgatgcgcgcttcactggaagaagcgagcacggtgcgcgaacgcgtgctggcgctgatccgctgcaagttgcagtcgatcatgggcggcagtggcgaggccatggcggtgctggtctacgaatggcgctcgctgtcggccgaaggccaggcgcacgtgctggccctgcgtgacgtgtatgagcagatctggttgcaggtactgggcgaggccaaggccgctggctacatccggggcgacgtgtttattacccggcgcttcctcaccggggccttatcctggaccaccacctggtttcgtgcccaaggcagcctgacccttgaggagttggccgaagaggccttgttgatggtgctgaagtcggactga

SEQ ID NO: 88871 - protein, 207 aa, Pseudomonas fluorescens
MDEHKALGVMRTMVDSGQLTDPESARGKLLQTAAHLFRNKGFERTTVRDLASAVGIQSGSIFHHFKSKDEILRAVMEETTHYNTAMMRASLEEASTVRERVLALIRCKLQSIMGGSGEAMAVLVYEWRSLSAEGQAHVLALRDVYEQIWLQVLGEAKAAGYIRGDVFITRRFLTGALSWTTTWFRAQGSLTLEELAEEALLMVLKSD

SEQ ID NO: 88872 - DNA, 21 bp, Artificial sequence
  primer
atggtgacgacgacgagggac

SEQ ID NO: 88873 - DNA, 23 bp, Artificial sequence
  primer
ttaggcacctccacgttccaacc

SEQ ID NO: 88874 - protein, 139 aa, Artificial sequence
  consensus sequence
  Variant (2)..(4): Xaa in position 2 to 4 is any amino acid
  Variant (6)..(8): Xaa in position 6 to 8 is any amino acid
  Variant (10)..(21): Xaa in position 10 to 21 is any amino acid
  Variant (22)..(22): Xaa in position 22 is any or no amino acid
  Variant (24)..(29): Xaa in position 24 to 29 is any amino acid
  Variant (30)..(30): Xaa in position 30 is any or no amino acid
  Variant (32)..(36): Xaa in position 32 to 36 is any amino acid
  Variant (38)..(120): Xaa in position 38 to 120 is any amino acid
  Variant (121)..(138): Xaa in position 121 to 138 is any or no amino acid
AXXXFXXXGXXXXXXXXXXXXXGXXXXXXXYXXXXXKXXXXXXXXXXXXXXXXXXXXXXXXXXXXXXXXXXXXXXXXXXXXXXXXXXXXXXXXXXXXXXXXXXXXXXXXXXXXXXXXXXXXXXXXXXXXXXXXXXXXXG

SEQ ID NO: 88875 - DNA, 213 bp, Thermus thermophilus
  CDS (1)..(213): transl_table=11
atggtaccaaaacgcttccctccctggaagccacgcccttgtcccccaaggccttcccggtatagccttggtgggatgcggggcgaacccaagcccgactggaaggacttcctggccctggtgctggccgcctacagcctcctcctccctcccctcctcgccgtcctcggggccctcctcctcttcaccctcctcctcggcctcctgcggtaa

SEQ ID NO: 88876 - protein, 70 aa, Thermus thermophilus
MVPKRFPPWKPRPCPPRPSRYSLGGMRGEPKPDWKDFLALVLAAYSLLLPPLLAVLGALLLFTLLLGLLR

SEQ ID NO: 88877 - DNA, 20 bp, Artificial sequence
  primer
atggtaccaaaacgcttccc

SEQ ID NO: 88878 - DNA, 24 bp, Artificial sequence
  primer
ttaccgcaggaggccgaggaggag

SEQ ID NO: 88879 - DNA, 1113 bp, Saccharomyces cerevisiae; identical to SEQ ID NO: 75780
  CDS (1)..(1113)

SEQ ID NO: 88880 - protein, 370 aa, Saccharomyces cerevisiae; identical to SEQ ID NO: 75781

SEQ ID NO: 88881 - DNA, 1092 bp, Mesorhizobium loti MAFF303099; identical to SEQ ID NO: 75292
  CDS (1)..(1092): transl_table=11

SEQ ID NO: 88882 - protein, 363 aa, Mesorhizobium loti MAFF303099; identical to SEQ ID NO: 75293

SEQ ID NO: 88883 - DNA, 1074 bp, Vibrio cholerae O1 biovar eltor str. N16961; identical to SEQ ID NO: 75294
  CDS (1)..(1074): transl_table=11

SEQ ID NO: 88884 - protein, 357 aa, Vibrio cholerae O1 biovar eltor str. N16961; identical to SEQ ID NO: 75295

SEQ ID NO: 88885 - DNA, 1188 bp, Vibrio cholerae O1 biovar eltor str. N16961
  CDS (1)..(1188): transl_table=11
ttggtcaaatgctcggtttttacttcaatttacacccctttccgcagctgttttcggcgtaatggtttattctcgttgacaaattcgttatctttagcgcttcgcaataaaaggacaggcgctcctatgccactgaaaaccgatgaattaagaacccaagcattgggacctatgcctactccggcagaattaagtcacgcacatcctatcactgatgaagttgcgctacggatcgcgcagtctcgtcgccaaattgaaagcattcttaccggtgaagatgatcgcctattagtgatagtggggccttgttcggtgcatgataccgatgccgcactcgactacgctcgccgccttgctgcgctacaagaaaactatactgatgagctttttgtggtgatgcggacctatttcgaaaaaccacgtactgtggtgggttggaaaggactgatcaccgatccaaacttagatggctcttacgctttagaaaccggtctcaataaagcgcgaaagttgctgcttgatgtaaacaagctcggattggctaccgcgaccgagtttcttgatatgatcacaggccaatacatcgcggaccttatcacgtggggcgcaattggtgcgcgtaccactgagtcgcaaattcaccgtgagatggcctctgcgctctcctgccctgtgggttttaaaaatggcactaacggtaatgtgaaaatcgcgattgatgcgatccgcgcggccaaagcgtcacattacttctattcaccagataagaatggtcgtatgacggtttaccgtaccagtggtaacccatttggtcatattattctgcgtggtggtgatagcggaccaaactttgatgcggcttcgattaatgaagcttgccagcagttggcgcaattcaacttaccagagcgtttagtggtggatttcagccacgcgaactgtcaaaaacaacaccgtaaacaagtggatgtcgcgcgcgatatttgccagcaaattgaagctggcagccacaaaattgcgggcatcatggcggaaagcttccttgtggaaggcaatcagccaatgcacgatctcaataatctgacttatggtctgtcgatcaccgatccttgtttaggatggaaagataccgccaccatgcttgatatgctggctcaatcgatcaaagtccgtcgttctcgtcattaa

SEQ ID NO: 88886 - protein, 395 aa, Vibrio cholerae O1 biovar eltor str. N16961
MVKCSVFTSIYTPFRSCFRRNGLFSLTNSLSLALRNKRTGAPMPLKTDELRTQALGPMPTPAELSHAHPITDEVALRIAQSRRQIESILTGEDDRLLVIVGPCSVHDTDAALDYARRLAALQENYTDELFVVMRTYFEKPRTVVGWKGLITDPNLDGSYALETGLNKARKLLLDVNKLGLATATEFLDMITGQYIADLITWGAIGARTTESQIHREMASALSCPVGFKNGTNGNVKIAIDAIRAAKASHYFYSPDKNGRMTVYRTSGNPFGHIILRGGDSGPNFDAASINEACQQLAQFNLPERLVVDFSHANCQKQHRKQVDVARDICQQIEAGSHKIAGIMAESFLVEGNQPMHDLNNLTYGLSITDPCLGWKDTATMLDMLAQSIKVRRSRH

SEQ ID NO: 88887 - DNA, 1086 bp, Pasteurella multocida subsp. multocida str. Pm70; identical to SEQ ID NO: 75296
  CDS (1)..(1086): transl_table=11

SEQ ID NO: 88888 - protein, 361 aa, Pasteurella multocida subsp. multocida str. Pm70; identical to SEQ ID NO: 75297

SEQ ID NO: 88889 - DNA, 1077 bp, Pseudomonas aeruginosa PAO1; identical to SEQ ID NO: 75300
  CDS (1)..(1077): transl_table=11

SEQ ID NO: 88890 - protein, 358 aa, Pseudomonas aeruginosa PAO1; identical to SEQ ID NO: 75301

SEQ ID NO: 88891 - DNA, 1095 bp, Pseudomonas aeruginosa PAO1; identical to SEQ ID NO: 75302
  CDS (1)..(1095): transl_table=11

SEQ ID NO: 88892 - protein, 364 aa, Pseudomonas aeruginosa PAO1; identical to SEQ ID NO: 75303

SEQ ID NO: 88893 - DNA, 1038 bp, Lactococcus lactis subsp. lactis Il1403; identical to SEQ ID NO: 75304
  CDS (1)..(1038): transl_table=11

SEQ ID NO: 88894 - protein, 345 aa, Lactococcus lactis subsp. lactis Il1403; identical to SEQ ID NO: 75305

SEQ ID NO: 88895 - DNA, 1023 bp, Lactococcus lactis subsp. lactis Il1403; identical to SEQ ID NO: 75306
  CDS (1)..(1023): transl_table=11

SEQ ID NO: 88896 - protein, 340 aa, Lactococcus lactis subsp. lactis Il1403; identical to SEQ ID NO: 75307

SEQ ID NO: 88897 - DNA, 1056 bp, Neisseria meningitidis Z2491; identical to SEQ ID NO: 75310
  CDS (1)..(1056): transl_table=11

SEQ ID NO: 88898 - protein, 351 aa, Neisseria meningitidis Z2491; identical to SEQ ID NO: 75311

SEQ ID NO: 88899 - DNA, 1071 bp, Escherichia coli O157:H7 EDL933
  CDS (1)..(1071): transl_table=11
atgcaaaaagacgcgctgaataacgtacatattaccgacgaacaggttttaatgactccggcacaactgaaggccgcttttccattaagcctgcaacaagaagcccagattgctgactcgcgtaaaaccatttcagatattatcgccgggcgcgatcctcgtctgctggtagtatgtggcccttgttccattcatgatccggaaactgctctggaatatgctcgtcgatttaaagcccttgccgcagaggtcagcgatagcctctatctggtaatgcgcgtctattttgaaaaaccccgtaccactgtcggctggaaagggttaattaacgatccccatatggatggctcttttgatgtagaagccgggctgcagatcgcgcgtaaattgctgcttgagctggtgaatatgggactgccactggcgacggaagcgttagatccgaatagcccgcaatacctgggcgatctgtttagctggtcagcaattggtgctcgtacaacggaatcgcaaactcaccgtgaaatggcctccgggctttccatgccggttggctttaaaaacggcaccgacggcagtctggcaacagcaattaacgctatgcgcgccgccgcccagccgcaccgttttgttggcattaaccaggcagggcaggttgcgttgctacaaactcaggggaatccggacgggcatgtcatcctgcgcggtggtaaagcgccgaactatagccctgcggatgttgcgcaatgtgaaaaagagatggaacaggcgggactgcgcccgtctctgatggtagattgcagccacggtaattccaataaagattatcgccgtcagcctgcggtggcagaatccgtggttgctcaaatcaaagatggcaatcgctcaattattggtctgatgatcgaaagtaatatccacgagggcaatcagtcttccgagcaaccgcgcagtgaaatgaaatacggtgtatccgtaaccgatgcctgcattagctgggaaatgaccgatgccttgctgcgtgaaattcatcaggatctgaacgggcagctgacggctcgcgtggcttaa

SEQ ID NO: 88900 - protein, 356 aa, Escherichia coli O157:H7 EDL933
MQKDALNNVHITDEQVLMTPAQLKAAFPLSLQQEAQIADSRKTISDIIAGRDPRLLVVCGPCSIHDPETALEYARRFKALAAEVSDSLYLVMRVYFEKPRTTVGWKGLINDPHMDGSFDVEAGLQIARKLLLELVNMGLPLATEALDPNSPQYLGDLFSWSAIGARTTESQTHREMASGLSMPVGFKNGTDGSLATAINAMRAAAQPHRFVGINQAGQVALLQTQGNPDGHVILRGGKAPNYSPADVAQCEKEMEQAGLRPSLMVDCSHGNSNKDYRRQPAVAESVVAQIKDGNRSIIGLMIESNIHEGNQSSEQPRSEMKYGVSVTDACISWEMTDALLREIHQDLNGQLTARVA

SEQ ID NO: 88901 - DNA, 1086 bp, Deinococcus radiodurans R1; identical to SEQ ID NO: 75312
  CDS (1)..(1086): transl_table=11

SEQ ID NO: 88902 - protein, 361 aa, Deinococcus radiodurans R1; identical to SEQ ID NO: 75313

SEQ ID NO: 88903 - DNA, 1032 bp, Streptococcus pneumoniae TIGR4; identical to SEQ ID NO: 75318
  CDS (1)..(1032): transl_table=11

SEQ ID NO: 88904 - protein, 343 aa, Streptococcus pneumoniae TIGR4; identical to SEQ ID NO: 75319

SEQ ID NO: 88905 - DNA, 1110 bp, Caulobacter crescentus CB15; identical to SEQ ID NO: 75324
  CDS (1)..(1110): transl_table=11

SEQ ID NO: 88906 - protein, 369 aa, Caulobacter crescentus CB15; identical to SEQ ID NO: 75325

SEQ ID NO: 88907 - DNA, 1053 bp, Salmonella typhimurium LT2; identical to SEQ ID NO: 75326
  CDS (1)..(1053): transl_table=11

SEQ ID NO: 88908 - protein, 350 aa, Salmonella typhimurium LT2; identical to SEQ ID NO: 75327

SEQ ID NO: 88909 - DNA, 1131 bp, Nostoc sp. PCC 7120; identical to SEQ ID NO: 75328
  CDS (1)..(1131): transl_table=11

SEQ ID NO: 88910 - protein, 376 aa, Nostoc sp. PCC 7120; identical to SEQ ID NO: 75329

SEQ ID NO: 88911 - DNA, 1179 bp, Ralstonia solanacearum GMI1000; identical to SEQ ID NO: 75330
  CDS (1)..(1179): transl_table=11

SEQ ID NO: 88912 - protein, 392 aa, Ralstonia solanacearum GMI1000; identical to SEQ ID NO: 75331

SEQ ID NO: 88913 - DNA, 1080 bp, Ralstonia solanacearum GMI1000; identical to SEQ ID NO: 75332
  CDS (1)..(1080): transl_table=11

SEQ ID NO: 88914 - protein, 359 aa, Ralstonia solanacearum GMI1000; identical to SEQ ID NO: 75333

SEQ ID NO: 88915 - DNA, 1119 bp, Schizosaccharomyces pombe 972h-; identical to SEQ ID NO: 75334
  CDS (1)..(1119)

SEQ ID NO: 88916 - protein, 372 aa, Schizosaccharomyces pombe 972h-; identical to SEQ ID NO: 75335

SEQ ID NO: 88917 - DNA, 1074 bp, Xanthomonas axonopodis pv. citri str. 306; identical to SEQ ID NO: 75338
  CDS (1)..(1074): transl_table=11

SEQ ID NO: 88918 - protein, 357 aa, Xanthomonas axonopodis pv. citri str. 306; identical to SEQ ID NO: 75339

SEQ ID NO: 88919 - DNA, 1062 bp, Chlorobium tepidum TLS; identical to SEQ ID NO: 75340
  CDS (1)..(1062): transl_table=11

SEQ ID NO: 88920 - protein, 353 aa, Chlorobium tepidum TLS; identical to SEQ ID NO: 75341

SEQ ID NO: 88921 - DNA, 1062 bp, Thermosynechococcus elongatus BP-1; identical to SEQ ID NO: 75348
  CDS (1)..(1062): transl_table=11

SEQ ID NO: 88922 - protein, 353 aa, Thermosynechococcus elongatus BP-1; identical to SEQ ID NO: 75349

SEQ ID NO: 88923 - DNA, 1233 bp, Bifidobacterium longum NCC2705; identical to SEQ ID NO: 75350
  CDS (1)..(1233): transl_table=11

SEQ ID NO: 88924 - protein, 410 aa, Bifidobacterium longum NCC2705; identical to SEQ ID NO: 75351

SEQ ID NO: 88925 - DNA, 1134 bp, Bifidobacterium longum NCC2705; identical to SEQ ID NO: 75352
  CDS (1)..(1134): transl_table=11

SEQ ID NO: 88926 - protein, 377 aa, Bifidobacterium longum NCC2705; identical to SEQ ID NO: 75353

SEQ ID NO: 88927 - DNA, 1065 bp, Shewanella oneidensis MR-1; identical to SEQ ID NO: 75362
  CDS (1)..(1065): transl_table=11

SEQ ID NO: 88928 - protein, 354 aa, Shewanella oneidensis MR-1; identical to SEQ ID NO: 75363

SEQ ID NO: 88929 - DNA, 1032 bp, Streptococcus mutans UA159; identical to SEQ ID NO: 75366
  CDS (1)..(1032): transl_table=11

SEQ ID NO: 88930 - protein, 343 aa, Streptococcus mutans UA159; identical to SEQ ID NO: 75367

SEQ ID NO: 88931 - DNA, 1170 bp, Corynebacterium efficiens YS-314; identical to SEQ ID NO: 75370
  CDS (1)..(1170): transl_table=11

SEQ ID NO: 88932 - protein, 389 aa, Corynebacterium efficiens YS-314; identical to SEQ ID NO: 75371

SEQ ID NO: 88933 - DNA, 1113 bp, Pseudomonas putida KT2440; identical to SEQ ID NO: 75372
  CDS (1)..(1113): transl_table=11

SEQ ID NO: 88934 - protein, 370 aa, Pseudomonas putida KT2440; identical to SEQ ID NO: 75373

SEQ ID NO: 88935 - DNA, 1062 bp, Pseudomonas putida KT2440; identical to SEQ ID NO: 75374
  CDS (1)..(1062): transl_table=11

SEQ ID NO: 88936 - protein, 353 aa, Pseudomonas putida KT2440; identical to SEQ ID NO: 75375

SEQ ID NO: 88937 - DNA, 1053 bp, Escherichia coli CFT073; identical to SEQ ID NO: 75376
  CDS (1)..(1053): transl_table=11

SEQ ID NO: 88938 - protein, 350 aa, Escherichia coli CFT073; identical to SEQ ID NO: 75377

SEQ ID NO: 88939 - DNA, 1077 bp, Escherichia coli CFT073; identical to SEQ ID NO: 75378
  CDS (1)..(1077): transl_table=11

SEQ ID NO: 88940 - protein, 358 aa, Escherichia coli CFT073; identical to SEQ ID NO: 75379

SEQ ID NO: 88941 - DNA, 1140 bp, Escherichia coli CFT073; identical to SEQ ID NO: 75380
  CDS (1)..(1140): transl_table=11

SEQ ID NO: 88942 - protein, 379 aa, Escherichia coli CFT073; identical to SEQ ID NO: 75381

SEQ ID NO: 88943 - DNA, 1071 bp, Vibrio vulnificus CMCP6; identical to SEQ ID NO: 75382
  CDS (1)..(1071): transl_table=11

SEQ ID NO: 88944 - protein, 356 aa, Vibrio vulnificus CMCP6; identical to SEQ ID NO: 75383

SEQ ID NO: 88945 - DNA, 1053 bp, Vibrio vulnificus CMCP6; identical to SEQ ID NO: 75386
  CDS (1)..(1053): transl_table=11

SEQ ID NO: 88946 - protein, 350 aa, Vibrio vulnificus CMCP6; identical to SEQ ID NO: 75387

SEQ ID NO: 88947 - DNA, 1071 bp, Vibrio vulnificus CMCP6; identical to SEQ ID NO: 75388
  CDS (1)..(1071): transl_table=11

SEQ ID NO: 88948 - protein, 356 aa, Vibrio vulnificus CMCP6; identical to SEQ ID NO: 75389

SEQ ID NO: 88949 - DNA, 1086 bp, Bradyrhizobium japonicum USDA 110; identical to SEQ ID NO: 75390
  CDS (1)..(1086): transl_table=11

SEQ ID NO: 88950 - protein, 361 aa, Bradyrhizobium japonicum USDA 110; identical to SEQ ID NO: 75391

SEQ ID NO: 88951 - DNA, 1095 bp, Xylella fastidiosa Temecula1; identical to SEQ ID NO: 75392
  CDS (1)..(1095): transl_table=11

SEQ ID NO: 88952 - protein, 364 aa, Xylella fastidiosa Temecula1; identical to SEQ ID NO: 75393

SEQ ID NO: 88953 - DNA, 1077 bp, Pseudomonas syringae pv. tomato str. DC3000; identical to SEQ ID NO: 75394
  CDS (1)..(1077): transl_table=11

SEQ ID NO: 88954 - protein, 358 aa, Pseudomonas syringae pv. tomato str. DC3000; identical to SEQ ID NO: 75395

SEQ ID NO: 88955 - DNA, 1083 bp, Pseudomonas syringae pv. tomato str. DC3000; identical to SEQ ID NO: 75396
  CDS (1)..(1083): transl_table=11

SEQ ID NO: 88956 - protein, 360 aa, Pseudomonas syringae pv. tomato str. DC3000; identical to SEQ ID NO: 75397

SEQ ID NO: 88957 - DNA, 1074 bp, Vibrio parahaemolyticus RIMD 2210633; identical to SEQ ID NO: 75398
  CDS (1)..(1074): transl_table=11

SEQ ID NO: 88958 - protein, 357 aa, Vibrio parahaemolyticus RIMD 2210633; identical to SEQ ID NO: 75399

SEQ ID NO: 88959 - DNA, 1053 bp, Vibrio parahaemolyticus RIMD 2210633; identical to SEQ ID NO: 75400
  CDS (1)..(1053): transl_table=11

SEQ ID NO: 88960 - protein, 350 aa, Vibrio parahaemolyticus RIMD 2210633; identical to SEQ ID NO: 75401

SEQ ID NO: 88961 - DNA, 1053 bp, Vibrio parahaemolyticus RIMD 2210633; identical to SEQ ID NO: 75402
  CDS (1)..(1053): transl_table=11

SEQ ID NO: 88962 - protein, 350 aa, Vibrio parahaemolyticus RIMD 2210633; identical to SEQ ID NO: 75403

SEQ ID NO: 88963 - DNA, 1053 bp, Salmonella enterica subsp. enterica serovar Typhi Ty2; identical to SEQ ID NO: 75404
  CDS (1)..(1053): transl_table=11

SEQ ID NO: 88964 - protein, 350 aa, Salmonella enterica subsp. enterica serovar Typhi Ty2; identical to SEQ ID NO: 75405

SEQ ID NO: 88965 - DNA, 1083 bp, Coxiella burnetii RSA 493; identical to SEQ ID NO: 75406
  CDS (1)..(1083): transl_table=11

SEQ ID NO: 88966 - protein, 360 aa, Coxiella burnetii RSA 493; identical to SEQ ID NO: 75407

SEQ ID NO: 88967 - DNA, 1179 bp, Nitrosomonas europaea ATCC 19718; identical to SEQ ID NO: 75408
  CDS (1)..(1179): transl_table=11

SEQ ID NO: 88968 - protein, 392 aa, Nitrosomonas europaea ATCC 19718; identical to SEQ ID NO: 75409

SEQ ID NO: 88969 - DNA, 1053 bp, Rhodopirellula baltica SH 1; identical to SEQ ID NO: 75410
  CDS (1)..(1053): transl_table=11

SEQ ID NO: 88970 - protein, 350 aa, Rhodopirellula baltica SH 1; identical to SEQ ID NO: 75411

SEQ ID NO: 88971 - DNA, 1038 bp, Wigglesworthia glossinidia endosymbiont of Glossina brevipalpis; identical to SEQ ID NO: 75412
  CDS (1)..(1038): transl_table=11

SEQ ID NO: 88972 - protein, 345 aa, Wigglesworthia glossinidia endosymbiont of Glossina brevipalpis; identical to SEQ ID NO: 75413

SEQ ID NO: 88973 - DNA, 1080 bp, Haemophilus ducreyi 35000HP; identical to SEQ ID NO: 75414
  CDS (1)..(1080): transl_table=11

SEQ ID NO: 88974 - protein, 359 aa, Haemophilus ducreyi 35000HP; identical to SEQ ID NO: 75415

SEQ ID NO: 88975 - DNA, 1113 bp, Haemophilus ducreyi 35000HP; identical to SEQ ID NO: 75416
  CDS (1)..(1113): transl_table=11

SEQ ID NO: 88976 - protein, 370 aa, Haemophilus ducreyi 35000HP; identical to SEQ ID NO: 75417

SEQ ID NO: 88977 - DNA, 1086 bp, Candidatus Blochmannia floridanus; identical to SEQ ID NO: 75420
  CDS (1)..(1086): transl_table=11

SEQ ID NO: 88978 - protein, 361 aa, Candidatus Blochmannia floridanus; identical to SEQ ID NO: 75421

SEQ ID NO: 88979 - DNA, 1119 bp, Bordetella parapertussis 12822; identical to SEQ ID NO: 75422
  CDS (1)..(1119): transl_table=11

SEQ ID NO: 88980 - protein, 372 aa, Bordetella parapertussis 12822; identical to SEQ ID NO: 75423

SEQ ID NO: 88981 - DNA, 1074 bp, Bordetella bronchiseptica RB50; identical to SEQ ID NO: 75426
  CDS (1)..(1074): transl_table=11

SEQ ID NO: 88982 - protein, 357 aa, Bordetella bronchiseptica RB50; identical to SEQ ID NO: 75427

SEQ ID NO: 88983 - DNA, 1068 bp, Prochlorococcus marinus subsp. pastoris str. CCMP1986; identical to SEQ ID NO: 75430
  CDS (1)..(1068): transl_table=11

SEQ ID NO: 88984 - protein, 355 aa, Prochlorococcus marinus subsp. pastoris str. CCMP1986; identical to SEQ ID NO: 75431

SEQ ID NO: 88985 - DNA, 1068 bp, Synechococcus sp. WH 8102; identical to SEQ ID NO: 75434
  CDS (1)..(1068): transl_table=11

SEQ ID NO: 88986 - protein, 355 aa, Synechococcus sp. WH 8102; identical to SEQ ID NO: 75435

SEQ ID NO: 88987 - DNA, 1059 bp, Chromobacterium violaceum ATCC 12472; identical to SEQ ID NO: 75436
  CDS (1)..(1059): transl_table=11

SEQ ID NO: 88988 - protein, 352 aa, Chromobacterium violaceum ATCC 12472; identical to SEQ ID NO: 75437

SEQ ID NO: 88989 - DNA, 1107 bp, Chromobacterium violaceum ATCC 12472; identical to SEQ ID NO: 75438
  CDS (1)..(1107): transl_table=11

SEQ ID NO: 88990 - protein, 368 aa, Chromobacterium violaceum ATCC 12472; identical to SEQ ID NO: 75439

SEQ ID NO: 88991 - DNA, 1119 bp, Gloeobacter violaceus PCC 7421; identical to SEQ ID NO: 75440
  CDS (1)..(1119): transl_table=11

SEQ ID NO: 88992 - protein, 372 aa, Gloeobacter violaceus PCC 7421; identical to SEQ ID NO: 75441

SEQ ID NO: 88993 - DNA, 1095 bp, Photorhabdus luminescens subsp. laumondii TTO1; identical to SEQ ID NO: 75442
  CDS (1)..(1095): transl_table=11

SEQ ID NO: 88994 - protein, 364 aa, Photorhabdus luminescens subsp. laumondii TTO1; identical to SEQ ID NO: 75443

SEQ ID NO: 88995 - DNA, 1053 bp, Photorhabdus luminescens subsp. laumondii TTO1; identical to SEQ ID NO: 75444
  CDS (1)..(1053): transl_table=11

SEQ ID NO: 88996 - protein, 350 aa, Photorhabdus luminescens subsp. laumondii TTO1; identical to SEQ ID NO: 75445

SEQ ID NO: 88997 - DNA, 1047 bp, Photorhabdus luminescens subsp. laumondii TTO1; identical to SEQ ID NO: 75446
  CDS (1)..(1047): transl_table=11

SEQ ID NO: 88998 - protein, 348 aa, Photorhabdus luminescens subsp. laumondii TTO1; identical to SEQ ID NO: 75447

SEQ ID NO: 88999 - DNA, 1245 bp, Vibrio vulnificus YJ016; identical to SEQ ID NO: 75448
  CDS (1)..(1245): transl_table=11

SEQ ID NO: 89000 - protein, 414 aa, Vibrio vulnificus YJ016; identical to SEQ ID NO: 75449

SEQ ID NO: 89001 - DNA, 1053 bp, Vibrio vulnificus YJ016; identical to SEQ ID NO: 75450
  CDS (1)..(1053): transl_table=11

SEQ ID NO: 89002 - protein, 350 aa, Vibrio vulnificus YJ016; identical to SEQ ID NO: 75451

SEQ ID NO: 89003 - DNA, 1053 bp, Vibrio vulnificus YJ016; identical to SEQ ID NO: 75452
  CDS (1)..(1053): transl_table=11

SEQ ID NO: 89004 - protein, 350 aa, Vibrio vulnificus YJ016; identical to SEQ ID NO: 75453

SEQ ID NO: 89005 - DNA, 1071 bp, Vibrio vulnificus YJ016; identical to SEQ ID NO: 75454
  CDS (1)..(1071): transl_table=11

SEQ ID NO: 89006 - protein, 356 aa, Vibrio vulnificus YJ016; identical to SEQ ID NO: 75455

SEQ ID NO: 89007 - DNA, 1095 bp, Rhodopseudomonas palustris CGA009; identical to SEQ ID NO: 75456
  CDS (1)..(1095): transl_table=11

SEQ ID NO: 89008 - protein, 364 aa, Rhodopseudomonas palustris CGA009; identical to SEQ ID NO: 75457

SEQ ID NO: 89009 - DNA, 1068 bp, Geobacter sulfurreducens PCA; identical to SEQ ID NO: 75458
  CDS (1)..(1068): transl_table=11

SEQ ID NO: 89010 - protein, 355 aa, Geobacter sulfurreducens PCA; identical to SEQ ID NO: 75459

SEQ ID NO: 89011 - DNA, 1071 bp, Treponema denticola ATCC 35405; identical to SEQ ID NO: 75460
  CDS (1)..(1071): transl_table=11

SEQ ID NO: 89012 - protein, 356 aa, Treponema denticola ATCC 35405; identical to SEQ ID NO: 75461

SEQ ID NO: 89013 - DNA, 1113 bp, Magnaporthe grisea 70-15; identical to SEQ ID NO: 75462
  CDS (1)..(1113)

SEQ ID NO: 89014 - protein, 370 aa, Magnaporthe grisea 70-15; identical to SEQ ID NO: 75463

SEQ ID NO: 89015 - DNA, 1152 bp, Magnaporthe grisea 70-15; identical to SEQ ID NO: 75464
  CDS (1)..(1152)

SEQ ID NO: 89016 - protein, 383 aa, Magnaporthe grisea 70-15; identical to SEQ ID NO: 75465

SEQ ID NO: 89017 - DNA, 1128 bp, Gibberella zeae PH-1; identical to SEQ ID NO: 75466
  CDS (1)..(1128)

SEQ ID NO: 89018 - protein, 375 aa, Gibberella zeae PH-1; identical to SEQ ID NO: 75467

SEQ ID NO: 89019 - DNA, 1098 bp, Gibberella zeae PH-1; identical to SEQ ID NO: 75468
  CDS (1)..(1098)

SEQ ID NO: 89020 - protein, 365 aa, Gibberella zeae PH-1; identical to SEQ ID NO: 75469

SEQ ID NO: 89021 - DNA, 1071 bp, Candida glabrata CBS 138; identical to SEQ ID NO: 75470
  CDS (1)..(1071)

SEQ ID NO: 89022 - protein, 356 aa, Candida glabrata CBS 138; identical to SEQ ID NO: 75471

SEQ ID NO: 89023 - DNA, 1119 bp, Candida glabrata CBS 138; identical to SEQ ID NO: 75472
  CDS (1)..(1119)

SEQ ID NO: 89024 - protein, 372 aa, Candida glabrata CBS 138; identical to SEQ ID NO: 75473

SEQ ID NO: 89025 - DNA, 1095 bp, Kluyveromyces lactis NRRL Y-1140; identical to SEQ ID NO: 75474
  CDS (1)..(1095)

SEQ ID NO: 89026 - protein, 364 aa, Kluyveromyces lactis NRRL Y-1140; identical to SEQ ID NO: 75475

SEQ ID NO: 89027 - DNA, 1119 bp, Kluyveromyces lactis NRRL Y-1140; identical to SEQ ID NO: 75476
  CDS (1)..(1119)

SEQ ID NO: 89028 - protein, 372 aa, Kluyveromyces lactis NRRL Y-1140; identical to SEQ ID NO: 75477

SEQ ID NO: 89029 - DNA, 1107 bp, Debaryomyces hansenii CBS767; identical to SEQ ID NO: 75478
  CDS (1)..(1107)

SEQ ID NO: 89030 - protein, 368 aa, Debaryomyces hansenii CBS767; identical to SEQ ID NO: 75479

SEQ ID NO: 89031 - DNA, 1122 bp, Debaryomyces hansenii CBS767; identical to SEQ ID NO: 75480
  CDS (1)..(1122)

SEQ ID NO: 89032 - protein, 373 aa, Debaryomyces hansenii CBS767; identical to SEQ ID NO: 75481

SEQ ID NO: 89033 - DNA, 1089 bp, Yarrowia lipolytica CLIB122; identical to SEQ ID NO: 75482
  CDS (1)..(1089)

SEQ ID NO: 89034 - protein, 362 aa, Yarrowia lipolytica CLIB122; identical to SEQ ID NO: 75483

SEQ ID NO: 89035 - DNA, 1074 bp, Yarrowia lipolytica CLIB122; identical to SEQ ID NO: 75484
  CDS (1)..(1074)

SEQ ID NO: 89036 - protein, 357 aa, Yarrowia lipolytica CLIB122; identical to SEQ ID NO: 75485

SEQ ID NO: 89037 - DNA, 750 bp, Apis mellifera
  CDS (1)..(750)
atgcctcatataaatcgatggctaagatgcgtgctgtggctccgcgtttgttcctatgatattaactatggtttgcgtctggcacgtaaactgctgctggaattaaacaatatggggatgccggcagctactgaatttctggacatgattactccgcaatattttgccgacctgatttcatggggagcaatcggtgcccgtacaaccgaaagtcaggtacaccgtgagctggcctctggtttaagctgtccggtaggtttcaaaaatggtactgacggcaatctgaaaattgctattgatgccattggtgcttccagccatccgcatcattttctttcagtaaccaaggccggccattcggccattgtacgcaccagcggcaatcctgactgccacatcattctgcgtggcggtaaagaacctaattacagccatgaatatgtacaggcggcggtaaatgaactgaacaaaaatcaggttactcctaatctgatgatcgattgcagccatgccaacagccgcaaggattaccgccggcaaatggaggtagcacaggatattgccgcacagattcaggcaggtgaacagcacattatgggcgtaatggtagaaagtaatctgatggccggacgacaggataacccggaaaattacggtcagagtattaccgatgcctgtattggctgggaagaaacagaaactatgcttgccttactggcacaggctgcacaggcacgtcagcaaaagtaa

SEQ ID NO: 89038 - protein, 249 aa, Apis mellifera
MPHINRWLRCVLWLRVCSYDINYGLRLARKLLLELNNMGMPAATEFLDMITPQYFADLISWGAIGARTTESQVHRELASGLSCPVGFKNGTDGNLKIAIDAIGASSHPHHFLSVTKAGHSAIVRTSGNPDCHIILRGGKEPNYSHEYVQAAVNELNKNQVTPNLMIDCSHANSRKDYRRQMEVAQDIAAQIQAGEQHIMGVMVESNLMAGRQDNPENYGQSITDACIGWEETETMLALLAQAAQARQQK

SEQ ID NO: 89039 - DNA, 1143 bp, Aspergillus nidulans FGSC A4; identical to SEQ ID NO: 75486
  CDS (1)..(1143)

SEQ ID NO: 89040 - protein, 380 aa, Aspergillus nidulans FGSC A4; identical to SEQ ID NO: 75487

SEQ ID NO: 89041 - DNA, 1089 bp, Aspergillus nidulans FGSC A4; identical to SEQ ID NO: 75488
  CDS (1)..(1089)

SEQ ID NO: 89042 - protein, 362 aa, Aspergillus nidulans FGSC A4; identical to SEQ ID NO: 75489

SEQ ID NO: 89043 - DNA, 1182 bp, Ustilago maydis 521; identical to SEQ ID NO: 75490
  CDS (1)..(1182)

SEQ ID NO: 89044 - protein, 393 aa, Ustilago maydis 521; identical to SEQ ID NO: 75491

SEQ ID NO: 89045 - DNA, 1560 bp, Ustilago maydis 521; identical to SEQ ID NO: 75492
  CDS (1)..(1560)

SEQ ID NO: 89046 - protein, 519 aa, Ustilago maydis 521; identical to SEQ ID NO: 75493

SEQ ID NO: 89047 - DNA, 1068 bp, Prochlorococcus marinus str. MIT 9515; identical to SEQ ID NO: 75498
  CDS (1)..(1068): transl_table=11

SEQ ID NO: 89048 - protein, 355 aa, Prochlorococcus marinus str. MIT 9515; identical to SEQ ID NO: 75499

SEQ ID NO: 89049 - DNA, 1083 bp, Prochlorococcus marinus str. MIT 9303; identical to SEQ ID NO: 75502
  CDS (1)..(1083): transl_table=11

SEQ ID NO: 89050 - protein, 360 aa, Prochlorococcus marinus str. MIT 9303; identical to SEQ ID NO: 75503

SEQ ID NO: 89051 - DNA, 1053 bp, Mycobacterium sp. JLS; identical to SEQ ID NO: 75504
  CDS (1)..(1053): transl_table=11

SEQ ID NO: 89052 - protein, 350 aa, Mycobacterium sp. JLS; identical to SEQ ID NO: 75505

SEQ ID NO: 89053 - DNA, 1092 bp, Candidatus Protochlamydia amoebophila UWE25; identical to SEQ ID NO: 75518
  CDS (1)..(1092): transl_table=11

SEQ ID NO: 89054 - protein, 363 aa, Candidatus Protochlamydia amoebophila UWE25; identical to SEQ ID NO: 75519

SEQ ID NO: 89055 - DNA, 1056 bp, Acinetobacter sp. ADP1; identical to SEQ ID NO: 75520
  CDS (1)..(1056): transl_table=11

SEQ ID NO: 89056 - protein, 351 aa, Acinetobacter sp. ADP1; identical to SEQ ID NO: 75521

SEQ ID NO: 89057 - DNA, 1113 bp, Acinetobacter sp. ADP1; identical to SEQ ID NO: 75522
  CDS (1)..(1113): transl_table=11

SEQ ID NO: 89058 - protein, 370 aa, Acinetobacter sp. ADP1; identical to SEQ ID NO: 75523

SEQ ID NO: 89059 - DNA, 1056 bp, Erwinia carotovora subsp. atroseptica SCRI1043; identical to SEQ ID NO: 75524
  CDS (1)..(1056): transl_table=11

SEQ ID NO: 89060 - protein, 351 aa, Erwinia carotovora subsp. atroseptica SCRI1043; identical to SEQ ID NO: 75525

SEQ ID NO: 89061 - DNA, 1047 bp, Erwinia carotovora subsp. atroseptica SCRI1043; identical to SEQ ID NO: 75526
  CDS (1)..(1047): transl_table=11

SEQ ID NO: 89062 - protein, 348 aa, Erwinia carotovora subsp. atroseptica SCRI1043; identical to SEQ ID NO: 75527

SEQ ID NO: 89063 - DNA, 1074 bp, Erwinia carotovora subsp. atroseptica SCRI1043; identical to SEQ ID NO: 75528
  CDS (1)..(1074): transl_table=11

SEQ ID NO: 89064 - protein, 357 aa, Erwinia carotovora subsp. atroseptica SCRI1043; identical to SEQ ID NO: 75529

SEQ ID NO: 89065 - DNA, 1071 bp, Yersinia pseudotuberculosis IP 32953; identical to SEQ ID NO: 75322
  CDS (1)..(1071): transl_table=11

SEQ ID NO: 89066 - protein, 356 aa, Yersinia pseudotuberculosis IP 32953; identical to SEQ ID NO: 75323

SEQ ID NO: 89067 - DNA, 1053 bp, Yersinia pseudotuberculosis IP 32953; identical to SEQ ID NO: 75346
  CDS (1)..(1053): transl_table=11

SEQ ID NO: 89068 - protein, 350 aa, Yersinia pseudotuberculosis IP 32953; identical to SEQ ID NO: 75347

SEQ ID NO: 89069 - DNA, 1047 bp, Yersinia pseudotuberculosis IP 32953; identical to SEQ ID NO: 75530
  CDS (1)..(1047): transl_table=11

SEQ ID NO: 89070 - protein, 348 aa, Yersinia pseudotuberculosis IP 32953; identical to SEQ ID NO: 75531

SEQ ID NO: 89071 - DNA, 1056 bp, Mannheimia succiniciproducens MBEL55E; identical to SEQ ID NO: 75532
  CDS (1)..(1056): transl_table=11

SEQ ID NO: 89072 - protein, 351 aa, Mannheimia succiniciproducens MBEL55E; identical to SEQ ID NO: 75533

SEQ ID NO: 89073 - DNA, 1155 bp, Mannheimia succiniciproducens MBEL55E; identical to SEQ ID NO: 75534
  CDS (1)..(1155): transl_table=11

SEQ ID NO: 89074 - protein, 384 aa, Mannheimia succiniciproducens MBEL55E; identical to SEQ ID NO: 75535

SEQ ID NO: 89075 - DNA, 1074 bp, Burkholderia mallei ATCC 23344; identical to SEQ ID NO: 75536
  CDS (1)..(1074): transl_table=11

SEQ ID NO: 89076 - protein, 357 aa, Burkholderia mallei ATCC 23344; identical to SEQ ID NO: 75537

SEQ ID NO: 89077 - DNA, 1074 bp, Burkholderia pseudomallei K96243; identical to SEQ ID NO: 75538
  CDS (1)..(1074): transl_table=11

SEQ ID NO: 89078 - protein, 357 aa, Burkholderia pseudomallei K96243; identical to SEQ ID NO: 75539

SEQ ID NO: 89079 - DNA, 1119 bp, Burkholderia pseudomallei K96243
  CDS (1)..(1119): transl_table=11
atgcaaaacatcgacaatccgcaacgcgatcgggaaaccggcttcgccgacgcgacgcaggacacgacgcgcatcgacgacgtgcgcatcggcgcggtgcgcccgctcatctcgcccgcgctgctgcaggacgaactgccggtgccgagcgccgtccaggcgctcgtcgaagcgagccgcgacgcgatcggcgacgtgctgcacggccgcgacgaccgcctgctcgcgatcgtcggcccgtgctcgatccacgatcacgatcaggcgctcgactacgcgcgccggctgaaaagcgccgccgacgcgctgcgcgacgacctgctgatcgtgatgcgcgtgtatttcgagaagccgcgcacgacggtcggctggaagggctacatcaacgatccgcgcctcgacggcagcttccgcatcaacgaagggctgcgcgccgcgcgccggctgctgatcgacatcaacgcgctcggcctgcccgccggcaccgaattcctcgatctgctgagcccgcagtacatcgcggatctgatcgcctggggcgcgatcggcgcgcgcacgaccgagagccagagccaccggcagctcgcgtcggggctgagctgcccgatcggcttcaagaacggcaccgacggcggcgtgcaggtcgcggccgacgcgatcgtcgcggcgcgcgcgagccacgcgttcatgggcatgacgaagatggggatggccgcgattttcgagacgcgcggcaacgacgccgcgcacgtgatcctgcgcggcggcaagcggggcccgaactacgatcgcgcgagcgtcgacgaggcgtgcgcggtgctgcgcgcggcgggccagcgcgagcaggtgatgatcgactgctcgcacgcgaattcgaacaagtcgcacctgcggcaggtcgacgtcgccgaggacctcgcgcgccagttgtcggacggcgagcgacgcatcaccggcgtgatggtcgagagcaacctggaggccggccggcaggacctgaagcccggcgtgccgctgcaatacggcgtgtcgatcaccgacgcgtgcctgagctgggcgcagaccgagcccgtgctcgacacgctcgcgcaggcggtgcggcggcggcgcgccgcctga

SEQ ID NO: 89080 - protein, 372 aa, Burkholderia pseudomallei K96243
MQNIDNPQRDRETGFADATQDTTRIDDVRIGAVRPLISPALLQDELPVPSAVQALVEASRDAIGDVLHGRDDRLLAIVGPCSIHDHDQALDYARRLKSAADALRDDLLIVMRVYFEKPRTTVGWKGYINDPRLDGSFRINEGLRAARRLLIDINALGLPAGTEFLDLLSPQYIADLIAWGAIGARTTESQSHRQLASGLSCPIGFKNGTDGGVQVAADAIVAARASHAFMGMTKMGMAAIFETRGNDAAHVILRGGKRGPNYDRASVDEACAVLRAAGQREQVMIDCSHANSNKSHLRQVDVAEDLARQLSDGERRITGVMVESNLEAGRQDLKPGVPLQYGVSITDACLSWAQTEPVLDTLAQAVRRRRAA

SEQ ID NO: 89081 - DNA, 1092 bp, Methylococcus capsulatus str. Bath; identical to SEQ ID NO: 75540
  CDS (1)..(1092): transl_table=11

SEQ ID NO: 89082 - protein, 363 aa, Methylococcus capsulatus str. Bath; identical to SEQ ID NO: 75541

SEQ ID NO: 89083 - DNA, 1083 bp, Azoarcus sp. EbN1; identical to SEQ ID NO: 75542
  CDS (1)..(1083): transl_table=11

SEQ ID NO: 89084 - protein, 360 aa, Azoarcus sp. EbN1; identical to SEQ ID NO: 75543

SEQ ID NO: 89085 - DNA, 1080 bp, Azoarcus sp. EbN1; identical to SEQ ID NO: 75544
  CDS (1)..(1080): transl_table=11

SEQ ID NO: 89086 - protein, 359 aa, Azoarcus sp. EbN1; identical to SEQ ID NO: 75545

SEQ ID NO: 89087 - DNA, 1089 bp, Pseudomonas syringae pv. syringae B728a; identical to SEQ ID NO: 75548
  CDS (1)..(1089): transl_table=11

SEQ ID NO: 89088 - protein, 362 aa, Pseudomonas syringae pv. syringae B728a; identical to SEQ ID NO: 75549

SEQ ID NO: 89089 - DNA, 1083 bp, Pseudomonas syringae pv. syringae B728a; identical to SEQ ID NO: 75550
  CDS (1)..(1083): transl_table=11

SEQ ID NO: 89090 - protein, 360 aa, Pseudomonas syringae pv. syringae B728a; identical to SEQ ID NO: 75551

SEQ ID NO: 89091 - DNA, 1089 bp, Haemophilus influenzae 86-028NP; identical to SEQ ID NO: 75552
  CDS (1)..(1089): transl_table=11

SEQ ID NO: 89092 - protein, 362 aa, Haemophilus influenzae 86-028NP; identical to SEQ ID NO: 75553

SEQ ID NO: 89093 - DNA, 1077 bp, Pseudomonas fluorescens Pf-5; identical to SEQ ID NO: 75556
  CDS (1)..(1077): transl_table=11

SEQ ID NO: 89094 - protein, 358 aa, Pseudomonas fluorescens Pf-5; identical to SEQ ID NO: 75557

SEQ ID NO: 89095 - DNA, 1083 bp, Psychrobacter arcticus 273-4; identical to SEQ ID NO: 75558
  CDS (1)..(1083): transl_table=11

SEQ ID NO: 89096 - protein, 360 aa, Psychrobacter arcticus 273-4; identical to SEQ ID NO: 75559

SEQ ID NO: 89097 - DNA, 1059 bp, Colwellia psychrerythraea 34H; identical to SEQ ID NO: 75560
  CDS (1)..(1059): transl_table=11

SEQ ID NO: 89098 - protein, 352 aa, Colwellia psychrerythraea 34H; identical to SEQ ID NO: 75561

SEQ ID NO: 89099 - DNA, 1053 bp, Colwellia psychrerythraea 34H; identical to SEQ ID NO: 75562
  CDS (1)..(1053): transl_table=11

SEQ ID NO: 89100 - protein, 350 aa, Colwellia psychrerythraea 34H; identical to SEQ ID NO: 75563

SEQ ID NO: 89101 - DNA, 1068 bp, Colwellia psychrerythraea 34H; identical to SEQ ID NO: 75564
  CDS (1)..(1068): transl_table=11

SEQ ID NO: 89102 - protein, 355 aa, Colwellia psychrerythraea 34H; identical to SEQ ID NO: 75565

SEQ ID NO: 89103 - DNA, 1077 bp, Pseudomonas syringae pv. phaseolicola 1448A; identical to SEQ ID NO: 75566
  CDS (1)..(1077): transl_table=11

SEQ ID NO: 89104 - protein, 358 aa, Pseudomonas syringae pv. phaseolicola 1448A; identical to SEQ ID NO: 75567

SEQ ID NO: 89105 - DNA, 1083 bp, Pseudomonas syringae pv. phaseolicola 1448A; identical to SEQ ID NO: 75568
  CDS (1)..(1083): transl_table=11

SEQ ID NO: 89106 - protein, 360 aa, Pseudomonas syringae pv. phaseolicola 1448A; identical to SEQ ID NO: 75569

SEQ ID NO: 89107 - DNA, 1026 bp, Dechloromonas aromatica RCB; identical to SEQ ID NO: 75570
  CDS (1)..(1026): transl_table=11

SEQ ID NO: 89108 - protein, 341 aa, Dechloromonas aromatica RCB; identical to SEQ ID NO: 75571

SEQ ID NO: 89109 - DNA, 1080 bp, Dechloromonas aromatica RCB; identical to SEQ ID NO: 75572
  CDS (1)..(1080): transl_table=11

SEQ ID NO: 89110 - protein, 359 aa, Dechloromonas aromatica RCB; identical to SEQ ID NO: 75573

SEQ ID NO: 89111 - DNA, 1062 bp, Thermobifida fusca YX; identical to SEQ ID NO: 75574
  CDS (1)..(1062): transl_table=11

SEQ ID NO: 89112 - protein, 353 aa, Thermobifida fusca YX; identical to SEQ ID NO: 75575

SEQ ID NO: 89113 - DNA, 1071 bp, Prochlorococcus marinus str. NATL2A; identical to SEQ ID NO: 75576
  CDS (1)..(1071): transl_table=11

SEQ ID NO: 89114 - protein, 356 aa, Prochlorococcus marinus str. NATL2A; identical to SEQ ID NO: 75577

SEQ ID NO: 89115 - DNA, 1080 bp, Ralstonia eutropha JMP134; identical to SEQ ID NO: 75578
  CDS (1)..(1080): transl_table=11

SEQ ID NO: 89116 - protein, 359 aa, Ralstonia eutropha JMP134; identical to SEQ ID NO: 75579

SEQ ID NO: 89117 - DNA, 1134 bp, Ralstonia eutropha JMP134; identical to SEQ ID NO: 75580
  CDS (1)..(1134): transl_table=11

SEQ ID NO: 89118 - protein, 377 aa, Ralstonia eutropha JMP134; identical to SEQ ID NO: 75581

SEQ ID NO: 89119 - DNA, 1077 bp, Thiobacillus denitrificans ATCC 25259; identical to SEQ ID NO: 75582
  CDS (1)..(1077): transl_table=11

SEQ ID NO: 89120 - protein, 358 aa, Thiobacillus denitrificans ATCC 25259; identical to SEQ ID NO: 75583

SEQ ID NO: 89121 - DNA, 1131 bp, Anabaena variabilis ATCC 29413; identical to SEQ ID NO: 75584
  CDS (1)..(1131): transl_table=11

SEQ ID NO: 89122 - protein, 376 aa, Anabaena variabilis ATCC 29413; identical to SEQ ID NO: 75585

SEQ ID NO: 89123 - DNA, 1008 bp, Streptococcus agalactiae A909; identical to SEQ ID NO: 75586
  CDS (1)..(1008): transl_table=11

SEQ ID NO: 89124 - protein, 335 aa, Streptococcus agalactiae A909; identical to SEQ ID NO: 75587

SEQ ID NO: 89125 - DNA, 1077 bp, Pseudomonas fluorescens PfO-1; identical to SEQ ID NO: 75590
  CDS (1)..(1077): transl_table=11

SEQ ID NO: 89126 - protein, 358 aa, Pseudomonas fluorescens PfO-1; identical to SEQ ID NO: 75591

SEQ ID NO: 89127 - DNA, 1074 bp, Burkholderia sp. 383; identical to SEQ ID NO: 75592
  CDS (1)..(1074): transl_table=11

SEQ ID NO: 89128 - protein, 357 aa, Burkholderia sp. 383; identical to SEQ ID NO: 75593

SEQ ID NO: 89129 - DNA, 1131 bp, Burkholderia sp. 383; identical to SEQ ID NO: 75594
  CDS (1)..(1131): transl_table=11

SEQ ID NO: 89130 - protein, 376 aa, Burkholderia sp. 383; identical to SEQ ID NO: 75595

SEQ ID NO: 89131 - DNA, 1068 bp, Synechococcus sp. CC9605; identical to SEQ ID NO: 75596
  CDS (1)..(1068): transl_table=11

SEQ ID NO: 89132 - protein, 355 aa, Synechococcus sp. CC9605; identical to SEQ ID NO: 75597

SEQ ID NO: 89133 - DNA, 1068 bp, Geobacter metallireducens GS-15; identical to SEQ ID NO: 75598
  CDS (1)..(1068): transl_table=11

SEQ ID NO: 89134 - protein, 355 aa, Geobacter metallireducens GS-15; identical to SEQ ID NO: 75599

SEQ ID NO: 89135 - DNA, 1068 bp, Prochlorococcus marinus str. MIT 9312; identical to SEQ ID NO: 75600
  CDS (1)..(1068): transl_table=11

SEQ ID NO: 89136 - protein, 355 aa, Prochlorococcus marinus str. MIT 9312; identical to SEQ ID NO: 75601

SEQ ID NO: 89137 - DNA, 1065 bp, Synechococcus elongatus PCC 7942; identical to SEQ ID NO: 75602
  CDS (1)..(1065): transl_table=11

SEQ ID NO: 89138 - protein, 354 aa, Synechococcus elongatus PCC 7942; identical to SEQ ID NO: 75603

SEQ ID NO: 89139 - DNA, 1119 bp, Burkholderia thailandensis E264; identical to SEQ ID NO: 75604
  CDS (1)..(1119): transl_table=11

SEQ ID NO: 89140 - protein, 372 aa, Burkholderia thailandensis E264; identical to SEQ ID NO: 75605

SEQ ID NO: 89141 - DNA, 1074 bp, Burkholderia thailandensis E264; identical to SEQ ID NO: 75606
  CDS (1)..(1074): transl_table=11

SEQ ID NO: 89142 - protein, 357 aa, Burkholderia thailandensis E264; identical to SEQ ID NO: 75607

SEQ ID NO: 89143 - DNA, 1386 bp, Syntrophus aciditrophicus SB; identical to SEQ ID NO: 75608
  CDS (1)..(1386): transl_table=11

SEQ ID NO: 89144 - protein, 461 aa, Syntrophus aciditrophicus SB; identical to SEQ ID NO: 75609

SEQ ID NO: 89145 - DNA, 1062 bp, Saccharophagus degradans 2-40; identical to SEQ ID NO: 75614
  CDS (1)..(1062): transl_table=11

SEQ ID NO: 89146 - protein, 353 aa, Saccharophagus degradans 2-40; identical to SEQ ID NO: 75615

SEQ ID NO: 89147 - DNA, 1083 bp, Methylobacillus flagellatus KT; identical to SEQ ID NO: 75616
  CDS (1)..(1083): transl_table=11

SEQ ID NO: 89148 - protein, 360 aa, Methylobacillus flagellatus KT; identical to SEQ ID NO: 75617

SEQ ID NO: 89149 - DNA, 1119 bp, Burkholderia xenovorans LB400; identical to SEQ ID NO: 75618
  CDS (1)..(1119): transl_table=11

SEQ ID NO: 89150 - protein, 372 aa, Burkholderia xenovorans LB400; identical to SEQ ID NO: 75619

SEQ ID NO: 89151 - DNA, 1074 bp, Burkholderia xenovorans LB400; identical to SEQ ID NO: 75620
  CDS (1)..(1074): transl_table=11

SEQ ID NO: 89152 - protein, 357 aa, Burkholderia xenovorans LB400; identical to SEQ ID NO: 75621

SEQ ID NO: 89153 - DNA, 1080 bp, Ralstonia metallidurans CH34; identical to SEQ ID NO: 75622
  CDS (1)..(1080): transl_table=11

SEQ ID NO: 89154 - protein, 359 aa, Ralstonia metallidurans CH34; identical to SEQ ID NO: 75623

SEQ ID NO: 89155 - DNA, 1143 bp, Ralstonia metallidurans CH34; identical to SEQ ID NO: 75624
  CDS (1)..(1143): transl_table=11

SEQ ID NO: 89156 - protein, 380 aa, Ralstonia metallidurans CH34; identical to SEQ ID NO: 75625

SEQ ID NO: 89157 - DNA, 1056 bp, Acidobacteria bacterium Ellin345; identical to SEQ ID NO: 75626
  CDS (1)..(1056): transl_table=11

SEQ ID NO: 89158 - protein, 351 aa, Acidobacteria bacterium Ellin345; identical to SEQ ID NO: 75627

SEQ ID NO: 89159 - DNA, 1095 bp, Silicibacter sp. TM1040; identical to SEQ ID NO: 75628
  CDS (1)..(1095): transl_table=11

SEQ ID NO: 89160 - protein, 364 aa, Silicibacter sp. TM1040; identical to SEQ ID NO: 75629

SEQ ID NO: 89161 - DNA, 1053 bp, Mycobacterium sp. MCS; identical to SEQ ID NO: 75670
  CDS (1)..(1053): transl_table=11

SEQ ID NO: 89162 - protein, 350 aa, Mycobacterium sp. MCS; identical to SEQ ID NO: 75671

SEQ ID NO: 89163 - DNA, 1062 bp, Rubrobacter xylanophilus DSM 9941; identical to SEQ ID NO: 75630
  CDS (1)..(1062): transl_table=11

SEQ ID NO: 89164 - protein, 353 aa, Rubrobacter xylanophilus DSM 9941; identical to SEQ ID NO: 75631

SEQ ID NO: 89165 - DNA, 1089 bp, Rhodococcus sp. RHA1; identical to SEQ ID NO: 75632
  CDS (1)..(1089): transl_table=11

SEQ ID NO: 89166 - protein, 362 aa, Rhodococcus sp. RHA1; identical to SEQ ID NO: 75633

SEQ ID NO: 89167 - DNA, 1080 bp, Haemophilus somnus 129PT; identical to SEQ ID NO: 75634
  CDS (1)..(1080): transl_table=11

SEQ ID NO: 89168 - protein, 359 aa, Haemophilus somnus 129PT; identical to SEQ ID NO: 75635

SEQ ID NO: 89169 - DNA, 1059 bp, Synechococcus sp. CC9311; identical to SEQ ID NO: 75636
  CDS (1)..(1059): transl_table=11

SEQ ID NO: 89170 - protein, 352 aa, Synechococcus sp. CC9311; identical to SEQ ID NO: 75637

SEQ ID NO: 89171 - DNA, 1059 bp, Shewanella sp. MR-4; identical to SEQ ID NO: 75642
  CDS (1)..(1059): transl_table=11

SEQ ID NO: 89172 - protein, 352 aa, Shewanella sp. MR-4; identical to SEQ ID NO: 75643

SEQ ID NO: 89173 - DNA, 1059 bp, Shewanella sp. MR-7; identical to SEQ ID NO: 75644
  CDS (1)..(1059): transl_table=11

SEQ ID NO: 89174 - protein, 352 aa, Shewanella sp. MR-7; identical to SEQ ID NO: 75645

SEQ ID NO: 89175 - DNA, 1092 bp, Shewanella sp. MR-7; identical to SEQ ID NO: 75646
  CDS (1)..(1092): transl_table=11

SEQ ID NO: 89176 - protein, 363 aa, Shewanella sp. MR-7; identical to SEQ ID NO: 75647

SEQ ID NO: 89177 - DNA, 1077 bp, Alkalilimnicola ehrlichei MLHE-1; identical to SEQ ID NO: 75648
  CDS (1)..(1077): transl_table=11

SEQ ID NO: 89178 - protein, 358 aa, Alkalilimnicola ehrlichei MLHE-1; identical to SEQ ID NO: 75649

SEQ ID NO: 89179 - DNA, 1062 bp, Rhizobium leguminosarum bv. viciae 3841; identical to SEQ ID NO: 75650
  CDS (1)..(1062): transl_table=11

SEQ ID NO: 89180 - protein, 353 aa, Rhizobium leguminosarum bv. viciae 3841; identical to SEQ ID NO: 75651

SEQ ID NO: 89181 - DNA, 1095 bp, Pseudomonas aeruginosa UCBPP-PA14; identical to SEQ ID NO: 75652
  CDS (1)..(1095): transl_table=11

SEQ ID NO: 89182 - protein, 364 aa, Pseudomonas aeruginosa UCBPP-PA14; identical to SEQ ID NO: 75653

SEQ ID NO: 89183 - DNA, 1065 bp, Shewanella sp. ANA-3; identical to SEQ ID NO: 75656
  CDS (1)..(1065): transl_table=11

SEQ ID NO: 89184 - protein, 354 aa, Shewanella sp. ANA-3; identical to SEQ ID NO: 75657

SEQ ID NO: 89185 - DNA, 1092 bp, Shewanella sp. ANA-3; identical to SEQ ID NO: 75658
  CDS (1)..(1092): transl_table=11

SEQ ID NO: 89186 - protein, 363 aa, Shewanella sp. ANA-3; identical to SEQ ID NO: 75659

SEQ ID NO: 89187 - DNA, 1059 bp, Shewanella sp. ANA-3; identical to SEQ ID NO: 75660
  CDS (1)..(1059): transl_table=11

SEQ ID NO: 89188 - protein, 352 aa, Shewanella sp. ANA-3; identical to SEQ ID NO: 75661

SEQ ID NO: 89189 - DNA, 1062 bp, Mycobacterium avium 104; identical to SEQ ID NO: 75662
  CDS (1)..(1062): transl_table=11

SEQ ID NO: 89190 - protein, 353 aa, Mycobacterium avium 104; identical to SEQ ID NO: 75663

SEQ ID NO: 89191 - DNA, 1053 bp, Mycobacterium smegmatis str. MC2 155; identical to SEQ ID NO: 75664
  CDS (1)..(1053): transl_table=11

SEQ ID NO: 89192 - protein, 350 aa, Mycobacterium smegmatis str. MC2 155; identical to SEQ ID NO: 75665

SEQ ID NO: 89193 - DNA, 1077 bp, Azoarcus sp. BH72; identical to SEQ ID NO: 75666
  CDS (1)..(1077): transl_table=11

SEQ ID NO: 89194 - protein, 358 aa, Azoarcus sp. BH72; identical to SEQ ID NO: 75667

SEQ ID NO: 89195 - DNA, 1086 bp, Azoarcus sp. BH72; identical to SEQ ID NO: 75668
  CDS (1)..(1086): transl_table=11

SEQ ID NO: 89196 - protein, 361 aa, Azoarcus sp. BH72; identical to SEQ ID NO: 75669

SEQ ID NO: 89197 - DNA, 1059 bp, Nostoc punctiforme PCC 73102; identical to SEQ ID NO: 75678
  CDS (1)..(1059): transl_table=11

SEQ ID NO: 89198 - protein, 352 aa, Nostoc punctiforme PCC 73102; identical to SEQ ID NO: 75679

SEQ ID NO: 89199 - DNA, 1062 bp, Actinobacillus pleuropneumoniae serovar 1 str. 4074
  CDS (1)..(1062): transl_table=11
atgaacaccgtagttaatcaggatagtttgcataatgtgaatattgttgatgaaaaagtattactcaccccggccgagctaaaagccgaattacctttgcccgaatatctacgtaaacaaattgaaacatcgcgtcgagaaatctcggatattatccataaacgtgatcagcgtaaattaattgtgattggtccttgttctattcatgatccgattgccgccatcgaatacggcaaaaaattaaaggcgttagccgataccgtgtcggataaactttacatcgtcatgcgtgtatattttgaaaaaccgcgtactaccgtgggctggaaagggctgattaacgatccgaaaattgacgggactttcgatgtcgaaaccggcttacgtgtcgggcgtaagctctgtttggacctcgccgaattaggtttaccgttagcaaccgaagcacttgatccgatgacgccgcagtatttggctgatctcttcagttggtcggcgattggtgccagaacgaccgaatcgcaaacacaccgagaattggcttccggtttatctatggcggtcggttttaaaaacggcacggacggcagtttatccgtagcgattaatgcaatgcaatccgccgcacaaagccatagctttatcggcatcaaccaaaaaggtcaggtgaatttattgcatactaagggtaatccggatagccatgtgattctacgcggcggaaaaacacctaattttgaaaaacaatatgtggaagaatgtgaagccgcactacgtaaagccggtttagcggaagcgattatgattgactgtagccacggtaactcgaataaagattaccgtcgccaaccgcttgttgcggaagatgccttatcacaattattagccggcaatacttccattatcggtttaatgatcgaaagccacttaaatgccggtaaccaatcttctgatcaggctttcaatcaaatgcaatacggcgtatccattaccgacgcttgtatcgattggcaaacgacagaaaatctcttaaccgattttgctgaaaaattaagagcttaa

SEQ ID NO: 89200 - protein, 353 aa, Actinobacillus pleuropneumoniae serovar 1 str. 4074
MNTVVNQDSLHNVNIVDEKVLLTPAELKAELPLPEYLRKQIETSRREISDIIHKRDQRKLIVIGPCSIHDPIAAIEYGKKLKALADTVSDKLYIVMRVYFEKPRTTVGWKGLINDPKIDGTFDVETGLRVGRKLCLDLAELGLPLATEALDPMTPQYLADLFSWSAIGARTTESQTHRELASGLSMAVGFKNGTDGSLSVAINAMQSAAQSHSFIGINQKGQVNLLHTKGNPDSHVILRGGKTPNFEKQYVEECEAALRKAGLAEAIMIDCSHGNSNKDYRRQPLVAEDALSQLLAGNTSIIGLMIESHLNAGNQSSDQAFNQMQYGVSITDACIDWQTTENLLTDFAEKLRA

SEQ ID NO: 89201 - DNA, 1074 bp, Actinobacillus pleuropneumoniae serovar 1 str. 4074
  CDS (1)..(1074): transl_table=11
atgtcttataaaaatgatgatcttcgtattacgaatattgaacaacttttaccgccggttgcgctattggaacgttttcccgcaagcgatattgccgccgaaaccgtagaaaaagcacgtaaagccattcataaaattattcacggtgcggacgaccgtttattggtggtgatcggaccttgttccatccatgatcctaaagcggcgctagagtatgcacaacgtataaaaacaattcgtgcgaatcctaagattaatcaaaaccttgaagtggtaatgcgcgtttattttgaaaaaccgcgcacgaccgtcggttggaaagggttaatcaatgatccttatcttaacgaaacttacgcgttaaacgacggtttacgtatcgctcgtaaagtattatcggatattaacgatttaaccgtaccggcggcaggcgaatttttagatatgatcacaccgcaatatatggcggactttatgagttggggtgcaatcggcgcacgcacgaccgaatcgcaagttcatcgtgaattagcatccggtttatcttgtgcggtcggctttaaaaatgcgacaaacggcggtgtaaaaatcgcattagatgcaatcggtgcggcggaagctccgcatcatttcttatcagtcaccaaattcggacattccgcaattgtttctacggcaggtaatccggattgccatatcattttacgcggcggtgataaagggacgaactatgatgccgaatcggtcgccaaagtatgtgcggatatcgagaaatccggtcgccgaccgcacgtaatgattgatttcagtcatgccaacagccaaaaacaatttaaacgtcagatggacgtttgtgcggacgtatgccgacaaattgcaagcggttcggaactaatttccggtgtgatgattgaaagtcatttagtggaaggtcgccaagaattaggtgacggtaatttagcgcatttggtttacggacaaagtgtaacggatgcctgtatcggttgggaagatagcgaaaaagcgttgtttgccttggctgatgcggttgaacaacgccgcaaacatatttaa

SEQ ID NO: 89202 - protein, 357 aa, Actinobacillus pleuropneumoniae serovar 1 str. 4074
MSYKNDDLRITNIEQLLPPVALLERFPASDIAAETVEKARKAIHKIIHGADDRLLVVIGPCSIHDPKAALEYAQRIKTIRANPKINQNLEVVMRVYFEKPRTTVGWKGLINDPYLNETYALNDGLRIARKVLSDINDLTVPAAGEFLDMITPQYMADFMSWGAIGARTTESQVHRELASGLSCAVGFKNATNGGVKIALDAIGAAEAPHHFLSVTKFGHSAIVSTAGNPDCHIILRGGDKGTNYDAESVAKVCADIEKSGRRPHVMIDFSHANSQKQFKRQMDVCADVCRQIASGSELISGVMIESHLVEGRQELGDGNLAHLVYGQSVTDACIGWEDSEKALFALADAVEQRRKHI

SEQ ID NO: 89203 - DNA, 1089 bp, Haemophilus influenzae R2846; identical to SEQ ID NO: 75680
  CDS (1)..(1089): transl_table=11

SEQ ID NO: 89204 - protein, 362 aa, Haemophilus influenzae R2846; identical to SEQ ID NO: 75681

SEQ ID NO: 89205 - DNA, 1131 bp, Burkholderia vietnamiensis G4; identical to SEQ ID NO: 75510
  CDS (1)..(1131): transl_table=11

SEQ ID NO: 89206 - protein, 376 aa, Burkholderia vietnamiensis G4; identical to SEQ ID NO: 75511

SEQ ID NO: 89207 - DNA, 1074 bp, Burkholderia vietnamiensis G4; identical to SEQ ID NO: 75512
  CDS (1)..(1074): transl_table=11

SEQ ID NO: 89208 - protein, 357 aa, Burkholderia vietnamiensis G4; identical to SEQ ID NO: 75513

SEQ ID NO: 89209 - DNA, 1071 bp, Prosthecochloris aestuarii DSM 271; identical to SEQ ID NO: 75684
  CDS (1)..(1071): transl_table=11

SEQ ID NO: 89210 - protein, 356 aa, Prosthecochloris aestuarii DSM 271; identical to SEQ ID NO: 75685

SEQ ID NO: 89211 - DNA, 1164 bp, Xylella fastidiosa Ann-1; identical to SEQ ID NO: 75688
  CDS (1)..(1164): transl_table=11

SEQ ID NO: 89212 - protein, 387 aa, Xylella fastidiosa Ann-1; identical to SEQ ID NO: 75689

SEQ ID NO: 89213 - DNA, 1038 bp, Streptococcus suis 89/1591; identical to SEQ ID NO: 75690
  CDS (1)..(1038): transl_table=11

SEQ ID NO: 89214 - protein, 345 aa, Streptococcus suis 89/1591; identical to SEQ ID NO: 75691

SEQ ID NO: 89215 - DNA, 1026 bp, Streptococcus suis 89/1591; identical to SEQ ID NO: 75692
  CDS (1)..(1026): transl_table=11

SEQ ID NO: 89216 - protein, 341 aa, Streptococcus suis 89/1591; identical to SEQ ID NO: 75693

SEQ ID NO: 89217 - DNA, 1074 bp, Prochlorococcus marinus str. MIT 9211; identical to SEQ ID NO: 75694
  CDS (1)..(1074): transl_table=11

SEQ ID NO: 89218 - protein, 357 aa, Prochlorococcus marinus str. MIT 9211; identical to SEQ ID NO: 75695

SEQ ID NO: 89219 - DNA, 1089 bp, Synechococcus sp. RS9917; identical to SEQ ID NO: 75696
  CDS (1)..(1089): transl_table=11

SEQ ID NO: 89220 - protein, 362 aa, Synechococcus sp. RS9917; identical to SEQ ID NO: 75697

SEQ ID NO: 89221 - DNA, 1074 bp, Synechococcus sp. WH 5701; identical to SEQ ID NO: 75698
  CDS (1)..(1074): transl_table=11

SEQ ID NO: 89222 - protein, 357 aa, Synechococcus sp. WH 5701; identical to SEQ ID NO: 75699

SEQ ID NO: 89223 - DNA, 1065 bp, Synechococcus sp. WH 7805; identical to SEQ ID NO: 75700
  CDS (1)..(1065): transl_table=11

SEQ ID NO: 89224 - protein, 354 aa, Synechococcus sp. WH 7805; identical to SEQ ID NO: 75701

SEQ ID NO: 89225 - DNA, 1059 bp, Photobacterium sp. SKA34; identical to SEQ ID NO: 75702
  CDS (1)..(1059): transl_table=11

SEQ ID NO: 89226 - protein, 352 aa, Photobacterium sp. SKA34; identical to SEQ ID NO: 75703

SEQ ID NO: 89227 - DNA, 1071 bp, Photobacterium sp. SKA34; identical to SEQ ID NO: 75704
  CDS (1)..(1071): transl_table=11

SEQ ID NO: 89228 - protein, 356 aa, Photobacterium sp. SKA34; identical to SEQ ID NO: 75705

SEQ ID NO: 89229 - DNA, 1068 bp, Oceanospirillum sp. MED92; identical to SEQ ID NO: 75706
  CDS (1)..(1068): transl_table=11

SEQ ID NO: 89230 - protein, 355 aa, Oceanospirillum sp. MED92; identical to SEQ ID NO: 75707

SEQ ID NO: 89231 - DNA, 1068 bp, gamma proteobacterium HTCC2207; identical to SEQ ID NO: 75708
  CDS (1)..(1068): transl_table=11

SEQ ID NO: 89232 - protein, 355 aa, gamma proteobacterium HTCC2207; identical to SEQ ID NO: 75709

SEQ ID NO: 89233 - DNA, 1053 bp, Oceanobacter sp. RED65; identical to SEQ ID NO: 75710
  CDS (1)..(1053): transl_table=11

SEQ ID NO: 89234 - protein, 350 aa, Oceanobacter sp. RED65; identical to SEQ ID NO: 75711

SEQ ID NO: 89235 - DNA, 1068 bp, Oceanobacter sp. RED65; identical to SEQ ID NO: 75712
  CDS (1)..(1068): transl_table=11

SEQ ID NO: 89236 - protein, 355 aa, Oceanobacter sp. RED65; identical to SEQ ID NO: 75713

SEQ ID NO: 89237 - DNA, 1062 bp, Synechococcus sp. RS9916; identical to SEQ ID NO: 75714
  CDS (1)..(1062): transl_table=11

SEQ ID NO: 89238 - protein, 353 aa, Synechococcus sp. RS9916; identical to SEQ ID NO: 75715

SEQ ID NO: 89239 - DNA, 1050 bp, marine gamma proteobacterium HTCC2143; identical to SEQ ID NO: 75718
  CDS (1)..(1050): transl_table=11

SEQ ID NO: 89240 - protein, 349 aa, marine gamma proteobacterium HTCC2143; identical to SEQ ID NO: 75719

SEQ ID NO: 89241 - DNA, 1098 bp, marine gamma proteobacterium HTCC2143; identical to SEQ ID NO: 75720
  CDS (1)..(1098): transl_table=11

SEQ ID NO: 89242 - protein, 365 aa, marine gamma proteobacterium HTCC2143; identical to SEQ ID NO: 75721

SEQ ID NO: 89243 - DNA, 1077 bp, marine gamma proteobacterium HTCC2080; identical to SEQ ID NO: 75722
  CDS (1)..(1077): transl_table=11

SEQ ID NO: 89244 - protein, 358 aa, marine gamma proteobacterium HTCC2080; identical to SEQ ID NO: 75723

SEQ ID NO: 89245 - DNA, 1071 bp, marine gamma proteobacterium HTCC2080; identical to SEQ ID NO: 75724
  CDS (1)..(1071): transl_table=11

SEQ ID NO: 89246 - protein, 356 aa, marine gamma proteobacterium HTCC2080; identical to SEQ ID NO: 75725

SEQ ID NO: 89247 - DNA, 1137 bp, Aspergillus niger
  CDS (1)..(1137)
atgtcgttcttcattgaaaaccctaatgtcggggacagatgctccctcgaggattccagaattcgtggatacaaccctctcacaccccccaacctccttcagcatgagatcgccatgacggagaagtcccggcgaacggtcatggaaggtcgtgaggaggctattgctatcgtccagggcacagacaccgaccgtcgccgtttgctggttgtcatcggtccctgctccatccacgaccctgaaatggccctcgaatactgcgatcgcctcatgaagatgaaggagaagtacaaggatgagctgctgattgtcatgcgctcctacctcgagaagccccgtaccaccgtcggctggaagggtctcatcaacgaccccgacattgacaacagcttcaagatcaacaagggtcttcgcacctcccgtcaacttttcgtcgacctgaccaacaagggtatgcccatcgccagtgagatgctcgataccatctccccccagtttctggccgactgtctctccgtcggcgccgttggtgctcgcaccaccgagtcccaggtccaccgtgagttggcctcgggtctgtccttccccgttggtttcaagaacggtaccgacggctccctggatgtcgctgtcgatgccattggctccgtcaagcaccctcaccacttcctgtccgtcaccaagcccggtgtcgctgctatcgtcggcaccgtgggcaaccccgactgcttcgtcatcctccgtggtggcaagaagggccccaactacgatgcccagagcatcgccgaggctaaggccaagctgaccgcccagggcatgcctccccgcctcatggtcgactgcagccacggtaactcgcagaagaaccacaagaaccagcccaaggtggctgctgttctggccgagcaaatcgccgctggagagaccgccatcatgggtgtcatgatcgagagcaacatcaacgagggcaaccaaaaggttcctcccgagggcaaggccggcctcaagtacggtgtcagtatcaccgacgcctgcatccactgggaagacacggaacttgttctggagaacctggcacaggctgtgcgcacccgccgggaaaagcttgctatcaatggcaacggcaactcccaataa

SEQ ID NO: 89248 - protein, 378 aa, Aspergillus niger
MSFFIENPNVGDRCSLEDSRIRGYNPLTPPNLLQHEIAMTEKSRRTVMEGREEAIAIVQGTDTDRRRLLVVIGPCSIHDPEMALEYCDRLMKMKEKYKDELLIVMRSYLEKPRTTVGWKGLINDPDIDNSFKINKGLRTSRQLFVDLTNKGMPIASEMLDTISPQFLADCLSVGAVGARTTESQVHRELASGLSFPVGFKNGTDGSLDVAVDAIGSVKHPHHFLSVTKPGVAAIVGTVGNPDCFVILRGGKKGPNYDAQSIAEAKAKLTAQGMPPRLMVDCSHGNSQKNHKNQPKVAAVLAEQIAAGETAIMGVMIESNINEGNQKVPPEGKAGLKYGVSITDACIHWEDTELVLENLAQAVRTRREKLAINGNGNSQ

SEQ ID NO: 89249 - DNA, 1116 bp, Aspergillus niger
  CDS (1)..(1116)
atgcctttgatcagcaccacagaagtcaacgaggacactcgcgtcctgggatatgatcccctccttccccctcagtacctccagaatgagatccctggtaaaaaggaatccctcgaggccgtccgttctggccgcaatcaggccatgaagatcatcgagaagcgcgatgaccgtctgctggttgttgtcggtccttgctcgatccacgaccctgccacggccctcgaatatgcccagcgtctgaaggagctctccgagaagctttccgacgacctctgtgttattatgcgtgcctacctcgagaagccccgcaccacagtggggtggaagggtctgatcaacgaccccgacattgatgagtcctacaacatcaacaaaggtctccgtgtgtcacgtcagctctacgctgatcttaccagcatgggcatgcccattgccagtgagatgctggataccatctcccctcagtacttggccgatctgatctctctcggtgccattggtgcccgtaccaccgagtcgcaattgcaccgtgagctcgcctccggtctcagtttccccattggcttcaagaacggtaccgacggcaacctcaccgttgccattgatgccattggtgccgctgctcacccccaccgcttcctgggtgtcaccaagcaaggtctggctgccattaccaagaccgctggtaatgagcacggcttcgtcatcctccgtggaggtaacaagggcaccaactacgaccgtgagagcatcaaggccgcccgcgaggccctggcgggcaagaagcagcccgaggtcgtcatggtcgactgctcgcacggcaactccaacaagaaccaccgcaaccagcctctggtcgccaaggaggtctctgaccagctccgtgagggccaggatgccatcattggtgtcatgattgagtccaacatcaacgagggtaaccagaaggttccccccgagggtccttccggcctgcgcaagggtgtcagcatcactgacgcctgcattgactgggagaccaccgtccaggtcctggaggacctcgctgatggtgttcgtgccagacgcgccgccaaagccgctcaagccaaggccagcaatggcactcactga

SEQ ID NO: 89250 - protein, 371 aa, Aspergillus niger
MPLISTTEVNEDTRVLGYDPLLPPQYLQNEIPGKKESLEAVRSGRNQAMKIIEKRDDRLLVVVGPCSIHDPATALEYAQRLKELSEKLSDDLCVIMRAYLEKPRTTVGWKGLINDPDIDESYNINKGLRVSRQLYADLTSMGMPIASEMLDTISPQYLADLISLGAIGARTTESQLHRELASGLSFPIGFKNGTDGNLTVAIDAIGAAAHPHRFLGVTKQGLAAITKTAGNEHGFVILRGGNKGTNYDRESIKAAREALAGKKQPEVVMVDCSHGNSNKNHRNQPLVAKEVSDQLREGQDAIIGVMIESNINEGNQKVPPEGPSGLRKGVSITDACIDWETTVQVLEDLADGVRARRAAKAAQAKASNGTH

SEQ ID NO: 89251 - DNA, 1074 bp, Herbaspirillum seropedicae; identical to SEQ ID NO: 75734
  CDS (1)..(1074): transl_table=11

SEQ ID NO: 89252 - protein, 357 aa, Herbaspirillum seropedicae; identical to SEQ ID NO: 75735

SEQ ID NO: 89253 - DNA, 1089 bp, Amycolatopsis orientalis; identical to SEQ ID NO: 75736
  CDS (1)..(1089): transl_table=11

SEQ ID NO: 89254 - protein, 362 aa, Amycolatopsis orientalis; identical to SEQ ID NO: 75737

SEQ ID NO: 89255 - DNA, 1074 bp, Vibrio anguillarum; identical to SEQ ID NO: 75738
  CDS (1)..(1074): transl_table=11

SEQ ID NO: 89256 - protein, 357 aa, Vibrio anguillarum; identical to SEQ ID NO: 75739

SEQ ID NO: 89257 - DNA, 1074 bp, Vibrio anguillarum; identical to SEQ ID NO: 75740
  CDS (1)..(1074): transl_table=11

SEQ ID NO: 89258 - protein, 357 aa, Vibrio anguillarum; identical to SEQ ID NO: 75741

SEQ ID NO: 89259 - DNA, 1182 bp, Ustilago hordei; identical to SEQ ID NO: 75742
  CDS (1)..(1182)

SEQ ID NO: 89260 - protein, 393 aa, Ustilago hordei; identical to SEQ ID NO: 75743

SEQ ID NO: 89261 - DNA, 1065 bp, Pasteurella piscicida; identical to SEQ ID NO: 75744
  CDS (1)..(1065): transl_table=11

SEQ ID NO: 89262 - protein, 354 aa, Pasteurella piscicida; identical to SEQ ID NO: 75745

SEQ ID NO: 89263 - DNA, 1137 bp, Aspergillus oryzae; identical to SEQ ID NO: 75746
  CDS (1)..(1137)

SEQ ID NO: 89264 - protein, 378 aa, Aspergillus oryzae; identical to SEQ ID NO: 75747

SEQ ID NO: 89265 - DNA, 1095 bp, Aspergillus oryzae; identical to SEQ ID NO: 75748
  CDS (1)..(1095)

SEQ ID NO: 89266 - protein, 364 aa, Aspergillus oryzae; identical to SEQ ID NO: 75749

SEQ ID NO: 89267 - DNA, 1466 bp, Paxillus involutus; identical to SEQ ID NO: 75750
  CDS (67)..(1239)

SEQ ID NO: 89268 - protein, 390 aa, Paxillus involutus; identical to SEQ ID NO: 75751

SEQ ID NO: 89269 - DNA, 1131 bp, Cryptococcus neoformans; identical to SEQ ID NO: 75494
  CDS (1)..(1131)

SEQ ID NO: 89270 - protein, 376 aa, Cryptococcus neoformans; identical to SEQ ID NO: 75495

SEQ ID NO: 89271 - DNA, 1098 bp, Amycolatopsis balhimycina; identical to SEQ ID NO: 75756
  CDS (1)..(1098): transl_table=11

SEQ ID NO: 89272 - protein, 365 aa, Amycolatopsis balhimycina; identical to SEQ ID NO: 75757

SEQ ID NO: 89273 - DNA, 1086 bp, Stigmatella aurantiaca; identical to SEQ ID NO: 75760
  CDS (1)..(1086): transl_table=11

SEQ ID NO: 89274 - protein, 361 aa, Stigmatella aurantiaca; identical to SEQ ID NO: 75761

SEQ ID NO: 89275 - DNA, 1083 bp, Amycolatopsis mediterranei; identical to SEQ ID NO: 75762
  CDS (1)..(1083): transl_table=11

SEQ ID NO: 89276 - protein, 360 aa, Amycolatopsis mediterranei; identical to SEQ ID NO: 75763

SEQ ID NO: 89277 - DNA, 1125 bp, Emericella nidulans; identical to SEQ ID NO: 75764
  CDS (1)..(1125)

SEQ ID NO: 89278 - protein, 374 aa, Emericella nidulans; identical to SEQ ID NO: 75765

SEQ ID NO: 89279 - DNA, 1502 bp, Candida albicans
  CDS (336)..(1442): transl_table=12
acactgactaatcattaggccgcagagagagcaaggtactcaccaactcaccatgaattgtagattaattattagacattagtacacacactacaaactataaactataggcacgcactccctaatgactaacaattgtacagtttttgtgtcattgactaattgttctaatttttttttttcagtttaaatatcccgaaccaattttccaaatttttcatatctgtttttcctttttcttttttaattcctttctagatatcttgtatatatactcaatcctcatagatatattccatatatatatatatattaattcattacattaacacacaatgtttattacaaacgaacacgttggtgacagaagtcgtatggaagattggagaatccgtggttacgatccattaactcctccagatcttttacaacatgaatacccattaactcctgaatcacagaagattatcgttgaaggtagaaatgctgcttgtgatattttgaacggcaaagaccgaagattgattggaccttgttcgattcatgatcctcaagctgccttggattactgtgaaagattatatcaagcttctgaaaaacacaagggtgaattattgattgttatgagagcatacttggaaaaaccaagaaccacagttggttggaaaggtttaattaacgacccagatatcgatggtaccttccatataaataaggggttgagaattgctagaaagttgtttgttcaattaacttcaaaattaccaattgctggtgaaatgttggatacaatctcacctcaatttttatctgatttattctcagtgggggctattggtgcaagaaccaccgaatcgcaattgcacagagagttggcatctggttatcattcccagttggattcaaaaacggtaccgatggtactttgggtgttgccattgacgcctttgagagctgcttctcatccacatcatttcctttcagtcacaaaacctggtgttgttgctattgttgggactgatgggaaccaagactgttttgttatattaagaggtggtaagaagggtacaaactatgatgccaaatccgtacaagaaacacaagaagaattaatcaaatcaaaagttgttaccgaaatgaaacctggtccaagaattatggttgattgttctcatggtaattctaataaagatcatagaaaccaaccgaaagttgcccaagttgttgctgaacaagtggccggtggtgataaatccatatgtggattaatgattgagagtaatataaatgatggaagacaagatgttccaccaaaggaacaaggtggtaaagatgctttgaaatacggtgtttctattaccgatgcttgtattggttgggaaaccacagaagaagttttggaggttttagccaatgctgtcaaaaccagaagatctttatagttgattatgtaatcctatttttattaatttgaacaaacaatgatattaaaaaaaaaaaaa

SEQ ID NO: 89280 - protein, 368 aa, Candida albicans; identical to SEQ ID NO: 75767

SEQ ID NO: 89281 - DNA, 1071 bp, Escherichia coli; identical to SEQ ID NO: 75768
  CDS (1)..(1071): transl_table=11

SEQ ID NO: 89282 - protein, 356 aa, Escherichia coli; identical to SEQ ID NO: 75769

SEQ ID NO: 89283 - DNA, 1071 bp, Salmonella typhi; identical to SEQ ID NO: 75770
  CDS (1)..(1071): transl_table=11

SEQ ID NO: 89284 - protein, 356 aa, Salmonella typhi; identical to SEQ ID NO: 75771

SEQ ID NO: 89285 - DNA, 1107 bp, Schizosaccharomyces pombe; identical to SEQ ID NO: 75772
  CDS (1)..(1107)

SEQ ID NO: 89286 - protein, 368 aa, Schizosaccharomyces pombe; identical to SEQ ID NO: 75773

SEQ ID NO: 89287 - DNA, 1113 bp, Saccharomyces cerevisiae; identical to SEQ ID NO: 75774
  CDS (1)..(1113)

SEQ ID NO: 89288 - protein, 370 aa, Saccharomyces cerevisiae; identical to SEQ ID NO: 75775

SEQ ID NO: 89289 - DNA, 1113 bp, Candida albicans; identical to SEQ ID NO: 75776
  CDS (1)..(1113): transl_table=12

SEQ ID NO: 89290 - protein, 370 aa, Candida albicans; identical to SEQ ID NO: 75777

SEQ ID NO: 89291 - DNA, 1047 bp, Buchnera aphidicola subsp; identical to SEQ ID NO: 75782
  CDS (1)..(1047): transl_table=11

SEQ ID NO: 89292 - protein, 348 aa, Buchnera aphidicola subsp; identical to SEQ ID NO: 75783

SEQ ID NO: 89293 - DNA, 1047 bp, Buchnera aphidicola subsp
  CDS (1)..(1047): transl_table=11
atgaaaaaaacagatgaattgcgaacaatacgcattgacccgttagttactccagctgaattagcacaacgtcatgttataactccttcaattatggatactgttatttcaacgagaaaaaatattgctaatattatgacgggattagatcctcgtttacttgtcattataggaccttgttcagtacatgatcctgttgctgcagtagaatatgctggaagattacaagtattgcgtaagaaatatgaatcgcgtcttgaaattgttatgcgaacttattttgaaaaacctcgtacagtaataggttggaaggggctaatttcagatcctgaccttaatggtagctttcacgtaaataatggtttatcgatagctagaaaattattgttggacattaataagttaggagttccagctgcgactgaatttttagacatggtaataggacaatttattgctgatctcattagttggggcgctattggtgcgcgtactactgaaagtcaaattcatcgtgaaatggcatcagcattatcttgtcctgtaggttttaaaaatggtacggatggtaatataagaattgctgtagatgctattcgtgctgctagtgtagaacatttatttttagcgcctaacaaatatggtcaaatgactattaattataccagtggaaatcccttcggtcatgttattatgcgcggtggaaaatctccaaattatcatgctaaagatattgctattgcaataaaatacttacacgaatttactctttcagagtatttgatgatagactttagtcatggaaattgtttaaaacaacatcgtcgtcaattagatgtgggtgaatctattgctaagcagataagagatggatcaacagctatttttggtgttatgattgaaagttttttagaagaaggttctcaaaaagttattgacaataaatctttagtatatggaaaatctattactgatccttgtttgggttggaatgatagtgcatttttacttgaaaagttggcaaatgctgttgatagtagattttaa

SEQ ID NO: 89294 - protein, 348 aa, Buchnera aphidicola subsp
MKKTDELRTIRIDPLVTPAELAQRHVITPSIMDTVISTRKNIANIMTGLDPRLLVIIGPCSVHDPVAAVEYAGRLQVLRKKYESRLEIVMRTYFEKPRTVIGWKGLISDPDLNGSFHVNNGLSIARKLLLDINKLGVPAATEFLDMVIGQFIADLISWGAIGARTTESQIHREMASALSCPVGFKNGTDGNIRIAVDAIRAASVEHLFLAPNKYGQMTINYTSGNPFGHVIMRGGKSPNYHAKDIAIAIKYLHEFTLSEYLMIDFSHGNCLKQHRRQLDVGESIAKQIRDGSTAIFGVMIESFLEEGSQKVIDNKSLVYGKSITDPCLGWNDSAFLLEKLANAVDSRF

SEQ ID NO: 89295 - DNA, 1047 bp, Escherichia coli O157; identical to SEQ ID NO: 75784
  CDS (1)..(1047): transl_table=11

SEQ ID NO: 89296 - protein, 348 aa, Escherichia coli O157; identical to SEQ ID NO: 75785

SEQ ID NO: 89297 - DNA, 1047 bp, Escherichia coli
  CDS (1)..(1047): transl_table=11
atgaacagaactgacgaactccgtactgcgcgtattgagagcctggtaacgcccgccgaactcgcgctacggtatcccgtaacgcctggcgtcgccacccatgtcaccgactcccgccgcagaattgaaaaaatactgaatggtgaagataagcgactgttggtcattattggcccctgctcgatccacgatctcaccgctgcaatggagtacgccacccgtctgcagtcgctgcgcaaccagtaccagtcacggctggaaatcgtaatgcgcacctattttgaaaaaccacgaactgttgtcggctggaaagggctaatctccgatccggatttaaacggcagctatcgggtaaatcacggtctggagctggcgcgcaaattacttttacaggtaaatgagctgggcgtccctaccgcgactgagttcctcgatatggtgaccggtcagtttattgctgatttaatcagttggggcgcgattggcgcacgtactaccgaaagtcagatccaccgtgaaatggcttcggcactctcctgtccggtaggttttaaaaatggtaccgatggcaacacgcggattgccgtggatgctatccgcgcagcccgcgccagccatatgtttctctcgccagacaaaaatggtcagatgaccatctatcagaccagcggcaacccgtatggccacattattatgcgtggcggcaaaaaaccgaattatcatgccgatgatatcgccgcagcctgcgatacgctgcacgagtttgatttacctgaacatctggtagtggatttcagccacggtaactgccagaagcagcaccgtcgccagttagaagtttgtgaggatatttgtcagcaaatccgcaatggctctacggcgattgctggaattatggcggaaagtttcctgcgcgaaggaacgcaaaaaatcgtcggcagtcagccgctcacttacggtcaatccattaccgacccgtgtctgggctgggaagataccgaacgcctggtcgaaaaactcgcctctgcggtagatacccgcttctga

SEQ ID NO: 89298 - protein, 348 aa, Escherichia coli; identical to SEQ ID NO: 75789

SEQ ID NO: 89299 - DNA, 1047 bp, Enterobacter agglomerans; identical to SEQ ID NO: 75790
  CDS (1)..(1047): transl_table=11

SEQ ID NO: 89300 - protein, 348 aa, Enterobacter agglomerans; identical to SEQ ID NO: 75791

SEQ ID NO: 89301 - DNA, 1047 bp, Salmonella typhi
  CDS (1)..(1047): transl_table=11
atgaacagaaccgacgaactccgtactgcgcgtatcgacagcctggtaacaccaaccgaactcgcgcagcggtatcctgtatcgtcctccgtcgccagtcacgttaccgactcccgacgccggatagaaaagattttaaatggtgaagatccacggctactggtcgtcattggcccctgttcgattcacgatctgaatgctgccatggaatacgcgacgcagctccaggcacaacgccaaaagcatcaggcgcgtctggaaatcgtcatgcgcacctattttgaaaaaccgcgcaccgtcgtgggatggaaaggcctgatttccgatcccgacttgaatggcagttaccgcgtcaatcatgggcttgaactggcgcgtcgcttgctattgcaggtgaacgaactgggagtaccgaccgccacagaatttcttgatatggtcaccggccagtttattgccgatctgatcagttggggaacgattggcgcgcgtaccaccgaaagccaaatccatcgggaaatggcttctgcgctctcttgcccggtcggctttaaaaatggtacggatggcaatacccgcattgccgttgatgctattcgcgcctcccgcgccagtcatatgtttctctcgccggataaagacggacagatgactatctaccaaacgagtggcaacccgtatgggcacatcatcatgcgcggcggtaaaaaaccgaactaccacgctgaagatattgccgccgcctgcgacacgttgcatgaatttgatctgccggaacatctggtcgtcgacttcagccacggcaactgtcaaaaacagcatcgccgccagttggacgtatgtgatgatatttgccagcagattcgtaatggctccacggcaattgccgggattatggcagagagttttttacgggaaggcacgcaaaaaattatcagcggtcaaccgttaatctatggtcaatccattaccgatccctgcctgaactgggaagatacggaagttctgttggaaaaacttgccgcggcggtagacagccgcttttaa

SEQ ID NO: 89302 - protein, 348 aa, Salmonella typhi
MNRTDELRTARIDSLVTPTELAQRYPVSSSVASHVTDSRRRIEKILNGEDPRLLVVIGPCSIHDLNAAMEYATQLQAQRQKHQARLEIVMRTYFEKPRTVVGWKGLISDPDLNGSYRVNHGLELARRLLLQVNELGVPTATEFLDMVTGQFIADLISWGTIGARTTESQIHREMASALSCPVGFKNGTDGNTRIAVDAIRASRASHMFLSPDKDGQMTIYQTSGNPYGHIIMRGGKKPNYHAEDIAAACDTLHEFDLPEHLVVDFSHGNCQKQHRRQLDVCDDICQQIRNGSTAIAGIMAESFLREGTQKIISGQPLIYGQSITDPCLNWEDTEVLLEKLAAAVDSRF

SEQ ID NO: 89303 - DNA, 1047 bp, Salmonella typhimurium; identical to SEQ ID NO: 75792
  CDS (1)..(1047): transl_table=11

SEQ ID NO: 89304 - protein, 348 aa, Salmonella typhimurium; identical to SEQ ID NO: 75793

SEQ ID NO: 89305 - DNA, 1047 bp, Shigella flexneri; identical to SEQ ID NO: 75794
  CDS (1)..(1047): transl_table=11

SEQ ID NO: 89306 - protein, 348 aa, Shigella flexneri; identical to SEQ ID NO: 75795

SEQ ID NO: 89307 - DNA, 24 bp, Artificial sequence
  primer
atgagtgaatctccaatgttcgct

SEQ ID NO: 89308 - DNA, 27 bp, Artificial sequence
  primer
ctatttcttgttaacttctcttctttg

SEQ ID NO: 89309 - protein, 348 aa, Artificial sequence
  consensus sequence
  Variant (2)..(3): Xaa in position 2 to 3 is any amino acid
  Variant (5)..(11): Xaa in position 5 to 11 is any amino acid
  Variant (13)..(24): Xaa in position 13 to 24 is any amino acid
  Variant (25)..(25): Xaa in position 25 is any or no amino acid
  Variant (27)..(31): Xaa in position 27 to 31 is any amino acid
  Variant (33)..(36): Xaa in position 33 to 36 is any amino acid
  Variant (38)..(38): Xaa in position 38 is any amino acid
  Variant (39)..(41): Xaa in position 39 to 41 is any or no amino acid
  Variant (44)..(44): Xaa in position 44 is any amino acid
  Variant (46)..(47): Xaa in position 46 to 47 is any amino acid
  Variant (55)..(57): Xaa in position 55 to 57 is any amino acid
  Variant (59)..(60): Xaa in position 59 to 60 is any amino acid
  Variant (63)..(64): Xaa in position 63 to 64 is any amino acid
  Variant (66)..(68): Xaa in position 66 to 68 is any amino acid
  Variant (69)..(77): Xaa in position 69 to 77 is any or no amino acid
  Variant (79)..(80): Xaa in position 79 to 80 is any amino acid
  Variant (84)..(84): Xaa in position 84 is any amino acid
  Variant (86)..(86): Xaa in position 86 is any amino acid
  Variant (92)..(93): Xaa in position 92 to 93 is any amino acid
  Variant (94)..(94): Xaa in position 94 is any or no amino acid
  Variant (101)..(101): Xaa in position 101 is any amino acid
  Variant (104)..(107): Xaa in position 104 to 107 is any amino acid
  Variant (108)..(113): Xaa in position 108 to 113 is any or no amino acid
  Variant (116)..(118): Xaa in position 116 to 118 is any amino acid
  Variant (120)..(120): Xaa in position 120 is any amino acid
  Variant (122)..(128): Xaa in position 122 to 128 is any amino acid
  Variant (129)..(129): Xaa in position 129 is any or no amino acid
  Variant (131)..(131): Xaa in position 131 is any amino acid
  Variant (133)..(135): Xaa in position 133 to 135 is any amino acid
  Variant (137)..(137): Xaa in position 137 is any amino acid
  Variant (140)..(142): Xaa in position 140 to 142 is any amino acid
  Variant (146)..(147): Xaa in position 146 to 147 is any amino acid
  Variant (149)..(151): Xaa in position 149 to 151 is any amino acid
  Variant (153)..(153): Xaa in position 153 is any amino acid
  Variant (164)..(164): Xaa in position 164 is any amino acid
  Variant (168)..(168): Xaa in position 168 is any amino acid
  Variant (174)..(174): Xaa in position 174 is any amino acid
  Variant (176)..(176): Xaa in position 176 is any amino acid
  Variant (185)..(188): Xaa in position 185 to 188 is any amino acid
  Variant (190)..(191): Xaa in position 190 to 191 is any amino acid
  Variant (193)..(195): Xaa in position 193 to 195 is any amino acid
  Variant (197)..(199): Xaa in position 197 to 199 is any amino acid
  Variant (201)..(201): Xaa in position 201 is any amino acid
  Variant (203)..(208): Xaa in position 203 to 208 is any amino acid
  Variant (210)..(211): Xaa in position 210 to 211 is any amino acid
  Variant (212)..(215): Xaa in position 212 to 215 is any or no amino acid
  Variant (217)..(217): Xaa in position 217 is any amino acid
  Variant (220)..(222): Xaa in position 220 to 222 is any amino acid
  Variant (224)..(225): Xaa in position 224 to 225 is any amino acid
  Variant (230)..(232): Xaa in position 230 to 232 is any amino acid
  Variant (233)..(233): Xaa in position 233 is any or no amino acid
  Variant (236)..(253): Xaa in position 236 to 253 is any amino acid
  Variant (254)..(264): Xaa in position 254 to 264 is any or no amino acid
  Variant (266)..(266): Xaa in position 266 is any amino acid
  Variant (269)..(269): Xaa in position 269 is any amino acid
  Variant (272)..(272): Xaa in position 272 is any amino acid
  Variant (274)..(277): Xaa in position 274 to 277 is any amino acid
  Variant (279)..(280): Xaa in position 279 to 280 is any amino acid
  Variant (282)..(287): Xaa in position 282 to 287 is any amino acid
  Variant (289)..(291): Xaa in position 289 to 291 is any amino acid
  Variant (293)..(295): Xaa in position 293 to 295 is any amino acid
  Variant (296)..(300): Xaa in position 296 to 300 is any or no amino acid
  Variant (302)..(302): Xaa in position 302 is any amino acid
  Variant (304)..(304): Xaa in position 304 is any amino acid
  Variant (307)..(310): Xaa in position 307 to 310 is any amino acid
  Variant (312)..(312): Xaa in position 312 is any amino acid
  Variant (314)..(318): Xaa in position 314 to 318 is any amino acid
  Variant (319)..(329): Xaa in position 319 to 329 is any or no amino acid
  Variant (332)..(332): Xaa in position 332 is any amino acid
  Variant (334)..(334): Xaa in position 334 is any amino acid
  Variant (337)..(337): Xaa in position 337 is any amino acid
  Variant (339)..(340): Xaa in position 339 to 340 is any amino acid
  Variant (342)..(343): Xaa in position 342 to 343 is any amino acid
  Variant (345)..(347): Xaa in position 345 to 347 is any amino acid
LXXPXXXXXXXPXXXXXXXXXXXXXRXXXXXIXXXXDXXXXRLXVXXGPCSIHDXXXAXXYAXXLXXXXXXXXXXXXLXXVMRXYXEKPRTXXXGWKGLIXDPXXXXXXXXXXGLXXXRXLXXXXXXXXGXPXXXEXLDXXXPQYXXDXXXWXAIGARTTESQXHREXASGLSXPXGFKNGTDGXXXXAXXAXXXAXXXHXFXXXXXXGXXXXXXTXGNXXXHXXLRGGXXXXNYXXXXXXXXXXXXXXXXXXXXXXXXXXXXXDXSHXNSXKXXXXQXXVXXXXXXQXXXGXXXXXXXXGXMXESXXXXGXQXXXXXXXXXXXXXXXXYGXSXTDXCXXWXXTXXXL

SEQ ID NO: 89310 - protein, 32 aa, Artificial sequence
  protein pattern
  Variant (2)..(2): Xaa in position 2 is any or no amino acid
  Variant (12)..(12): Xaa in position 12 is any amino acid
  Variant (15)..(15): Xaa in position 15 is Glu or Gln
  Variant (16)..(16): Xaa in position 16 is Leu or Met
  Variant (17)..(17): Xaa in position 17 is Ala, Ser or Val
  Variant (19)..(19): Xaa in position 19 is Ala or Gly
  Variant (20)..(20): Xaa in position 20 is Leu or Val
  Variant (21)..(21): Xaa in position 21 is Asp, Glu, Pro or Ser
  Variant (22)..(22): Xaa in position 22 is any amino acid
  Variant (23)..(23): Xaa in position 23 is Ala, Pro or Ser
  Variant (24)..(24): Xaa in position 24 is Ile or Val
  Variant (26)..(26): Xaa in position 26 is Phe or Tyr
  Variant (29)..(29): Xaa in position 29 is Ala, Gly or Ser
  Variant (31)..(31): Xaa in position 31 is any amino acid
AXIGARTTESQXHRXXXSXXXXXXGXKNXTXG

SEQ ID NO: 89311 - protein, 21 aa, Artificial sequence
  protein pattern
  Variant (2)..(2): Xaa in position 2 is any amino acid
  Variant (3)..(3): Xaa in position 3 is any or no amino acid
  Variant (8)..(8): Xaa in position 8 is Ile or Val
  Variant (11)..(12): Xaa in position 11 to 12 is any amino acid
  Variant (13)..(13): Xaa in position 13 is Ala, Gln, Ser or Thr
  Variant (15)..(15): Xaa in position 15 is any amino acid
  Variant (16)..(16): Xaa in position 16 is Ala, Asp, Glu, Gln or Thr
  Variant (18)..(18): Xaa in position 18 is Ala, Cys, Gly or Ser
  Variant (19)..(20): Xaa in position 19 to 20 is any amino acid
  Variant (21)..(21): Xaa in position 21 is Phe, Ile, Leu or Met
VXXGPCSXHDXXXAXXYXXXX

SEQ ID NO: 89312 - protein, 16 aa, Artificial sequence
  protein pattern
  Variant (3)..(3): Xaa in position 3 is Ala, Cys, Ser, Thr or Val
  Variant (5)..(5): Xaa in position 5 is Phe, Leu or Val
  Variant (11)..(11): Xaa in position 11 is any or no amino acid
  Variant (13)..(13): Xaa in position 13 is any or no amino acid
MRXYXEKPRTXTXGWK

SEQ ID NO: 89313 - protein, 24 aa, Artificial sequence
  protein pattern
  Variant (2)..(2): Xaa in position 2 is any amino acid
  Variant (5)..(5): Xaa in position 5 is any amino acid
  Variant (8)..(8): Xaa in position 8 is any amino acid
  Variant (10)..(13): Xaa in position 10 to 13 is any amino acid
  Variant (15)..(16): Xaa in position 15 to 16 is any amino acid
  Variant (18)..(20): Xaa in position 18 to 20 is any amino acid
  Variant (21)..(21): Xaa in position 21 is Ala, Ile, Leu or Val
  Variant (22)..(23): Xaa in position 22 to 23 is any amino acid
DXSHXNSXKXXXXQXXVXXXXXXQ

SEQ ID NO: 89314 - protein, 18 aa, Artificial sequence
  protein pattern
  Variant (2)..(2): Xaa in position 2 is any amino acid
  Variant (4)..(4): Xaa in position 4 is Ile or Val
  Variant (7)..(7): Xaa in position 7 is Ala, Gly or Pro
  Variant (9)..(9): Xaa in position 9 is Ile or Leu
  Variant (10)..(13): Xaa in position 10 to 13 is any amino acid
  Variant (14)..(14): Xaa in position 14 is Ser or Thr
  Variant (15)..(17): Xaa in position 15 to 17 is any amino acid
  Variant (18)..(18): Xaa in position 18 is Phe, Ile, Leu or Val
GXSXTDXCXXXXXXXXXX

SEQ ID NO: 89315 - protein, 14 aa, Artificial sequence
  protein pattern
  Variant (2)..(2): Xaa in position 2 is any amino acid
  Variant (5)..(6): Xaa in position 5 to 6 is any amino acid
  Variant (7)..(7): Xaa in position 7 is Ala, Cys, Gly or Thr
  Variant (8)..(8): Xaa in position 8 is Phe or His
  Variant (9)..(9): Xaa in position 9 is Ala, Ile, Leu or Val
  Variant (10)..(10): Xaa in position 10 is Ile or Val
TXGNXXXXXXLRGG

SEQ ID NO: 89316 - protein, 13 aa, Artificial sequence
  protein pattern
  Variant (2)..(2): Xaa in position 2 is Ile, Leu or Val
  Variant (4)..(4): Xaa in position 4 is Ala, Ile, Leu or Val
  Variant (7)..(7): Xaa in position 7 is any amino acid
  Variant (8)..(8): Xaa in position 8 is Ile or Leu
  Variant (9)..(10): Xaa in position 9 to 10 is any amino acid
  Variant (12)..(12): Xaa in position 12 is any amino acid
GXMXESXXXXGXQ

SEQ ID NO: 89317 - DNA, 1725 bp, Saccharomyces cerevisiae
  CDS (1)..(1725)
atggctttacatcaatttgactatatttttgccattgccatgttatttgcatttttggatgcctttaacatcggggcaaacgacgtggcgaactcattcgcgtcgtcgatctcttctagatctctaaaatactggcaagccatggttttggcgggtctctgtgagttcttgggtgctgtcttggcaggcgcaagagtttctggtactatcaagaacaacattatagattcctccatttttaccaacgaccccgctgttttaatgcttactatgaccagtgctttgattggctcgtcttgttggttaacatttgctactgcaatcggaatgccagtttctactacacattccattgttggtggtacaattggcgctgggattgcagccggtggagctaacggtgtcgtttggggttggagtggtgtttctcaaattattgcgtcatggttcattgctccgattttggcaggcgcgatcgcagctatagttttttcaatttctaggttttctgtccttgaagttaagtctttggaaagatcgattaagaatgctttactgctggttggtgttttagtattcgccactttctctatcttaacaatgttgattgtctggaagggttctccaaacctacacttggacgatttatctgaaactgaaactgccgtatctattgttctcacaggtgcaattgcttcgatcgtttacttcatctttttctacccattctacagaagaaaagttttggaccaagattggacactaaagttgattgatattttcagaggtccatctttttactttaagtccactgatgatatcccaccaatgccagaaggccatcaattaacaatcgattattacgagggcagaagaaatcttggaacaactgtttctgttgaagacgaagaaaataaggcagcgagtaattctaatgattccgtcaaaaacaaagaagacatccaggaagtggacctggttagaactgaaactgaaccagaaacaaagttgtcaacgaaacaatattggtggtcattattaaagcaaggacctaaaaaatggcccttattgttctggttagtaatctctcatggttggactcaagacgtcattcatgctcaagttaatgatagagatatgttatctggtgacctgaaaggaatgtacgaaagatctaaattttacgacaatagagtagaatatatctattcggttctccaagccattactgcagccactatgtcttttgctcatggagctaatgacgttgccaacgctactggtcctttgtctgctgtgtatgtgatctggaaaactaacactattggggcaaagtccgaagttcccgtgtgggttctggcttatggtggtgttgccttagttattggttgctggacttatggttacaatattatcaaaaatctaggtaataagatgattttgcagtcgccatcaagaggcttttcaattgaactagctgttgctattactactgtcatggctacccaattaggtattcctacctcaacaacccagatcgccgttggtggtattgtcgctgttggtttatgtaacaaggatctcaaatcagttaattggagaatggtagcctggtgttattctggttggtttttaactttaccaattgctggtttgattgccggtatcataaatggtatcattttgaatgctcctcgctttggtgtggaataccaaatgacataa

SEQ ID NO: 89318 - protein, 574 aa, Saccharomyces cerevisiae [sequence omitted]

SEQ ID NO: 89319 - DNA, 1596 bp, Wolinella succinogenes DSM 1740
  CDS (1)..(1596): transl_table=11
atggacataaaaaaccttaatcaaattgagaaggcaaccaagtttggccaaagggatgtagccaagcttggactcgcgattctctttgtcttttgtgcggccgctttggcctctctctactccaccaccctctcagggaacgtgggaattcttgtcattgctacgatgattggcggatatatggcgatcaacatcggcgccaatgatgtggccaacaatgtaggaccagcggtaggctccaaggctctcaccatggggggagccattttgattgcagccatttgtgaggcaagtggggccatcattgctgggggtgatgtggtggatacaatccgctcaggaatcatctccaaaagcatccttcaagatcgcgaaacttttatcctactcatgctctccgcgctcattgctggagccctgtggctccatctagccacggcgattggagcgcccgtttcgaccactcactctatcgtcggggggatattgggtgcaggaatcgttgcaggaggagcggggattgttaattgggctgaagtagctcggattgcggctagctgggtgatttcacctctatttggaggggtggttgccgccatttttctcatgctcatcaagcgtgccatcacctatcagatcgacaaaatcgccgcagctaaaaaggtggtgccttggctcctctttgtcatgagtggctcttttgccctctatctcgtcaccaaaggactcaagcgtctcattcccctctcccttcctttggcgcttctcatcagcctcgccatcgctgtgatcgtctttttcctttcgcgtcccttcatccttaaagtcgcaggcagcatgcaaaacaccaaagaggagatcaaccgctttttcactattcctctcatctttgccgctgctcttttgagctttgcccatggggctaatgatgtcgccaatgccattggtcccctagcagccatcaatgaggccttgatagggttttcgcatggagataaggcgggggttcctctttggatcatggcgattggtggagcgggaatctctttaggcttagccctctatggtcctaagcttattaagaccgtaggaagcgagatcaccgacttggatcagattcgcgccttttgtatcgccatgtcagccgcccttaccgtgctcatcgcttcccagctaggccttccggtgagctcaacgcatattgccgtgggagcggtttttggtgtaggattcttgcgagaacatctcaaaaaacgctactatgagatggaacagcagatcattgaggcgcaccaagatgaggatggggcgaaggttcaggagtttttgcgacgattcaaaaaagcctccacccccaaaaaagagctcatgctcaaaagccttaagcgcaaagtcgccctagagagcgcggatccagaggcacccagatttaacaaaaaagagaaaaaacagctcaaaaaagtctataaacaagagcttgtcaagcgttctgccctcaataaaatcgtagccacatggatcatcaccgtccctgcggccgctcttttaagtgctggaatcttcgcttttttgaagagtctctctattgatctttag

SEQ ID NO: 89320 - protein, 531 aa, Wolinella succinogenes DSM 1740
MDIKNLNQIEKATKFGQRDVAKLGLAILFVFCAAALASLYSTTLSGNVGILVIATMIGGYMAINIGANDVANNVGPAVGSKALTMGGAILIAAICEASGAIIAGGDVVDTIRSGIISKSILQDRETFILLMLSALIAGALWLHLATAIGAPVSTTHSIVGGILGAGIVAGGAGIVNWAEVARIAASWVISPLFGGVVAAIFLMLIKRAITYQIDKIAAAKKVVPWLLFVMSGSFALYLVTKGLKRLIPLSLPLALLISLAIAVIVFFLSRPFILKVAGSMQNTKEEINRFFTIPLIFAAALLSFAHGANDVANAIGPLAAINEALIGFSHGDKAGVPLWIMAIGGAGISLGLALYGPKLIKTVGSEITDLDQIRAFCIAMSAALTVLIASQLGLPVSSTHIAVGAVFGVGFLREHLKKRYYEMEQQIIEAHQDEDGAKVQEFLRRFKKASTPKKELMLKSLKRKVALESADPEAPRFNKKEKKQLKKVYKQELVKRSALNKIVATWIITVPAAALLSAGIFAFLKSLSIDL

SEQ ID NO: 89321 - DNA, 1575 bp, Strongylocentrotus purpuratus
  CDS (1)..(1575)
atgttgccctcgacgaccaacattccgttgcccctgtcggacatactgtggatggtcatccttggttttgttatctcctttatcttgtctatcgccatcggtgctaatgatgtggccaactcatttgggacgtctgtgggtgcaaaggtactgacactacatcaagccttgttctttgcaaccatctttgagacacttggtgctgtgctcatggggtcgaaggtcgcccaaaccattcagaaaggaatattcgatgttgagatgtacattggaagggaggagacgctggttttaggtgaaatatctgctcttgcaggatgtgcagtgtggctatttgttgcaacagcctttaaaatgccagtctcaaccacgcacagcattgtgggagctacgctgggtttccattttgttgtctttggtattgagggcattcagtggcttcaagttggcttgatagttatatcctggataacatcaccagttttatcaggtattttttcttcactcatctttttcatcctgagatacttcattctgagaaagaaagaacctctggagcctggtcttagattgttgccaatttggtatggcttagtgatcatcgtcaacttcttctccatattttatgatggaccaacgaccctaggttttgatcgcatacctctgtggggaacatttctgcttagctttggatctggcatccttgtaggactggctgtctggtttatcatggttccgtacatcagaagaaagataataggaatgagcagccaggaagaggatcgagcagaggagacgcaatcagttttcgagaagaagaggatgtatacttgccatgacaacaagatcgaccaagtcagtttgataactggagctgagccaatatcagcagttgatgacaaagccagagaggacttagcaaatgaaaatggtgtgaaagtggatagcaaagataccgaaagaacaagaatggaagatggagatagaagacagaatgaaagtggggcagatggagatgatacgtcaggtagaggcacatcagaactgtctgaagaggtacgagatcatccccatgtgactgtcctttgctctcctttacaagtcttgtcagccatctttgccagctttgcacatggaggaaacgatgtaagtaacgccattggcccgctgatagctatctggttgatctaccggaccggggacattgcccaggatgaacccacgcctctctgggtgctattctacggagccttgggcatctctctaggactatggttactagggcgtcgggtgatccagacggtgggagaagacatcactacactaacgccatcaagtggcttttcggtggagcttggtgctgccatgacggtgctgctggcatccaacgtgggcatcccgatcagcacgacccactgcaagatcggatccgtggtatctgtcggctggttacgatcgagagaagcggtcaactggtcactctttggcaccattgtcctggcctggggggtgacccttccggctacgatgggtctgtctgcggccatcatggccctcctgcagcttgcgtattaa

SEQ ID NO: 89322 - protein, 524 aa, Strongylocentrotus purpuratus
MLPSTTNIPLPLSDILWMVILGFVISFILSIAIGANDVANSFGTSVGAKVLTLHQALFFATIFETLGAVLMGSKVAQTIQKGIFDVEMYIGREETLVLGEISALAGCAVWLFVATAFKMPVSTTHSIVGATLGFHFVVFGIEGIQWLQVGLIVISWITSPVLSGIFSSLIFFILRYFILRKKEPLEPGLRLLPIWYGLVIIVNFFSIFYDGPTTLGFDRIPLWGTFLLSFGSGILVGLAVWFIMVPYIRRKIIGMSSQEEDRAEETQSVFEKKRMYTCHDNKIDQVSLITGAEPISAVDDKAREDLANENGVKVDSKDTERTRMEDGDRRQNESGADGDDTSGRGTSELSEEVRDHPHVTVLCSPLQVLSAIFASFAHGGNDVSNAIGPLIAIWLIYRTGDIAQDEPTPLWVLFYGALGISLGLWLLGRRVIQTVGEDITTLTPSSGFSVELGAAMTVLLASNVGIPISTTHCKIGSVVSVGWLRSREAVNWSLFGTIVLAWGVTLPATMGLSAAIMALLQLAY

SEQ ID NO: 89323 - DNA, 1812 bp, Magnaporthe grisea 70-15
  CDS (1)..(1812)
atgcctcttcaccagtttgattacatctttgccattggcaccatctttgcgttcctcgatgcgtggaacattggtgccaacgatgtcgccaactcctgggctacatcggtctcatcccgatccgttacatacatccaggctatgagcttggcttccgttctcgaatttgcggggtcaattggtgttggtcagcgtgtcgcagacactattcgtaccaaggttgtcccgcttgatctttacaaaaataaccccacggtccttatgctgggtatggcttgcgccatcgttgcttcgtccctctacctcacactctgcacgagggtcggtctgcccgtttccactactcactctatcatgggtggtgttattggtatgggtgtagcgactgttggagccaacaacgtcatctggtacgacgccaagggcggaatcaacaatggcgtcgtctccgttttcctcgcttggatcatcgcacctggtctctcgggcgcgtttgctgccatcatctttaccattactaaatacctggtcatgctccgccaaaacccggttctctggggcctgatgactgttcctgtctactttggcatcactgcagggctgctcaccatgcttgtttgctggaagggaggctctatcgacctggatgactggagtgatcctcagctcagtggcctgattgttggtgtcggtgctgcctggggtcttctgatgggtatcttcctcgttccctggctgtaccgcatcgttgccaagaacgactgggagctccgttggtaccacattttccagggtccccttcttttcaggcgccccgagccccctgttcagcccgagggtgcttcgggcggcatccgtaacttttacgagggacacctgacccaagaggagcttgaggcccagcgcgctgcacagcagcaggatgtcgagactggtgtggtcagcgccaccaacaacgacgagatcgccaacgaaaagaccacggaggatacctctaggaagattgcacataccgactccgactctggctcgcacaacaacaacaacaacacctctgccgcagaaacggctacccagcccggtgcgcaacccggatatcagcacaaggcgcttgtcggtcccaggcccgagggcagctggcactctggtccggtcatgttctggttccttaagaaaatcttcctcagcggtgttgaccaagacattatcaacatgcaaaagaagaagagcatgcttactggtgacctagagaaggttcacgccggtgtcacccactacgacaacaaggccgagtacctctactccttcatgcaagtcatgactgcctgtaccgcctcgttcactcacggtgccaacgatgtctccaacgctatcggcccctacgctaccatctacaacatctggcaatccggtgccattgagggtagcaagtcagctgttccgttctggattctcgttttcggtggtgtcgctatcatgataggtatctggacatacggatacaacatcatgaggaacttgggtaaccgcatcaccctgcactcgccttctcgtggtttctctatggagttgggagctgtttgcaccatcatcctggccacccgtctcaagctccctgtatccaccactcagtgcatcactggcgccaccgtcggcgtcggtctctgctctggtacctggaggaccatcaactggcgcatggtggcctggatctacatgggttggttcattaccctccccgtctctggtatcgtttccggctgccttacgggcctgatcatcaacgctcctcgctggggttactctggttaa

SEQ ID NO: 89324 - protein, 603 aa, Magnaporthe grisea 70-15
MPLHQFDYIFAIGTIFAFLDAWNIGANDVANSWATSVSSRSVTYIQAMSLASVLEFAGSIGVGQRVADTIRTKVVPLDLYKNNPTVLMLGMACAIVASSLYLTLCTRVGLPVSTTHSIMGGVIGMGVATVGANNVIWYDAKGGINNGVVSVFLAWIIAPGLSGAFAAIIFTITKYLVMLRQNPVLWGLMTVPVYFGITAGLLTMLVCWKGGSIDLDDWSDPQLSGLIVGVGAAWGLLMGIFLVPWLYRIVAKNDWELRWYHIFQGPLLFRRPEPPVQPEGASGGIRNFYEGHLTQEELEAQRAAQQQDVETGVVSATNNDEIANEKTTEDTSRKIAHTDSDSGSHNNNNNTSAAETATQPGAQPGYQHKALVGPRPEGSWHSGPVMFWFLKKIFLSGVDQDIINMQKKKSMLTGDLEKVHAGVTHYDNKAEYLYSFMQVMTACTASFTHGANDVSNAIGPYATIYNIWQSGAIEGSKSAVPFWILVFGGVAIMIGIWTYGYNIMRNLGNRITLHSPSRGFSMELGAVCTIILATRLKLPVSTTQCITGATVGVGLCSGTWRTINWRMVAWIYMGWFITLPVSGIVSGCLTGLIINAPRWGYSG

SEQ ID NO: 89325 - DNA, 1851 bp, Magnaporthe grisea 70-15
  CDS (1)..(1851)
atgctcgaccagtacacctacatctttgccattggcacctttttcgccctgttggatgcgtacaacaatggcgcaaacgacgtcgcaaacgcctgggcaaccagcgtttcatcgcggtccatctcgtaccgccaggccatggtgctaggcaccatctttgagatggtgggtgccatcacggtcggagcccgcactgccgaaaccatcaagaacggcatcatccccaacgacgccttccgcggcgatgccggcgtgcagatgctcgccttcacctgcgccctcgccggcgcctcgacctgggtcatgtggtgcaccaggcactcggcccacgtctcgtccacctactcgctcatctcgtccgtcgccggtgtcggtgtcgccaccgtcggtgccagcaaggtccagtggggttggaacaacggcaagggactcggagccatctttgccggtctcttcatggctcccaccatctcggccggctttggcgccaccatcttcatgctcatcaagctcatcgtgcacttgcgcaaggaccccatcccctgggctgtctacacttcgccattcttcttcctcatcgccgccaccgtctgcaccctgtccattgtctacaagggctcccccgccctgggccttgcatcgaagcccccggcattcattgccgccgtcaccttgggcaccggcttcggtgtggctctcttggccgccctcttcttcgtcccctttgtccacgccaaggtcatcaagaaggactacactctgaagtggtacgacttcctccagggccctctcctgttcaagcgccccgccccggccgaccaggacaacatcctcgcccgcgttcccaactacgccgttgttcagcacgacgaggaggaggaggaggaagcccacaggcctgatgctgccaccacggcctccggctcgcagcactccacagacctgcccatcaagcccgttgacgaagctgccgccaaggccggccgggactcggagaagcagatggtcatggccgaggccgcccgcccgcaaaagacttacaaggagctccaggaggacggcgagcgcaagctccacgccaagctgtgcaagggcaggggccctctgggctgggccatgaggacccttcgcgacaaccccatgggccctggccaggtctacgagcgccacaacatcatccgcctgatcaagcgccttcccgccatggtggtggtcggcgccctgtacggtctccactacgacatccactctgcgcagtccggcatctctggcacgcccgagggtgagcgcatggcccgggtctacgccaacgccgccaagtacagcaacgaggtcgagcacacctactccttcgtccaggtcctgaccgcctgcaccgcctcctttgcacacggcgccaacgacattggaaactcggtcggtccctgggccgtcatctacgccgcatggaagactggcagccctgccgcgtccaaggctcaggtagaggtttggcagcttgccgttttgtccctgactatcagtgttggtctgatcacatatggctacaacatcatgaaggtcatgggcaacaagatcacctaccactcccccagccgtggatcctccatggagatgggcgccgccatcaccgtcctcgtcttctcgcagttctccctccccgtctcgacctccatgtgcatcactggcgccaccgtcggcgtcggtctgtgcaacggaaccttcaaggccgtcaacttccagcgtgtcggcctgctcgtcttctcctggatcatgaccatccccgtcgccggcaccatcggtggtgtgctgatgggtttgatcctcaacgctcctcacttcacctcatag

SEQ ID NO: 89326 - protein, 616 aa, Magnaporthe grisea 70-15
MLDQYTYIFAIGTFFALLDAYNNGANDVANAWATSVSSRSISYRQAMVLGTIFEMVGAITVGARTAETIKNGIIPNDAFRGDAGVQMLAFTCALAGASTWVMWCTRHSAHVSSTYSLISSVAGVGVATVGASKVQWGWNNGKGLGAIFAGLFMAPTISAGFGATIFMLIKLIVHLRKDPIPWAVYTSPFFFLIAATVCTLSIVYKGSPALGLASKPPAFIAAVTLGTGFGVALLAALFFVPFVHAKVIKKDYTLKWYDFLQGPLLFKRPAPADQDNILARVPNYAVVQHDEEEEEEAHRPDAATTASGSQHSTDLPIKPVDEAAAKAGRDSEKQMVMAEAARPQKTYKELQEDGERKLHAKLCKGRGPLGWAMRTLRDNPMGPGQVYERHNIIRLIKRLPAMVVVGALYGLHYDIHSAQSGISGTPEGERMARVYANAAKYSNEVEHTYSFVQVLTACTASFAHGANDIGNSVGPWAVIYAAWKTGSPAASKAQVEVWQLAVLSLTISVGLITYGYNIMKVMGNKITYHSPSRGSSMEMGAAITVLVFSQFSLPVSTSMCITGATVGVGLCNGTFKAVNFQRVGLLVFSWIMTIPVAGTIGGVLMGLILNAPHFTS

SEQ ID NO: 89327 - DNA, 1797 bp, Magnaporthe grisea 70-15
  CDS (1)..(1797)
atggccgtcctcacagaagtggcatggatcatcggcgtcatgactatttctttcacggcgtcggcgtttggtaacggcgccaacgacgtgtccaacgcctacgccacgtcggtggcggcccgcacgctgaccatgccccaggctggcatcttggccatgtttaccgagttctttggcgccgtggtcttgggcggccgcgtcacgggcaccatcaagaacggcatcatcgacatcaaccgcttcaccggcacccccgcggccctggtgctgaccatgggctgcgtcgagttcggctccgcctcgtggctgatgctcgccaccaaggtcggcttccccgtcagcaccacccagaccgtcgtcggcgccctcgtgggagccggcatctcctcgggtgcccaggtcagctggggctggaagacgggcagcgtctcgcagatcgccgcctcttggctcattgctcccgtcatctcggccgccatcggcgccctgctgtttgccaccctcaagttctccgtgctcgagcgcgagaggtcctttgaaaaggccctcaaggccatccccttctacctcgccttcaccgccgccgtgctggctcttttcatcaccatcgaggctcccggagcccccagtctcgaggagctgggcgccggaaccgtctgcggcatcatcctgggcgtcttttttggtgctctggccctggcctacatcttttttgttccctacatccaccgcaggctggtcagggaggacacgcgcatccgcccccgtcacatgatcctcggcccgctgctgtggagggagaacccgcccatcttttggccggccaaggatggctccatcgtcgacgaccactacgccgtgcaggatgcccccgaggaagccagcgcgggctcgaccgaccccaaggccggcaacgacgccatcacgcccaacggagacgtaaccaacggcgcaaaggaccccgagaagcgcgcactggaacaacaagcagccggtaacaacaacaacaacaacaacaacaacaacggcgtcctcaactcatccgacctcgaagccggtcccacgccgacgccacctcgccagaccatcgcccgctacaagaagcagcccgagcccgaagagcgcttcctcgcccccacggcgcacctcccgctctacaaccccaagcgcctctggtcgtgggccaagtacatcttcctgcagggcgtgacgcgcgactgcgtgacgcacgcggccgaggacctggccagcgtgcacggcaaggccaagcgctacgacaaccgcgtggagcacatgtggacgtacgcgcaggtggcgtcggccatgatgatgtcgatcgcgcacggcagcaacgacgtggccaacgccatcgggccctgggtggccgcctaccagacgtaccagacgggcgccgtgagctccaagaccgacacgcccatctggatcctgatcgccgccggcttcctgctgggcgccggcttctggttcatgggccaccacatcgtgcgctcgctcggcaacaagctcacgcagctgtcgcccacccgcggcttcgccatggagctgggcgccgccatcaccgtgctcatggccagcaggctgggcctgcccgtcagcaccacccagtgcctgctgggcgccgtctgcggcgtcgccatgatgaactttgacgccggcgccgtcaactggaagcagatgggctacatcttttccggctgggtcctgaccctgccgagctcgggcttcattgcgggtgccctgctggccatggccctcaacactcccagtctcccttga

SEQ ID NO: 89328 - protein, 598 aa, Magnaporthe grisea 70-15
MAVLTEVAWIIGVMTISFTASAFGNGANDVSNAYATSVAARTLTMPQAGILAMFTEFFGAVVLGGRVTGTIKNGIIDINRFTGTPAALVLTMGCVEFGSASWLMLATKVGFPVSTTQTVVGALVGAGISSGAQVSWGWKTGSVSQIAASWLIAPVISAAIGALLFATLKFSVLERERSFEKALKAIPFYLAFTAAVLALFITIEAPGAPSLEELGAGTVCGIILGVFFGALALAYIFFVPYIHRRLVREDTRIRPRHMILGPLLWRENPPIFWPAKDGSIVDDHYAVQDAPEEASAGSTDPKAGNDAITPNGDVTNGAKDPEKRALEQQAAGNNNNNNNNNNGVLNSSDLEAGPTPTPPRQTIARYKKQPEPEERFLAPTAHLPLYNPKRLWSWAKYIFLQGVTRDCVTHAAEDLASVHGKAKRYDNRVEHMWTYAQVASAMMMSIAHGSNDVANAIGPWVAAYQTYQTGAVSSKTDTPIWILIAAGFLLGAGFWFMGHHIVRSLGNKLTQLSPTRGFAMELGAAITVLMASRLGLPVSTTQCLLGAVCGVAMMNFDAGAVNWKQMGYIFSGWVLTLPSSGFIAGALLAMALNTPSLP

SEQ ID NO: 89329 - DNA, 1761 bp, Gibberella zeae PH-1
  CDS (1)..(1761)
atggtgcttcatcagtacgattacatctttgccctcggcaccatcttttctttccttgatgcctggaacatcggtgccaacgatgtcgccaactcgtgggctacatcggtctcatcccgatccatcagctacctccaggccatgacccttggttccatcctcgaatttgctggatccgtcggtgtcggtgctcgtgtcgctgataccatccgtaccaaggtcgtcgacctggaccagttcgagtccgaccccgcccttcttatgctcggtatgatgtgcgccatcgccgcctcttcgatctacctcaccttcgccactcgcatcggtcttcctgtctcgactactcactccattatgggtggtgttattggtatgggtgttgctctcgtcggtgctgagggtatccactgggctgaactggacaagggaatcagctctggtgttgtctcagttttcctggcttggatcattgcccctggtctgtctggtgcttttgccgctattatcttccttatcaccaagtacggtgtcatgcttcgaagccagcctgtctggaagggtctcttccttactcccgtctacttcggtatcactgcttctctgcttaccatgctcatcgtctggaagggtggcagcattgagatcacctttactgacgccgagactgttggcatgatcattggtgtcggtgctgcttgggctctcatcatttccatcttcctcctcccttggctctaccgcatcgtcatctgtgacgactggcagcttcgatggtggcacatcatccagggccctcttcttcttaagcgccctccccctcctgcccagcccgatggtgctgaaggtggtatcaaggatttctacgaggggcatatgaccaaggaagagctttccgagcttcgccgcgccggccgtgagggtagtgacgagtttgtccgcgcccaggaccagaccagcaacgaaggcaaggagagttctaccgagaacaaggtcatgactcctccttcagagggcaccgatgacgctgctgagcgcgtggaacccaaaccccgacgcagcctcatcggagagaagcctgaaggccgtcttttcagcggtgctgtcttgttctggtacctcaagaaggctttcctctctggtgtcgaccaggatatccttgccatgcaaaacaagaagagcattcttaccggcgatcttgacgagatccactctaacgttgctcactacgacaatcgcgccgagtacctgtacacatttatgcaagtcatgactgcttgtactgcctctttcactcacggtgcgaacgatgtcgccaacgccattggtccttatgctactatctaccaaatctggagaactggcactcttgacggtagcaagtccgaagttcccgtctggattctttgcttcggtggtgctggtattgctcttggtatctggacttatggatacaacatcatgcgcaaccttggtaaccgtctgactctccactcgccttctcgaggttttagtatggagcttggtgcctgtatcacagtcatccttgccacccgtcttaagctccctgtctcaactacccagtgtatcaccggtgccaccgtcggtgtcggtctctgttccggcacttggcgctctatcaactggcgcatggttgcttggatttacatgggctggatgattacccttcctgttgctggtattatttctggctgcatctgcggtattattatcaacgctcctcgctggggctacagtggttaa

SEQ ID NO: 89330 - protein, 586 aa, Gibberella zeae PH-1
MVLHQYDYIFALGTIFSFLDAWNIGANDVANSWATSVSSRSISYLQAMTLGSILEFAGSVGVGARVADTIRTKVVDLDQFESDPALLMLGMMCAIAASSIYLTFATRIGLPVSTTHSIMGGVIGMGVALVGAEGIHWAELDKGISSGVVSVFLAWIIAPGLSGAFAAIIFLITKYGVMLRSQPVWKGLFLTPVYFGITASLLTMLIVWKGGSIEITFTDAETVGMIIGVGAAWALIISIFLLPWLYRIVICDDWQLRWWHIIQGPLLLKRPPPPAQPDGAEGGIKDFYEGHMTKEELSELRRAGREGSDEFVRAQDQTSNEGKESSTENKVMTPPSEGTDDAAERVEPKPRRSLIGEKPEGRLFSGAVLFWYLKKAFLSGVDQDILAMQNKKSILTGDLDEIHSNVAHYDNRAEYLYTFMQVMTACTASFTHGANDVANAIGPYATIYQIWRTGTLDGSKSEVPVWILCFGGAGIALGIWTYGYNIMRNLGNRLTLHSPSRGFSMELGACITVILATRLKLPVSTTQCITGATVGVGLCSGTWRSINWRMVAWIYMGWMITLPVAGIISGCICGIIINAPRWGYSG

SEQ ID NO: 89331 - DNA, 1818 bp, Gibberella zeae PH-1
  CDS (1)..(1818)
atggttctcgaggcttacacttacgtctttgccattggcagttgctttgctctgcttgaggcctacaacaatggtgccaacgatgtcgccaacgcctgggctaccagtgtctcctcccgctccgtcacataccgcggagccatggtgctttgctgcatcttcgaaatgctcggcgccctgaccgtcggcgcccgaaccgcctcgaccatcaagaacggtatcatccccatggaagccttccgcgacaacgccggtgtccagcttctcgccttcgcctgtgcctccgccggtgcttccacatgggttatgtggtgcacaaagcacaacgcccacgtctcgtctacatactctctcatctcttcgctcgctggtgtcggtatcgctaccgttggtgctagccaggttcaatggggctggaacggtggtcagggtctcggtgccatctttgctggtctcggtatggctcctaccattgccggtgtctttgcttccgtcatcttcttgcttgtcaagtatgtcgtgcatgtccgcaagaaccccgtccagtgggctgtctggacctctcccttcttcttcctcattgctggtaccgtctgcacactctccattgtgtacaagggatctccccgtctcggtctcactgagaagcctgcttggtacatcgccgctctcactctcggtgtcggctggggtctcttcttcatgtctgccatcttcttcgtccccttcgtccacgctgttgtcatcaagaaggactacaccctccgctggtgggatgcctggagaggacctcttctcttcagccgccccgctcctcctgatgccgagaacgcccgtgtccccaactacgctgttgtccaacacggttctgacatggaggtcgtctctcacgagactgaggagcacaaccccaagaaggccagcgacgatgagattgcccccgctactgccgccagctccgagaacaacgagaaacgacacctcaacctgtctgagtctacccaggaggactatcagcgaatggtcaaggatgctgaggagatccaccactccaacctccgcaagggtaagggacctcttggctgggccatgcgaactctccacgccaaccccattggtgccggttctatccacgagactcacaacttgatcgccgttctcaagcgcattcccgcccagatcgtcgtcgctttcctctacggtgctcactacgacattcatactgcccagatgggtattgaggccactcccgaaggtcgccgtatggcccgcgtctacgagcatgctcccaagtaccccaacgaggttgagtacctgtactctttcgttcagatcatcactgcttgcactgcttctttcgctcacggtgccaacgatgtcggtaacgctgtcggtgtctgggctggtatgtacgctgcttggtccactagccgacctgccgagaagaaggccgaggttcctttgtggcagattggtgttgtcgccgctatgatctgcatcggtttcatcacctatggttacaacatcatgaaggttatgggtaacaagatcacctaccactctcccagtcgtggttcctccatggagatgggtgctgccatcactgtcctcgtcttctctcagtacaagctccccgtctccacctccatgtgtatcactggtgccaccgttggtgtcggtctctgcaacggcagcatcaaggctgtcaactggaagcgagttttccttctcgtcttctcctggatcatgaccatccccatcgccggtcttatcggtggatgtcttatggctcttgctctcaacgcccctcacttctaa

SEQ ID NO: 89332 - protein, 605 aa, Gibberella zeae PH-1
MVLEAYTYVFAIGSCFALLEAYNNGANDVANAWATSVSSRSVTYRGAMVLCCIFEMLGALTVGARTASTIKNGIIPMEAFRDNAGVQLLAFACASAGASTWVMWCTKHNAHVSSTYSLISSLAGVGIATVGASQVQWGWNGGQGLGAIFAGLGMAPTIAGVFASVIFLLVKYVVHVRKNPVQWAVWTSPFFFLIAGTVCTLSIVYKGSPRLGLTEKPAWYIAALTLGVGWGLFFMSAIFFVPFVHAVVIKKDYTLRWWDAWRGPLLFSRPAPPDAENARVPNYAVVQHGSDMEVVSHETEEHNPKKASDDEIAPATAASSENNEKRHLNLSESTQEDYQRMVKDAEEIHHSNLRKGKGPLGWAMRTLHANPIGAGSIHETHNLIAVLKRIPAQIVVAFLYGAHYDIHTAQMGIEATPEGRRMARVYEHAPKYPNEVEYLYSFVQIITACTASFAHGANDVGNAVGVWAGMYAAWSTSRPAEKKAEVPLWQIGVVAAMICIGFITYGYNIMKVMGNKITYHSPSRGSSMEMGAAITVLVFSQYKLPVSTSMCITGATVGVGLCNGSIKAVNWKRVFLLVFSWIMTIPIAGLIGGCLMALALNAPHF

SEQ ID NO: 89333 - DNA, 1737 bp, Gibberella zeae PH-1
  CDS (1)..(1737)
atggcgacgcttcatcagtatgattacatctttgctctgactgtcatatttgcctgtctcgatgcatggaacatcggcgccaacgatgtggccaattcttttggaacatcggtctcctcgagatccctcaccatgaaacaggcaatgctcgtagcagcagtctgtgaattcagcggcagtgtatccgtgggatcgcgagtagcagatacaatccgcacaaagattgtcgacccccaccactacgacagctcacctggtgttctactcttggttatgatgtgcaccatcatgtcatcatcgctcttcctcactttcgcaacacgccaaggccttcctgtttcgacgacacattctcttattggcggtctagttggtgcggctacggcttcgatcggtatccaaaaggtcagctggggatggcatggggtttcgcagattttcgcagcttggatcattgcgccgctgatcgccggatgtttcggatacgtgctgtttctttgcacgaagaaattcatcttgacccagaggactgccgtgaagagagccttcttttccattccggtttatacatacctcactgtcggtgcgctgacgatgcttttggtctggaaggggattcacgtaattaacttgtctacgcgggataccgtcattgctatctttgttaccgccacaggtatgacttttttacaggccatttttatcctgccctttctatggacgaggatcatgcatgaggactggactcttaaatggtaccatgtctttcaggggccgatgcttctatggcgatcaccacctccaccgacaccgattggcttcacgaaacccagtatcagagattattaccagggacatctcacgcgtgaggaactgaactacatacggacctctgaaactcttctccaatccatccagacaccgaatggtgaattacctgatctcgatcgagacgacgaatggatcctccctccgccagctcaaacaccacccaagaccccaccgaatcgattcgaacgacgctcttcttccgagcttgtacctccttgtccagagggtgactggaatagcccccgcgttctggcatggaaggtgaaccgcgtgctacttcgcggtctggagaaggatgtcgtggcgatgcagaagcggaacaatattctcaactgggacttggaggatatgcacgcccgatcagctcattacgataaccgcgcagaatacatgtactcagccctccaaatcctcaccgcagcaacagcttcgtttgttcacggcgcaaacgacgtcagtaacgcagtagcgccattcacgacagcataccaagtatggtccagcggcggaatcccagagtacatcgagatccccatttggatcctcgcggtaggaggtgcatgtatcgtggtcggcctcctcacatacggctatcacgtcatgcgcacgctgggcaatcgtctaaccctcatatcacccagccgcggtttctgcatggagcttgcgagcgctgtgacggtgctcatggcgacaaggctgtctctgcccgtgtcaacgacgcagtgcattacaggggcgacggtgggtgtgggtttggcgaatggcgattggagatgcatcaacccgaagcttgtggcgtggatatatcttgggtggatggtcacgttgcctgttacgggggttatttctggatgtttgatggggctgattatcaatgcgccgagatgggaggtgcagagcgtgtga

SEQ ID NO: 89334 - protein, 578 aa, Gibberella zeae PH-1
MATLHQYDYIFALTVIFACLDAWNIGANDVANSFGTSVSSRSLTMKQAMLVAAVCEFSGSVSVGSRVADTIRTKIVDPHHYDSSPGVLLLVMMCTIMSSSLFLTFATRQGLPVSTTHSLIGGLVGAATASIGIQKVSWGWHGVSQIFAAWIIAPLIAGCFGYVLFLCTKKFILTQRTAVKRAFFSIPVYTYLTVGALTMLLVWKGIHVINLSTRDTVIAIFVTATGMTFLQAIFILPFLWTRIMHEDWTLKWYHVFQGPMLLWRSPPPPTPIGFTKPSIRDYYQGHLTREELNYIRTSETLLQSIQTPNGELPDLDRDDEWILPPPAQTPPKTPPNRFERRSSSELVPPCPEGDWNSPRVLAWKVNRVLLRGLEKDVVAMQKRNNILNWDLEDMHARSAHYDNRAEYMYSALQILTAATASFVHGANDVSNAVAPFTTAYQVWSSGGIPEYIEIPIWILAVGGACIVVGLLTYGYHVMRTLGNRLTLISPSRGFCMELASAVTVLMATRLSLPVSTTQCITGATVGVGLANGDWRCINPKLVAWIYLGWMVTLPVTGVISGCLMGLIINAPRWEVQSV

SEQ ID NO: 89335 - DNA, 1752 bp, Kluyveromyces lactis NRRL Y-1140
  CDS (1)..(1752)
atggctttgcaacagtttgattacatttttgccattacaatgctctttgcattcttggatgcatacaatattggtgccaatgatgttgccaactcgtttgcttcctctatttcatctagatccttgaaatactggcaggctatgatccttgctgctttatgtgaatttttgggggctgtcttagcgggtgctagagtctctggtaccatcaagaacaatattatttctgcttcacctttcgaagatgatccagctgtgttaatgttaactatggcatgtgctcttgtcggttctgccacttggctttcaattgcgacatctattggtatgccagtgtcatcgactcattctatcgttggtggtaccatcggtgccggtattgctgccggtggtgccaagggtgtccaatggggttggggtggtgtttctcaaattattgcttcttggtttattgctccaatcttagccggttgcttggtcactattattttcttgatctccaagttcctggtcttggatgttaagccaattgaaaaagctattaagaacgctttactactcgtcggatttttggtgttcgctaccttctcggtgttgactatgttgatcgtttggaagggttctccaaacttgaagttggataaattgtctggcacaactaccgcattggctattgttcttactggtctagtcgcttgtgctgtttacttcatcttcttgtacccatactacagaagaagaatcttgcacagagactggaccctaaaatggtatgatatttacagaggcccaactttctacttcaagtccactgacgacattccacctctacctgctggacaatctttaaccattgattactacgaaggtagaagattcgaagatgaaactgccggagatgatgaaacccaaattgaaacttcccacaccgccgatggaagagatactgtagagggacatattgaaattaacgacaaggaatctgtcaaccaaagtatcaaattggtgcaaacagaaactttgcaagaagaaaaaccaactaccaaacagctatggtggtcattgctaaaacaaggaccaaagaagtggcctctattactttggttgattgcttctcacggttggactcaagatgttattcattctcaggtctacgatacaggtgctttgtcaacagatttcaaggacatgtacaagagatctgccttctatgacaacagaatcgaattcatctattctatcttgcaagctattaccgccgccactatgtcttttgctcacggtgccaatgatgttgccaacgccactgcaccactagctgccgtgtatgacatctggcagaaaaacactgtggaatctaagtctgacgttcacacatgggttttagcatactgtgccgctgcattggtcctcggttgttggacatacggttacagaatcatcaagaacttgggtaacaagatgattttgcaatctccatccagagggttctccgttgaacttggtgctgctgttaccactgttatggcaacacaattaagtattcctgtttctactactcaagttgctgtcggtggtattgtggccgttggtctttgtaacagggatttgaaatccgttaactggagaatggtcgctttctgttacagtggttggttcttaactcttccaatggctggtctcattgcaggtatcttgaacggtatcatcttgaacgcaccacgttacggtggagattaccaattatcataa

SEQ ID NO: 89336 - protein, 583 aa, Kluyveromyces lactis NRRL Y-1140
MALQQFDYIFAITMLFAFLDAYNIGANDVANSFASSISSRSLKYWQAMILAALCEFLGAVLAGARVSGTIKNNIISASPFEDDPAVLMLTMACALVGSATWLSIATSIGMPVSSTHSIVGGTIGAGIAAGGAKGVQWGWGGVSQIIASWFIAPILAGCLVTIIFLISKFLVLDVKPIEKAIKNALLLVGFLVFATFSVLTMLIVWKGSPNLKLDKLSGTTTALAIVLTGLVACAVYFIFLYPYYRRRILHRDWTLKWYDIYRGPTFYFKSTDDIPPLPAGQSLTIDYYEGRRFEDETAGDDETQIETSHTADGRDTVEGHIEINDKESVNQSIKLVQTETLQEEKPTTKQLWWSLLKQGPKKWPLLLWLIASHGWTQDVIHSQVYDTGALSTDFKDMYKRSAFYDNRIEFIYSILQAITAATMSFAHGANDVANATAPLAAVYDIWQKNTVESKSDVHTWVLAYCAAALVLGCWTYGYRIIKNLGNKMILQSPSRGFSVELGAAVTTVMATQLSIPVSTTQVAVGGIVAVGLCNRDLKSVNWRMVAFCYSGWFLTLPMAGLIAGILNGIILNAPRYGGDYQLS

SEQ ID NO: 89337 - DNA, 1761 bp, Debaryomyces hansenii CBS767
  CDS (1)..(1761)
atggtgcttactcagttcaatcatatctttgctgttgcaatgatatttgcatttttggatgcatggaatattggtgcaaacgatgttgcaaattcgttcgcatcttctatttcatctagatctttaaaatattggcaagccatgataattgcggccatttgtgagttcttgggggctgttttagtaggaaataaagttagtgacactattagaaacaaagttgtcgatgttgccattttcgaaccagaaccagctgtgcttatgttaacaatggcatgtgccttagttggttcttcaatttggttgaccattgctacctctattggtatgcctgtttctactacacattctattgtcggcgccactattggttcagctattgctgccaggggtgctaataatattgtctggggttgggatggtgttgcacagatttttgcctcttggggtattgcaccggtcattgccggtgcttttgcatctattattttccttatttccaagtataccgttttagaaattaaaaacccagccacttccttaaggaatggtttagttttagttcctattttggtcttcatctgtttttcaattttgacaatgttgattgtttggaaaggtgctccatctttgaacttagatgatttatcggatggtgctcttgctggttctattgtaggtgttggtgcagtagcttgtttgctttatatgcttatttgctttccttacatgaaaagaaagttagttcataatgattggactttaaagtggtaccatatatttataggtccagtctactggttcaagtctactgacgatattcctccaatgccagcagatcacaatttgactattgattactataaaggtcgccgtcatgatgaacaagaccaagaccttgatacagtacgcgaggaagacaagttcgaagatattgaagttaacgctgaaaaagtttcatcttcttcgattgatcagacaattaataaagacaatagtggaactaattgtattaaattcaacttagaacaacctgatactacattgtctactaaagaactctggaaagctttgttcaaggaaggtccaaataagtggccattgttattatggttaattttgtctcacggtgttactaaggatattattacggaccaagctcaatctaaaggcgctttatctggtaacttgaaggatatgcactccaaatccaaatattacgataataagattgaatatttattttcattgttgcaagctattactgccggaacaatgtcatttgcccatggtgcaaatgacattgctaatgcaactggtccattatcttcagtttacttaatttggacaactaacaccaccggtgcgaaatcagatgttccagtttgggttttatgttacgcagcggcagcgttagtcattggtctttggacattcggttacagaattatgagtaatttaggtaataagttgattttgcaatcaccatccagaggttttgcgattgaattgggtgcagccattactactgttatggccacacaattagagattccagtttctactactcagtgtgctgttggtgctactgtatttgtcggtttatgtaattttgatgtacgtggtgttaattggagaatggtcatttggatttacgctggatggatttttaccttaccaattgcaggtttaattgcaggtctccttaatgccttcataatacactcaccacactggggcggtaactacgagttaaattaa

SEQ ID NO: 89338 - protein, 586 aa, Debaryomyces hansenii CBS767
MVLTQFNHIFAVAMIFAFLDAWNIGANDVANSFASSISSRSLKYWQAMIIAAICEFLGAVLVGNKVSDTIRNKVVDVAIFEPEPAVLMLTMACALVGSSIWLTIATSIGMPVSTTHSIVGATIGSAIAARGANNIVWGWDGVAQIFASWGIAPVIAGAFASIIFLISKYTVLEIKNPATSLRNGLVLVPILVFICFSILTMLIVWKGAPSLNLDDLSDGALAGSIVGVGAVACLLYMLICFPYMKRKLVHNDWTLKWYHIFIGPVYWFKSTDDIPPMPADHNLTIDYYKGRRHDEQDQDLDTVREEDKFEDIEVNAEKVSSSSIDQTINKDNSGTNCIKFNLEQPDTTLSTKELWKALFKEGPNKWPLLLWLILSHGVTKDIITDQAQSKGALSGNLKDMHSKSKYYDNKIEYLFSLLQAITAGTMSFAHGANDIANATGPLSSVYLIWTTNTTGAKSDVPVWVLCYAAAALVIGLWTFGYRIMSNLGNKLILQSPSRGFAIELGAAITTVMATQLEIPVSTTQCAVGATVFVGLCNFDVRGVNWRMVIWIYAGWIFTLPIAGLIAGLLNAFIIHSPHWGGNYELN

SEQ ID NO: 89339 - DNA, 1767 bp, Yarrowia lipolytica CLIB122
  CDS (1)..(1767)
atggccgctcttcaccaattcgactacatcttcgcgctggcgatgatcttcgcgttcctggacgcgtggaacattggagccaacgatgtcgccaactcctttgccacctcggtctcttcgcgagccctcaagtactggcaggccatgattctcgccgctatctgcgagttcctcggtgccgttctggccggtgcccgagtcaccgataccattcgaaacaagatcattgacgttgaccccttcactgagacccccgccggcctcatgctgctcatgatgtgcgctcttgtcggctcctctgtctggctcaccatcgctacccggctcggtatccccgtttccaccacacactccatcgtcggcgccgtcatcggagccgccatcgccaccaacggaggtggaggagtccactggggctgggagggattctccaagattgtcgcctcgtggttcattgcccccgccattgccggaggctttgctgccctcatctacctcgttaccaagtacgttgttctggagcgaaagaacgccctgcgaaatgccctgtggatgggctacatctacgtcggcatcacctttggcgtgctcaccatgctgattgtgtggaagggagcccccaacctgaagctcgacaagctgtccaccggtgccaccgtcggctccatcatcggtgtcggagccgtcgccgccctgctctacggaatcttcctccagcccttcttctaccgaaagctcgtcaaggaggaccacaccctgcgagcctgggacatcttctacggtcccatgctctactaccgaggagaggtgccccccatgcccgagggaatgaaccgacacgactatgtggtcgactactacaagtttgtccgaaccaaggaggagtacctggagtactacggccatctcaacggctacgagggcgatgacctcaccgaggacgaggagcagcagattctggtggtctcctccaaccccgagaagcacaacggtatcgagtctgtcgagtccgaggaggacgagcgaaccaacgcctcccgagctgccgccctcgagtccgtcgacaagtcctggaaggtcctggcccgaaaccccaagaactggcccaagctcttctggaaggccatttcgcacggctggaccgtcgatgtcattgccgcccagaagacctccggccacgctctgtccggcgatctccgaaagatgttctccaaggccaagaagtacgacaacaaggtcgaggctctgtactccttcctccagtgtgtcaccgcttgcactgcctcttttgcccacggttctaacgatatctccaacgctgtcggtcccctgaccaccatctaccagatctggtccaccaaccagaccggaaagaaggccgatgtgcccgtgtggatcctggtctacgcttcttgcgcccttgtcattggtctgtggacttacggatacaacctcatgtccaaccttggtaacaagatgaccatgcagtccccctctcgaggtttctccatggagtttggcgccgccgtcaccaccatcatggccacccgtctcaacctgcccatctccaccacccagtgcattgtcggtgccattgtcgccgtcggtctgtgtaacggaaccatcaaggccgtcaactggcgaatggttgcctggtgttactttggatggattttcaccgtcccttttgctggtctcattgccggaatcctcatgggtatcatttccaacgcccccaagcttggtgaggtttaccaattgtcttag

SEQ ID NO: 89340 - protein, 588 aa, Yarrowia lipolytica CLIB122
MAALHQFDYIFALAMIFAFLDAWNIGANDVANSFATSVSSRALKYWQAMILAAICEFLGAVLAGARVTDTIRNKIIDVDPFTETPAGLMLLMMCALVGSSVWLTIATRLGIPVSTTHSIVGAVIGAAIATNGGGGVHWGWEGFSKIVASWFIAPAIAGGFAALIYLVTKYVVLERKNALRNALWMGYIYVGITFGVLTMLIVWKGAPNLKLDKLSTGATVGSIIGVGAVAALLYGIFLQPFFYRKLVKEDHTLRAWDIFYGPMLYYRGEVPPMPEGMNRHDYVVDYYKFVRTKEEYLEYYGHLNGYEGDDLTEDEEQQILVVSSNPEKHNGIESVESEEDERTNASRAAALESVDKSWKVLARNPKNWPKLFWKAISHGWTVDVIAAQKTSGHALSGDLRKMFSKAKKYDNKVEALYSFLQCVTACTASFAHGSNDISNAVGPLTTIYQIWSTNQTGKKADVPVWILVYASCALVIGLWTYGYNLMSNLGNKMTMQSPSRGFSMEFGAAVTTIMATRLNLPISTTQCIVGAIVAVGLCNGTIKAVNWRMVAWCYFGWIFTVPFAGLIAGILMGIISNAPKLGEVYQLS

SEQ ID NO: 89341 - DNA, 1686 bp, Aspergillus nidulans FGSC A4
  CDS (1)..(1686)
atggtgctcgaccagtacacctacatcttcgccattggcaccatctttgccatgctggatgcctataacaatggagccaacgatgtcgccaactcctgggccaccagcgtctcttcccgctccatctcctaccgccaggccatggtcttcggcaccatcttcgagttcctcggcgccgtgaccgtcggtgcccgcaccgccgacacgatcaagaacggaatcattccccccgaagcctttgagggcaacgcgggcgtccagatgctcgcctttgcgtgcgccctggccgccgcctcctcatgggtgatgtggtgcacccggcactctacgcacgtctcgtcgacttactcgctcgtctctgccatcgccggcgtcggcgtcgcaacggccggcgcctcctccgtccaatggggctggaacaagggcaacgggttgggcgccatcttcgccggcctgggcatggccccggccatctccggctgtttcggtgctatcatcttcctcctcatcaagttcgtcgtccacatgcgccgcaaccccgtcccctggtctgtctggaccgcgcccttcttcttccttatcgccggcaccgtctgctgtctctccatcgtctacaagggctcgcccaacctgggcctttccaaaaagccgcccggctgggtcgccggcgtgaccctgggcactggcggcgccgtctgcctgctctccgccttcttcttcgtcccgttcgcgcacgcccgtgtcatcaagaaggactacaccctcaagtggtggatgttcctctacggccccatcctcttcagccgtccggccccggcggacgctacctccgccgagctctccagcgtccccaactacgccgtcatgcaggacgacggcctcccgcccgactcgccagagaccctcgtcgacgagcccctcccgccagccgcccagtcggaaaagaacccctctgcttcagctaccgaggctcagctcgactataaggagctcgtcgctcgcggccaggagcgtttccacgccaaactccgacgcggccgcggccccttggcctgggccatgcgcaccctccacgacaacccgatcggctccggcgagatctacgagctgcacaacatcaagatcctgctcaagcgtattcctgccatgatcaccgttggactgctctatggtctgcactacgacattcacgccgcgcagtcgggtatccatgggacccccgagggggcccgcatggagcgagtgtatgcccatgccaccaagtatcccaatgaggtcgagcatacctactcctttgtccagatcctgacggcctgcactgcctcttttgcgcagcggcgccaagcgacatcgggaactccgttgggccgtgggcggttctctactctgcctggaccaccggcaaggccaatcacctaccactcgcccagtcgtgggtgctcgatggaactaggcgccgccattacagtccttgttttcagtcagtacaagctgcccgtgtcgacatccatgtgcattacaggcgcgactgttggagtcggtctgtgcaacggcaccctcaaggccgtcaactggcagcgggtgggactgttgggactgggatggatcatgacgatccccattgcaggaacgctggccggatgtctgatggggttgattctgaatgcgccgcattttggctcatag

SEQ ID NO: 89342 - protein, 561 aa, Aspergillus nidulans FGSC A4
MVLDQYTYIFAIGTIFAMLDAYNNGANDVANSWATSVSSRSISYRQAMVFGTIFEFLGAVTVGARTADTIKNGIIPPEAFEGNAGVQMLAFACALAAASSWVMWCTRHSTHVSSTYSLVSAIAGVGVATAGASSVQWGWNKGNGLGAIFAGLGMAPAISGCFGAIIFLLIKFVVHMRRNPVPWSVWTAPFFFLIAGTVCCLSIVYKGSPNLGLSKKPPGWVAGVTLGTGGAVCLLSAFFFVPFAHARVIKKDYTLKWWMFLYGPILFSRPAPADATSAELSSVPNYAVMQDDGLPPDSPETLVDEPLPPAAQSEKNPSASATEAQLDYKELVARGQERFHAKLRRGRGPLAWAMRTLHDNPIGSGEIYELHNIKILLKRIPAMITVGLLYGLHYDIHAAQSGIHGTPEGARMERVYAHATKYPNEVEHTYSFVQILTACTASFAQRRQATSGTPLGRGRFSTLPGPPARPITYHSPSRGCSMELGAAITVLVFSQYKLPVSTSMCITGATVGVGLCNGTLKAVNWQRVGLLGLGWIMTIPIAGTLAGCLMGLILNAPHFGS

SEQ ID NO: 89343 - DNA, 1716 bp, Aspergillus nidulans FGSC A4
  CDS (1)..(1716)
atgcctcatccacttaccgccaagtatgactggatcctggccatcacatcgatggcctttgtcttcagtgcggccagtaacggagccaacgatgtcgcaaacgcctacgccacctccgtcgcggcccgcaccctgaagatgtggcacgtcggtatcctggccgcaattactgagttcgtcggtgcggtcgcgctcggaaaccgtgtgaccgacaccatcaaatccggcatcatcacccccgaccgcttcattggtaaccccggtacctacatgctcgccatgggatgcgctgaggtcggctccgctgcctggctcaccaccgctaccttcttgggctggcccgtatccacaacgcagagtatcattggtgcattggtcggtgtcggctttgcgacccaggccgatatcacctgggaatggaccagcggcagtgtctcgcagaccgccgcctcatggggtgttgctcccggcatcgcctgcggtttctcggccatcatcttcggtaccctcaagtacgccgtcctcgagcgtgaggatcctttcaagtggggtctgcgtctgatcccctggtacatcgccttgactggtgggatactcgccctgtttatcacgatcgaagcgcccaccgccccttctctcgaggaattcggcgccggaaaggctgtcggtatcatcctcggctgtttcttcggttgtcttttcgtcggctacgtcttcttcatgccctacttccaccgccgcctcgtcaggcgtgacgcccgcgttcgcttctaccatatcccacttggacccctcctctggactgaaaacccgcctctctatttccctcgtgagggtgaatgggccattacaaaccactacgaggatgcatacggtgaggtccgcgcaggcggacaacagactatcaccgccgctgtggccggcagcgtccttcctcctgcggacggaaaagaagccagggacacagacattgagcgccagcccgactcgcttgcttcaagtcccgaaatcgcacccaaaaagcgtatcattgagcctgaagaacgcttcctcgaccccgtccgtgatctctcttggggtaacccccggaagtggcttggctacatcaaatacgccttcctgcagggtgtgacccgcgacgtgatcacgcacgattcccagctcctccgcgacattcatgcccgtgcccgtcgctacgacgaccgcgtcgaacacatgtggacatactgccaggttgtctccgccatgatgatgtccatcgcccacggatcgaacgatgttgccaacgccgtgggtccatgggctggaagctaccacaccttcaactccggctcagtggaaacagaagccagcacaccagtgtggttcctcgttattgctggtttgctccttggtggcggattctggttctacgggtaccatatcatgagggcgcttggcaacaagatcacccagatgtctccaacgcgcgggttcgcgacggagctgggtgcggccacgacggtattgcttgcgtcgcgtttgggattgcccgtctcgacaacacagtgcctcactggcgctgcgatcggtgttgccctaatgaactatgaccttgcggcggtcaattggcgtcagattgcatttatcttctcgggctgggtgcttaccctgccttgcgccggccttattgctggtctactttgtgtaatggcgttgaatgcgccgcatttctag

SEQ ID NO: 89344 - protein, 571 aa, Aspergillus nidulans FGSC A4
MPHPLTAKYDWILAITSMAFVFSAASNGANDVANAYATSVAARTLKMWHVGILAAITEFVGAVALGNRVTDTIKSGIITPDRFIGNPGTYMLAMGCAEVGSAAWLTTATFLGWPVSTTQSIIGALVGVGFATQADITWEWTSGSVSQTAASWGVAPGIACGFSAIIFGTLKYAVLEREDPFKWGLRLIPWYIALTGGILALFITIEAPTAPSLEEFGAGKAVGIILGCFFGCLFVGYVFFMPYFHRRLVRRDARVRFYHIPLGPLLWTENPPLYFPREGEWAITNHYEDAYGEVRAGGQQTITAAVAGSVLPPADGKEARDTDIERQPDSLASSPEIAPKKRIIEPEERFLDPVRDLSWGNPRKWLGYIKYAFLQGVTRDVITHDSQLLRDIHARARRYDDRVEHMWTYCQVVSAMMMSIAHGSNDVANAVGPWAGSYHTFNSGSVETEASTPVWFLVIAGLLLGGGFWFYGYHIMRALGNKITQMSPTRGFATELGAATTVLLASRLGLPVSTTQCLTGAAIGVALMNYDLAAVNWRQIAFIFSGWVLTLPCAGLIAGLLCVMALNAPHF

SEQ ID NO: 89345 - DNA, 1803 bp, Candida albicans SC5314
  CDS (1)..(1803): transl_table=12
atggctttacatcaatttgattatttgtttgcaattgccatgatctttgcgttcttggacgcttggaacattggtgccaatgatgttgcaaattccttctcttcatcagtttcatccagatctttgaaatattggcaagctatgattttggccgctatcatggaattcttgggtgcagtgttggtcggttcacgtgtgtctgatactatcagaaacaaaattgttgatattgctgtgtttaaaaatgaacctgctgtgttgatgttgactatgacaactgccttgattggttcatcaacttggttgactattgccacctccattggtatgccagtctctactacccattctattgttggtgctgttattggtgcctccattgctgccaaaggtgctgagaacataatttggggttggaaaggtgttgctcaaattattgcctcttggttcattgcccctgctattgctggtgcctttgcttctattattttcttgatttctaaatttggtgttttggaagttaaaaacccaagaacatctttaagaaacgccatgttgcttgttcctttgcttgtgtttgtcgcattttccattttaactatgcttatcgtttggaaaggtagtccaaaattgaagttgaacactttgtctactggtaccactgtcggtgctattttcggaactggtggtgttgcaactgctatctactttttgtttgcttacccatactacaaaagaaaattggtttacgaagactggactttgaaatggtacgacattttcagaggtccaatttactggttcaagtccactgacaatattccaccaattccagaaggtcaaactttgaccaaagattattacaagggaagaagatacgatgaagctggaaatttggttgtccttcaaactgatagagatgtttctgctggtgttgtcgaagctcacgatggtgaagactccaactctgatggtgaaaaaacatctgctgttatccaaaaccaacctgccccagttgattctgaaaaacaacctgccccacctgctgctggtactgctgaatacaaaggtgaaaacacaagatggccaaataaatttgctggttacgttaaattggtcaaagaatcaccaaagaactggccattagtgtttttcttgcttttgactcatggtgttagacaagacattattgccaaccaagctggatccaaagatgtgttagctggtgatttgcacaaaatgcacactgcttccaaatattacgacaacaagattgaatacatgtactcacttttgcaagcaatcactgcttgtaccatgtcttttgctcacggtgccaacgatattgctaatgccactggtcctcttgctactgtatatttagtttggactaccaacactaccgcttctaaagctgaagttccagtttgggttttgtgttacgctgccggtgctttagttgtcgggttatggacgtatggttaccacatcatggctaacttgggtaacaaattgattttgcaatcaccagctagaggtttctctattgaattgggtgctgctgtcactaccgttatggctactcaattgaaaatcccaatctccactactcaatctgctgttggtgccactgttttcgttggtttgtgtaacagagaatggaaatccgtcaactggagaatggttgcatggtgttatttgggttggatctttactttgccatgtgccggtttgattgctggtatcataaatgctattatcttatatgcaccatctaaaggtgtaagctatactatgacttag

SEQ ID NO: 89346 - protein, 600 aa, Candida albicans SC5314
MALHQFDYLFAIAMIFAFLDAWNIGANDVANSFSSSVSSRSLKYWQAMILAAIMEFLGAVLVGSRVSDTIRNKIVDIAVFKNEPAVLMLTMTTALIGSSTWLTIATSIGMPVSTTHSIVGAVIGASIAAKGAENIIWGWKGVAQIIASWFIAPAIAGAFASIIFLISKFGVLEVKNPRTSLRNAMLLVPLLVFVAFSILTMLIVWKGSPKLKLNTLSTGTTVGAIFGTGGVATAIYFLFAYPYYKRKLVYEDWTLKWYDIFRGPIYWFKSTDNIPPIPEGQTLTKDYYKGRRYDEAGNLVVLQTDRDVSAGVVEAHDGEDSNSDGEKTSAVIQNQPAPVDSEKQPAPPAAGTAEYKGENTRWPNKFAGYVKLVKESPKNWPLVFFLLLTHGVRQDIIANQAGSKDVLAGDLHKMHTASKYYDNKIEYMYSLLQAITACTMSFAHGANDIANATGPLATVYLVWTTNTTASKAEVPVWVLCYAAGALVVGLWTYGYHIMANLGNKLILQSPARGFSIELGAAVTTVMATQLKIPISTTQSAVGATVFVGLCNREWKSVNWRMVAWCYLGWIFTLPCAGLIAGIINAIILYAPSKGVSYTMT

SEQ ID NO: 89347 - DNA, 1890 bp, Ustilago maydis 521
  CDS (1)..(1890)
atgcccaagtaccacgactatgactatctgtttgcgttttcgatgatcggcgcgttcgtcaatgcgtatggtatcggagcgaacgatgtggccaattcgtttgcgacgtcggtgtcgtcaaaatcgctcacgttccgccaagcgatggtgtgcgctgctttctgcgagttcctcggagcggttcttgtgggtgcgcgtgtggcatcgacgatcaagaacggcattatcgacctcgacgtcttcaacggcaacgcgtcggtggttcttctcgcattcacctgttccatcatcggatcggctagctggctcacgtttgcaactcgcaatgcgatgcctgtctcgacaacgcacaccacagtcggatcggtgatcggggtgggtatcgccgtcagcggcgctaacggtgtcaagtggggatggaacggtgttgctcagatctttgctagttggggtatcgctcctgcggtcgcaggtgtctgtgcagcttgcgtttacctgatcaccaagttggtcgtgctcaagtcgcgcaacccggtgatggtgggcttgtggactgcgcctgtctactttttcatcgtatccggtgtgctcaccgtgtcgatcatcgtcaagggatcgccttcgctcaacttggacgagttgccgccgagcactacgattgccgcggttctgggaaccgcgtcagtagtggcactgctgtccatcctcttctggctgccttatgttcatggaaaggtggtcaagggtgattacacgctcaagtggtaccactttttcatgggtcccttgctgtggagacgacctgcacccgaggatgcggtcactgccgacatggctgtaccggactacaagctgcatgactttgacgagccggcggagcagcaggcggtttcggagcgtacggcggcggccgtacgtgcgcagccagtggttgctggtgcagctctgcaacgcatcgaccattccaacgacattgaatcgggtgccaacagcgatacgcacggttcttcgccttcgaccgaagagaagaatgccaagctcgtgcagcctggattctgcaacgacagcccttcgcatcttgcacgcgtcgaggctgaactggaaggtgcgcacgcattacctgcggaacacacaccgggacgacccacaccaccggcataccgtacgttcgaaggtagctggctggagccgtggaacctgtacaccatcattcggtataacatgcttccttggatgtggtacagtgtctcggcggggttgaggaccgacattcacgctatgcaagcgcacggctccgagaaggaaaaggcaaagttgcgtcagatgcatgcggtggctgaacagtacgacaatcgcgtagaacacctctactcgttcatgcaggtcatgactgcatgcacagcaagcttcgcacacggcgccaacgatgtttccaacgcaattggacctctcgctgtggtctactcgatttggtccacatctctgttcccggaaagcaaggaacccgttccgatctggatcctcgcttttggtggtgcagccatcgtgatcggtctcggcacgtatggttggaagctcatgtcggtgctaggtaaccgacttaccatgcactcaccaagccgtggattctccatggaactcggcgcaagtatcacggtagtcattgcaagctatctaggccttcctgtctcgagcacacaatctattactggcgcgacgctcgctgttggtctctgtaacggtgactacaaggcgatgaactggaaaatgctcgcttggatcttctttagctggatcctcactctccccatcgctggtttgatcagcggctgcttgctcgcaatcgtcctcaatgccccgagctggtacactcccgcacctgtactttga

SEQ ID NO: 89348 - protein, 629 aa, Ustilago maydis 521
MPKYHDYDYLFAFSMIGAFVNAYGIGANDVANSFATSVSSKSLTFRQAMVCAAFCEFLGAVLVGARVASTIKNGIIDLDVFNGNASVVLLAFTCSIIGSASWLTFATRNAMPVSTTHTTVGSVIGVGIAVSGANGVKWGWNGVAQIFASWGIAPAVAGVCAACVYLITKLVVLKSRNPVMVGLWTAPVYFFIVSGVLTVSIIVKGSPSLNLDELPPSTTIAAVLGTASVVALLSILFWLPYVHGKVVKGDYTLKWYHFFMGPLLWRRPAPEDAVTADMAVPDYKLHDFDEPAEQQAVSERTAAAVRAQPVVAGAALQRIDHSNDIESGANSDTHGSSPSTEEKNAKLVQPGFCNDSPSHLARVEAELEGAHALPAEHTPGRPTPPAYRTFEGSWLEPWNLYTIIRYNMLPWMWYSVSAGLRTDIHAMQAHGSEKEKAKLRQMHAVAEQYDNRVEHLYSFMQVMTACTASFAHGANDVSNAIGPLAVVYSIWSTSLFPESKEPVPIWILAFGGAAIVIGLGTYGWKLMSVLGNRLTMHSPSRGFSMELGASITVVIASYLGLPVSSTQSITGATLAVGLCNGDYKAMNWKMLAWIFFSWILTLPIAGLISGCLLAIVLNAPSWYTPAPVL

SEQ ID NO: 89349 - DNA, 1623 bp, Strongylocentrotus purpuratus
  CDS (1)..(1623)
atggagactagtaccagtttctttgggacgggcatgacgacagctgatccctcgatggcgacgggagacgttctatggatgttgatcagtgggttcatcatgtcgttcatgttggcttgtggtctaggagctaatgatgtagctaactcctttgctacatctgtaggtgctaaggtgctgaccctaccatgggcttgtgtgttagcttctatctttgagacggctggggcggtgttgcttggtgccaaggtgtcggatacgatcaggaaaggtatctttgatgtcggtctctatgacggtcaggaagaggtcttgatgcttggacaagtgtgtgcccttggaggtgcttgtatttggttgctgctagctacatggctgaagatgccagtctctggaacacacagcattgtgggagctatgctgggatttcatcttgttgtctttcagttggaaggcattgcttggaaacaatttggattcattgttggatcttggttcttatcaccggtcatgtctggtttcgtatccagtatcatctttgtcatctacaggaagattgttattgacaaggagaatccccttgagcctggtctgagagttcttccgttcttctatgctcttgttctgatcctcaactgtatatcaatcttcattgatggacctgaaatgctgtatcttcatgtcatcccagtatggggggtcatgattctgagttttggagttggtatcataactggtcttatcgtcttcttcttcttggtacccagatggagaaaacaacttcaagttttatccgagacatcaacgtatacgcgcagtgatgacctacaggaggtcaaaatggacacagatgttaaaatacccctgtcagatgaaggtattgatgttgatatagtggatgggaagatgaaggaagagaatgaagcagctgttcctgtggagcaagatagtatgattagttcaggtccttcgtcaatgaccagctcgcctgataccaagcactgcactcgctttggaaagctcaatactggcaaatggaaacggttgctaagcaaggattctactgaaggagagagtaggcaagaatcagaagcctggaagagtgttaaagaccatccggtggttgctaagctatgcactccactacagatcttatccgccatctttgctgcattcgcacatggtggcaacgatgttagcaatgccattggtcccttggtagcattgtggactatctatgcgaacggtaacgtagaccagaagtctggaacccctatatggatcctggtctacgggggtgcagggattacgattggtctatggttgctaggacggagggtcattgagactgtaggatctaaccttacacctataacaccatcaagtggatttagtatagagctaggagccgctgctactgttctgctagcatctaacattggtatacctatcagcaccacacactgtaaggtgggatcggtcgtagctatcgggaaggtgagatctgcagcgacggttcaatggcgtctgtttataaacatcatcatagcatggatagtgactgttcctgctactgctgccattagtgcagcgctcatggcaggcctactaagagtcttataa

SEQ ID NO: 89350 - protein, 540 aa, Strongylocentrotus purpuratus
METSTSFFGTGMTTADPSMATGDVLWMLISGFIMSFMLACGLGANDVANSFATSVGAKVLTLPWACVLASIFETAGAVLLGAKVSDTIRKGIFDVGLYDGQEEVLMLGQVCALGGACIWLLLATWLKMPVSGTHSIVGAMLGFHLVVFQLEGIAWKQFGFIVGSWFLSPVMSGFVSSIIFVIYRKIVIDKENPLEPGLRVLPFFYALVLILNCISIFIDGPEMLYLHVIPVWGVMILSFGVGIITGLIVFFFLVPRWRKQLQVLSETSTYTRSDDLQEVKMDTDVKIPLSDEGIDVDIVDGKMKEENEAAVPVEQDSMISSGPSSMTSSPDTKHCTRFGKLNTGKWKRLLSKDSTEGESRQESEAWKSVKDHPVVAKLCTPLQILSAIFAAFAHGGNDVSNAIGPLVALWTIYANGNVDQKSGTPIWILVYGGAGITIGLWLLGRRVIETVGSNLTPITPSSGFSIELGAAATVLLASNIGIPISTTHCKVGSVVAIGKVRSAATVQWRLFINIIIAWIVTVPATAAISAALMAGLLRVL

SEQ ID NO: 89351 - DNA, 1965 bp, Tribolium castaneum
  CDS (1)..(1965)
atggttgtggattctgggggagacattttggcactgaaacgtgcaggaggctggaaatctagtgctgttgcagaaggatatgtggaagattcaattaagcagaagctagaacgagcaaaaaaattgtttctagttccagagccgacaagtgcttcctccagttccaaatacgcctccacagtttcagaagaaacaagtgaaaaatttaatgctgctctcactccgcatgatgagtgtccaaaaagcctagccaacaacttcaccacctccaatcaactcagaagaatgttggaaccctacgcccccagttcgatatggcttgtggtggtaggattcgtaatcgccttcatcctggccttcggcatcggagccaacgacgtcgccaactcctttgggaccagcgtgggctccaaagtcctcaccatagtccaggcgtgctgtttggccacggttttcgaagtggccggtgctattctcataggttacaaggtctcggacaccatgaggaagggcatcctggatatcaaagtgtacaatgacgccgaagtcgagcttatgttgggctctctgagcgctttgacatcgagtgccgcctggctgatggtcgcaacgttcttcaagttgcccatttcagggactcacagcatcgtgggcgcgacggtggggtacagtctcgtcgccagggggaccaggggcgtgcactggggcacgcttgccaaaattgagggccaaatatttatttctccgtacgtccaaagacttgagcaaatttggttatttttaatgttatgcacatttttttttcgtttgactgatcctctcgaagcaggtctcttctcgttgccccttttttacagttttacgatattagttaacgttttttccatcgtacacgatggtcctaaattgctctacatggacaacataccgttttggttggcgactaccataagtctttccatcgcctttctcacaatgattttcatctggttggtggtagttccttggcagagacggaaaatcaaagctgatttgttagccgagaaaccgactgttaatttcaacattggcgagtctacagatacgtcacctgagggcagtccacgaaaatcgaatcgcaactcaacggctttatctgaacgtcaattaaccgtaatatccgaaagtaccgaacttcaagccatggaaaataaaaaaacggccgctaaatacatcttcccactgcaaaccaatgataacaaaaatggttacatgccggctaaagagactgaaatccacaccagacctaagactttaaaactggtcgaaagtacaaacgaagtgaacccaactctgtctccaagctcgagtggagttcccttaattattaataaaaatactagaacacaaagtgaccaaggaatgtgtgctttagatatcaaagataacgaaagcactctcgttgaaaataaaagcgtctccaagttgttcagttttttgcaagttttaactgccatgtttggtagctttgctcatggaggaaatgatgtcagtaacgcaataggccctttagtaactttatggctcatctataccgagggaacagtgcaccaaaaatcggagactcctctctacatcttgctgtttggagggtttggaatttcagtcggattgtggctttgggggaggagagttatacaaacgattggggaagatttgaccacgataaccccctcaactggttttacgattgaaatcggtgcagcttttacagtattactagccagcaaaatcggaatacccatctcgaccacccactgtaaagtcggatcagttgttttcgtcggttatttcagttcttcgaaaaaaggagtagattggagtctatttaggaacatcatctcagcttggttgataacagtgcccattgcagctttactctctgctgcaaccatgtttcttctacgttacattgttttggattaa

SEQ ID NO: 89352 - protein, 654 aa, Tribolium castaneum
MVVDSGGDILALKRAGGWKSSAVAEGYVEDSIKQKLERAKKLFLVPEPTSASSSSKYASTVSEETSEKFNAALTPHDECPKSLANNFTTSNQLRRMLEPYAPSSIWLVVVGFVIAFILAFGIGANDVANSFGTSVGSKVLTIVQACCLATVFEVAGAILIGYKVSDTMRKGILDIKVYNDAEVELMLGSLSALTSSAAWLMVATFFKLPISGTHSIVGATVGYSLVARGTRGVHWGTLAKIEGQIFISPYVQRLEQIWLFLMLCTFFFRLTDPLEAGLFSLPLFYSFTILVNVFSIVHDGPKLLYMDNIPFWLATTISLSIAFLTMIFIWLVVVPWQRRKIKADLLAEKPTVNFNIGESTDTSPEGSPRKSNRNSTALSERQLTVISESTELQAMENKKTAAKYIFPLQTNDNKNGYMPAKETEIHTRPKTLKLVESTNEVNPTLSPSSSGVPLIINKNTRTQSDQGMCALDIKDNESTLVENKSVSKLFSFLQVLTAMFGSFAHGGNDVSNAIGPLVTLWLIYTEGTVHQKSETPLYILLFGGFGISVGLWLWGRRVIQTIGEDLTTITPSTGFTIEIGAAFTVLLASKIGIPISTTHCKVGSVVFVGYFSSSKKGVDWSLFRNIISAWLITVPIAALLSAATMFLLRYIVLD

SEQ ID NO: 89353 - DNA, 1416 bp, Candidatus Protochlamydia amoebophila UWE25
  CDS (1)..(1416): transl_table=11
atggatactgcgctactcattttgattttgatcaccggattttatatggcttggagcataggagctaatgatgttgccaatgctatgggaacatctgttggttcaggttcattaactttgcgccaagctgttctgattgccgctgttttagaattttgcggcgcttttttctttggttcccatgtttctaaaactgtgcaaagtgggattattgatccagatgtttttaattatgatcccaaactgctagtttttggaatgcttgcttctttaggttctgtaggaatgtggcttcaattagcatcctattttggttggcctgtttcaacgacacattcaattgttggcgcgattgtaggctttggtactgtttttggagggataaaggccgtatactggaaagaagtgtgttatattattaccagttggattttttctcctattttaggagggattattgcttactatattttttctcttttaagaaaaagaattttttatgctttaaatcctctggaagaaacgcgtcgtttaacaccatttttagtttttgtggttaccattattctagctgtggttcttatttttgaagggctgcataatttaaatgtagaattttcgttaacaagtaaaattttgatgacacttgcgattggcttgatgggttctttcgttagttatttattagtacgccgaattcctattattccccaagaaaaactctctgttccttacaattctgaagctttacattctttggaaaaggttcgtaaacatctgcaaagatttagaatgaagtctgctggagaagctcaatacactgcaggattattattagaagaagtagaggccctttcaaaaacttttgaatcaaaaattaatacagatcatacacatgttgaatatgttcaagtggaaaaaatatttgcttatttgcaaattatgactgcttgtatgatggcttttgcacatggagctaatgatgttgctaatgctataggtcctttatcagctgcagtagctattttgacaactggtttatttgctgtggatgctcccgttcctacttgggctcttgcattaggtggaagtggaattgttatagggttagcaacctgggggtggagagttattgagacaattggaaaaaaaattacagaattaacagctagtcgaggttttgctgctgaatttggagcggctacaacaattgtcattgcttctaggtttggtttacctatttcaacaacgcacacgcttgtgggtgctgttttgggagtggggtttgctagaggtcttgaagcagttaatttaacaacgacccgtgatattttagtttcttggatcgtgacggttcctattggagctttgttagcaattatattgatttatccgatccaagcaatatttggataa

SEQ ID NO: 89354 - protein, 471 aa, Candidatus Protochlamydia amoebophila UWE25
MDTALLILILITGFYMAWSIGANDVANAMGTSVGSGSLTLRQAVLIAAVLEFCGAFFFGSHVSKTVQSGIIDPDVFNYDPKLLVFGMLASLGSVGMWLQLASYFGWPVSTTHSIVGAIVGFGTVFGGIKAVYWKEVCYIITSWIFSPILGGIIAYYIFSLLRKRIFYALNPLEETRRLTPFLVFVVTIILAVVLIFEGLHNLNVEFSLTSKILMTLAIGLMGSFVSYLLVRRIPIIPQEKLSVPYNSEALHSLEKVRKHLQRFRMKSAGEAQYTAGLLLEEVEALSKTFESKINTDHTHVEYVQVEKIFAYLQIMTACMMAFAHGANDVANAIGPLSAAVAILTTGLFAVDAPVPTWALALGGSGIVIGLATWGWRVIETIGKKITELTASRGFAAEFGAATTIVIASRFGLPISTTHTLVGAVLGVGFARGLEAVNLTTTRDILVSWIVTVPIGALLAIILIYPIQAIFG

SEQ ID NO: 89355 - DNA, 1263 bp, Mannheimia succiniciproducens MBEL55E
  CDS (1)..(1263): transl_table=11
atggaattactgcataattatggcacagttattatctttatcactgcggcctttgcattttttatggcatttggtgtcggtgctaacgatgtatcaaatgccatgggaacatcggtaggttccggcacaattaccgccagacaagccatttatatcgcactcatctttgaagccgccggggcttacttagccggcggtgaagtaacggaaacaataaaaagcggcattattgatcctatggactttgtcacccatccggataccttggtgttgggtatgatgtcggctttattcgcttccggttcttggttattaatcgcctcccgttggggatggccggtttccaccacacattcgattgtcggcgcaattgtcggtttcggttgtattaccgccggtgctggcgcagtaaaatggagtgcgctcacaggtatcgtcggcagctggttcattacgccctttatcgccggtgtgttagcgtacggtattttcttctgtattcaaaaattaatttttgataccgaacatccgctgcgaaacgcacaaaaatacgggccgcacttaatgggtgcgacagtatttattatttgcatcgtaaccgttgccaaaggtttaaaacatgtaggattaaatttaaccggattagaaaccttattaatttctattgccctaagtttagtctctgttgtcatcagctacttttattttcgtagcaaaaaattcatcaaaaaggtgcataaaggcgtttttggcggcgtagaacacgtctttagcattttaatgttaatgacagcttgtgcaatggcattcgctcacggttcaaacgatgtggcaaatgctatcggaccactggcttctgtcgtcactatcgtagaaagcggcggcgacatcgcagccaatgcacctattgcctggttggttttaccgctaggagccgcaggtattgccgtgggtttaatcgttatgggttacaaagtgatggcaactatcggcacaggtatcacagatctcacaccaagccgaggattttccgcccaatttgctaccgccgcaacggtagttgtagcatcgggaacgggcttgcctatttcaactacacaaacgctagtgggagcagtattaggtatcggttttgcgcgaggtatcgccgcattaaacttaaccgtaatccgtaatattatagcctcctggatcgttaccttaccggctggtgcattttttgctattatcatttattacatcttagatgcaatttttagataa

SEQ ID NO: 89356 - protein, 420 aa, Mannheimia succiniciproducens MBEL55E
MELLHNYGTVIIFITAAFAFFMAFGVGANDVSNAMGTSVGSGTITARQAIYIALIFEAAGAYLAGGEVTETIKSGIIDPMDFVTHPDTLVLGMMSALFASGSWLLIASRWGWPVSTTHSIVGAIVGFGCITAGAGAVKWSALTGIVGSWFITPFIAGVLAYGIFFCIQKLIFDTEHPLRNAQKYGPHLMGATVFIICIVTVAKGLKHVGLNLTGLETLLISIALSLVSVVISYFYFRSKKFIKKVHKGVFGGVEHVFSILMLMTACAMAFAHGSNDVANAIGPLASVVTIVESGGDIAANAPIAWLVLPLGAAGIAVGLIVMGYKVMATIGTGITDLTPSRGFSAQFATAATVVVASGTGLPISTTQTLVGAVLGIGFARGIAALNLTVIRNIIASWIVTLPAGAFFAIIIYYILDAIFR

SEQ ID NO: 89357 - DNA, 1296 bp, Colwellia psychrerythraea 34H
  CDS (1)..(1296): transl_table=11
atggaaattatacttaactcaggcggcacttttgtaattcttgctgccgttgttggcttcttcatggcgtggggcattggtgccaatgatgttgctaatgcaatgggaacctctgttggatcgaaagcattaacgattaaacaagccattattattgcgatgatttttgagtttgcgggtgcttaccttgccggtggcgaagtaacttcaaccattcgtaaaggcattatagatgccagttactttgtcgatagcccagaattactggtttacggtatgatctcagcactttttgctgcagctacatggttattaatagcctcagctttaggttggcctgtatcgactacccactcaattgttggtgctattgttggttttgctgcagttggtgttagtactgatgctgtagaatggggcaaagtagttggcatcgttggtagctggattatcacaccgctaatatcaggaattatcgcctttattatctttaatagtgcgcaaaagcttatttttgatacggataaaccattgcaacaagctaagcgttgggttcctgcttatatgttccttgctggctttgtattatcactggttactatcaaaaaaggtcttaagcatatcggcctagaaaacgtcaatttaggctttgttaactttgaaattaaaggcgctggtggtttctatttggcagccattgtcgcaattattgttgctattattggtaaattctttattagccgcttaaagtttgatgaaaaccttgctaaagaagctcattacgtaaacgttgagaaagtattcgcaatattgatgattgttactgcgtgtgcaatggcgtttgctcatggttcaaatgatgttgccaatgctattggcccattagctgccgtggttagtattgttgaacatgatggacaaattgccgctaaatcagcaatagcttggtggatattaccactgggtggttttggtattgttgccggccttgccttgtttggccataaagttattgcaactatcggccaaggtattacacatttaacaccaagtcgtggttttgcagctgagttagcggctgctagtactgttgttattgcttcaggtgcaggcttacctatctctaccacacaaactcttgttggtgctgtgttaggtgtaggtatggcacgtggtatcgcagctattaatttaggtgttgtacgtaacattgttgtatcttgggttataaccttacctgttggtgctggtttatctattgttttcttctggattatgcaggcaacatttagttag

SEQ ID NO: 89358 - protein, 431 aa, Colwellia psychrerythraea 34H
MEIILNSGGTFVILAAVVGFFMAWGIGANDVANAMGTSVGSKALTIKQAIIIAMIFEFAGAYLAGGEVTSTIRKGIIDASYFVDSPELLVYGMISALFAAATWLLIASALGWPVSTTHSIVGAIVGFAAVGVSTDAVEWGKVVGIVGSWIITPLISGIIAFIIFNSAQKLIFDTDKPLQQAKRWVPAYMFLAGFVLSLVTIKKGLKHIGLENVNLGFVNFEIKGAGGFYLAAIVAIIVAIIGKFFISRLKFDENLAKEAHYVNVEKVFAILMIVTACAMAFAHGSNDVANAIGPLAAVVSIVEHDGQIAAKSAIAWWILPLGGFGIVAGLALFGHKVIATIGQGITHLTPSRGFAAELAAASTVVIASGAGLPISTTQTLVGAVLGVGMARGIAAINLGVVRNIVVSWVITLPVGAGLSIVFFWIMQATFS

SEQ ID NO: 89359 - DNA, 1236 bp, Desulfovibrio desulfuricans G20
  CDS (1)..(1236): transl_table=11
atggatatatacactgtttttcttgttctcgccgtcggcgccggctttatgatggcattcaatctgggggccaacgatgtggccaactccatggcatcatcggtcggttccaaagccatcaccgtcaaacaggcggtaatgattgccggtgtgctgaactttgtgggcgccgtatttctgggtgctcatgtaactaaaactatcagcaagggtatcatcaacgcggatatgataacagacccgcgggtgatgatggtaggcatgttcgccgcattgctttctgctgccttgtgggtgctggtggccacgcttacgtcgctgccggtttcttccacgcactccatcgtggggtcgattctcggattcggcattgttgccggagggcccgaagtcgtcaactggggcagtatgggctttgtggtgctttcatggatcatttcgccgctttttggcgcaggcattgctttttttgtattttcccatatacggcggtttattctgtaccgaaccaagataatagaaaaagcgagattctgggccccgttctggatagcgcttaccgccgatcttgtggtgctttcgtttttttataaaacgccggtgggcaagagtcttaacctgcactggtctgtggcgctggggctgaccgccgtgctgacggtggctgtgtggactggtttccgggtgctgttcacacgcacgctgcccaaagatgccgacggacccgaagcagtggaagacatgttccgccgtctgcaggtgggtacggcctgttatgtggcggtgtcgcagggcgccaacgatgtggccaacgccataggccctgtggctgccatatacctgatagcgcgcgaacgcacgctgctggcttctgcggaggtgcccctgtggcttctggtcatcggcgggctgggcattgcgttgggcattgccgtgctggggcacaaggttatggccaccgtgggtgaaaaaataaccaaactgaccaatacccgtggtttttctgtggaattcggagcggccacaacagttctcatggcatcaaatctgggaatgccggtttcttccacacacgccgctgtggggtccatagtgggcgtggggctggccagaggctttggtgccgttgattttagagtactttacaaaatagtgctttattgggtacttacagtacctattgccgctataaccagtatcgtcattttccagcttctcagatggtcgtttttgtag

SEQ ID NO: 89360 - protein, 411 aa, Desulfovibrio desulfuricans G20
MDIYTVFLVLAVGAGFMMAFNLGANDVANSMASSVGSKAITVKQAVMIAGVLNFVGAVFLGAHVTKTISKGIINADMITDPRVMMVGMFAALLSAALWVLVATLTSLPVSSTHSIVGSILGFGIVAGGPEVVNWGSMGFVVLSWIISPLFGAGIAFFVFSHIRRFILYRTKIIEKARFWAPFWIALTADLVVLSFFYKTPVGKSLNLHWSVALGLTAVLTVAVWTGFRVLFTRTLPKDADGPEAVEDMFRRLQVGTACYVAVSQGANDVANAIGPVAAIYLIARERTLLASAEVPLWLLVIGGLGIALGIAVLGHKVMATVGEKITKLTNTRGFSVEFGAATTVLMASNLGMPVSSTHAAVGSIVGVGLARGFGAVDFRVLYKIVLYWVLTVPIAAITSIVIFQLLRWSFL

SEQ ID NO: 89361 - DNA, 1263 bp, Haemophilus somnus 129PT
  CDS (1)..(1263): transl_table=11
atggaaattttacaagaatacggaactatacttgttattattaccgccgttttcggttttttgatggcatttggtgtgggtgctaatgatgtagcaaatgccatggggacatcagtaggttcaggtactattacagcaaaacaagcaatttttattgcgatgttttttgaatgtgcgggagcttacctcgcaggaggagaagtaacagaaacgattaaaagtggcgttatagatccaatgcagtttactgatactccggaaattttggttttcggtatgatggcagctcttttttcatcggggatttggttattaattgcctcaaaaatgggttggccggtttctacaactcatgcaattatcggtgcaattgtcggttttgcttgtattactgtcggtgcacatgcagttgattggggaactgtacgcaatattgtgggaagttggtttatcacccctattctcgccggaattattgcttacgctattttctttagtacacaaaagttaatctttgacacgccaaaacctttagctaatgcccaaaaatacggacctttttatatgggactgaccgttcttattttagctattgtaactatgacgaaagggctaaaacatattggattacatttaactaccatagaaacactgattatatccggtatcattagtattattgcgggtattcttggttctttttattttcgtagccaacgtttcattcaaaatgttacgaaaggaacctttggagcagttgaaaaagtatttagtattttaatgctattaactgcctgtgcaatggcatttgctcatggttcaaatgacgttgccaacgcagtgggtcctttgtccgccgttgtttccatcatagaacatggtggtgagattgcaggaaaaactaccctggcttggtggatcctgcctcttggctctgtcggcattggagtaggtttaattgttatgggttataaagtaatgtcaacgatcgggacaggcattacagacctcacgccaagtcgtggtttcgctgcccaatttgccactgctgtaacagttgtcttagcatcaggaaccggattacctatatcaacgactcaaacacttgttggtgctattttaggtattggttttgcacgtggtattgcagcaattaacttaaccgttattcgtaatattgttgcttcttggattgttacattacctgcgggtactttctttgctattgtgatttattacattatttatgcgatttttcattaa

SEQ ID NO: 89362 - protein, 420 aa, Haemophilus somnus 129PT
MEILQEYGTILVIITAVFGFLMAFGVGANDVANAMGTSVGSGTITAKQAIFIAMFFECAGAYLAGGEVTETIKSGVIDPMQFTDTPEILVFGMMAALFSSGIWLLIASKMGWPVSTTHAIIGAIVGFACITVGAHAVDWGTVRNIVGSWFITPILAGIIAYAIFFSTQKLIFDTPKPLANAQKYGPFYMGLTVLILAIVTMTKGLKHIGLHLTTIETLIISGIISIIAGILGSFYFRSQRFIQNVTKGTFGAVEKVFSILMLLTACAMAFAHGSNDVANAVGPLSAVVSIIEHGGEIAGKTTLAWWILPLGSVGIGVGLIVMGYKVMSTIGTGITDLTPSRGFAAQFATAVTVVLASGTGLPISTTQTLVGAILGIGFARGIAAINLTVIRNIVASWIVTLPAGTFFAIVIYYIIYAIFH

SEQ ID NO: 89363 - DNA, 1290 bp, Shewanella sp. MR-4
  CDS (1)..(1290): transl_table=11
atggttgatgcaggtatggaggtggctaacgtcttagccactaatgggccgtggcttattgccattgcggccgcgtttggttttctaatggcgtggggtattggtgcgaacgatgtagccaatgccatgggaacttctgtaggttccaacgctattactattaaacaagcgattattatcgcaatgatcttcgaatttgctggtgcttacttagccggcggcgaagtaaccagtacgatccgtaacggtattattgattcaagctactttaccgaaacccctgaactgctggtatacggcatgattggctcgctgttagccgcaggaatttggttagttgttgcatcagccttaggctggccagtatctaccactcactctatcgtgggcgcgattatcggcttcgcggctgtgggtgttggcactgattcagtcgcttgggaaaaagtaggtggtattgttggttcttgggtcatcactcctgcaatctctggctttatggccttcattctgttccaaagcacacaaaaactgattttcaacacagataacccactcgctaacgcgaaacgctatgtgcctttctacatggcttttgcgggctttatcatgtcgttagtgaccatccttaagggtctatcacacgttggtattcacttaaaaggcgccgaagcttatatgctggcgggtgtgattgcgctgatcgtcggtatcattggtaaagtggtgatttctcgtttaaaaatggatgagaaagcgacccataaaaccatgtacgctaacgttgaaaaagtgtttgctatcctgatggttctgaccgcctgttgtatggcgttcgcccacggttcaaacgacgtggctaacgcgattggtccattagcggcagtcgtatctgtagttaacagtggcggtgaaattgcgtctaaatctgcattagtttggtggatcctgcctttaggtgccgtgggtatcgtgatgggtctggctatcttcggtaagcgcgtgatgcaaaccattggtaaaaacatcactcacttaacgccaagccgtggttttgctgccgaattagcagcagcttctaccgtagttattgcttctggtactggtttacctatctctactacccaaaccttagtcggtgcggtattaggtgtgggtatggcccgtggtattgcagcaatcaatattggtgttgtgcgtaacatcgttgtgtcttgggtggtaaccttacctgcgggtgcaggtctgtcgatcatcttcttctttatgattaaaggtatctttaactaa

SEQ ID NO: 89364 - protein, 429 aa, Shewanella sp. MR-4
MVDAGMEVANVLATNGPWLIAIAAAFGFLMAWGIGANDVANAMGTSVGSNAITIKQAIIIAMIFEFAGAYLAGGEVTSTIRNGIIDSSYFTETPELLVYGMIGSLLAAGIWLVVASALGWPVSTTHSIVGAIIGFAAVGVGTDSVAWEKVGGIVGSWVITPAISGFMAFILFQSTQKLIFNTDNPLANAKRYVPFYMAFAGFIMSLVTILKGLSHVGIHLKGAEAYMLAGVIALIVGIIGKVVISRLKMDEKATHKTMYANVEKVFAILMVLTACCMAFAHGSNDVANAIGPLAAVVSVVNSGGEIASKSALVWWILPLGAVGIVMGLAIFGKRVMQTIGKNITHLTPSRGFAAELAAASTVVIASGTGLPISTTQTLVGAVLGVGMARGIAAINIGVVRNIVVSWVVTLPAGAGLSIIFFFMIKGIFN

SEQ ID NO: 89365 - DNA, 1482 bp, Sulfitobacter sp. EE-36
  CDS (1)..(1482): transl_table=11
atgaccgacggacccaaaggccaacagtggaaaacactggattctgacctgaaccgcatctcgcgggtggagcaggccgcgacctatgtggcgcggcctatggtcggatttggcattgcccttgccttcatcgtattggccgcgctggtcgccggtctgttctttggtgcgcagccgtccaactatgtggtgatcgctgccgcagccttcggggcctatatggcggtgaacatcggggccaatgacgtggccaacaatatgggccccgccgtcggggccaaggcgctgagcatgggcggtgcgatcatcatcgctgccatttgcgaaagtgccggtgcccttctggctggcggcgacgtggtatcgactatctcaaaagggatcatcgaccccgcgtcggtcgcagattcccaagtgttcatctgggccatgatggccgcgctgatctcgtcggcattgtgggtcaatctggccacatgggtgggcgcgccggtatcgaccacacattcggtcgtgggcggcgtcatgggggccggcatcgcggctgcggggctggcggcagtgaattggccttcgatgagtatgatcgccctcagctggatcatctcgcccgtcttgggcggcgctgtcgcggcgatgttccttgcgctgatcaagtcgcaaatcctttaccaagaggacaagatcgcagcttcgcgtcgctgggtgccgatcctgattggcgtcatgtccggcgtctttgccacctatctggcgctcaaggggctcaagaagatcgtcgagatcaacatgggctcggccctgctgatcggtttggcctgtggcgttctggcctatgccatttcctaccccgccatccgccgcgcgtcgatcgggatggaaaaccgcaacaagtccgtcaaagtgttgttcggcctgcccctggtcttttccgcagcgctgctcagctttgcccatggggccaatgatgtcgccaacgcggttgggccccttgccgcgatcgtccacgcctcggagttcggcgggttcgaggccaaagtctctatccctatgtgggtgatggtgatcggggccttcggcatttccttcgggctgttccttttcgggccgaaactgatccgcatggtgggcagccagatcaccaagctgaacccgatgcgcgcctattgcgtcgccctctctgcggcgatcaccgtgatcatcgcctcgtggctgggcctgcccgtcagctctacccatatcgctgtggggggcgtttttggcgtaggcttctaccgcgaatggcatatggagcgccgcctgcgtcgccccggtgccaaagccggtcaggtcaaacgcatcgcggtagaggaacgccgccgccgaaaactcgtgcgccggtcgcacttcatgaccatcgtcgcggcatgggtcatcactgtccctgcggcagcaaccatgtcagcgatgatctttctggggttgaacgcgctggtcaactaa

SEQ ID NO: 89366 - protein, 493 aa, Sulfitobacter sp. EE-36
MTDGPKGQQWKTLDSDLNRISRVEQAATYVARPMVGFGIALAFIVLAALVAGLFFGAQPSNYVVIAAAAFGAYMAVNIGANDVANNMGPAVGAKALSMGGAIIIAAICESAGALLAGGDVVSTISKGIIDPASVADSQVFIWAMMAALISSALWVNLATWVGAPVSTTHSVVGGVMGAGIAAAGLAAVNWPSMSMIALSWIISPVLGGAVAAMFLALIKSQILYQEDKIAASRRWVPILIGVMSGVFATYLALKGLKKIVEINMGSALLIGLACGVLAYAISYPAIRRASIGMENRNKSVKVLFGLPLVFSAALLSFAHGANDVANAVGPLAAIVHASEFGGFEAKVSIPMWVMVIGAFGISFGLFLFGPKLIRMVGSQITKLNPMRAYCVALSAAITVIIASWLGLPVSSTHIAVGGVFGVGFYREWHMERRLRRPGAKAGQVKRIAVEERRRRKLVRRSHFMTIVAAWVITVPAAATMSAMIFLGLNALVN

SEQ ID NO: 89367 - DNA, 1827 bp, Aspergillus niger
  CDS (1)..(1827)
atggcgatcctccacgagtacgactacatcttcgccatcggcaccttgtttgccatgctggatgcctacaacaacggtgcaaacgatgtggccaactcctgggcaaccagtgtctcctcccgctccgtctcctatcggcaggccatggtcttcggcaccgtcttcgagatgctgggcgccatctgtgtcggagctcgcacggcggataccatcaagaacggcatcattcccaactccgccttccagggcaacgccggagtccagatgctggcctttacctgtgccttggcggcggcctcctcctgggtgatgtggtgtacgcgccactcggcccacgtctcctcgacatactccctgatctcggccgtggcgggcgtgggtgtggctaccgtaggtgcctcccacgtgcagtggggttggaatgatggcaagggcctcggggccatcttcgccgggctggggatggcccccgtgatctcgggaggcttcggggctgccatcttcatgctcatcaagttggtcgtgctgatccgcaagaaccctatcccctgggccgtctacagttcccccttcttcttcctgattgccgccaccatctgcaccctgtccatcgtctacaagggctctcccagtctgggtctgtccaagaagcccagctggtacatcgcggcggtcaccatgggcaccggtggtggcgtcatgcttctctccgccctcttcttcgtcccctttgtgtacgctcgtgtcatccgtaaggatcacagtgtgaaatggtggatgttcatcctgggccccatgctgctgacgcgccccgtggtcacgcatggtgagcaggccaagatcccggactacgcggtcgtgcagggaagctccgaagacctcacgctcggctccccggatactctccgcggcgatgatgccaaaaagtccacccaggccggcgtcgagtcgattccgtcccgcagcgaggaaggcgagaagcgcatggtggccggggaatctcagcaactgacctacaaggaactcatggaacaatccgaccgtcggctgcgggagcgcctgctcaagaagcgtggcccgctgggctgggcgatgcggactctccgcgacaaccccatgggagccgggcagttgtacgagctgcacaatatggtgattctggcgaagcgcatcccggcgatgattgtgtgtgggcttctctatggtctgcattatgacattcacgccgcccagtctggtattgcgggcacccccgaaggcaagcgcatgcagcgcgtgtacgcccacgccgacaagtatcccaacgaagtcgagcacacctactcgttcatccaagtgctgaccgcctgcactgcctcctttgcccacggtgccaacgacattggtaactcggtcggtccctgggccgtcatctactcggcctggtcgactggcaacgcggcggcggccaaggcaccagtgcccgtgtggcagttggcggtgctgtcggcatgtatctcgatcggcctgatcacctacggctacaacatcatgaaggtgatgggcaacaagatcacctaccactcgccgagtcgcggttgttcgatggaaatgggcgccgccatcacggtgctcgtcttctcgcagtactcactgcccgtgtccacgtccatgtgtatcacgggcgcgacagtcggggtgggactgtgcaatggcacgctcaaggccgtcaacttccagcgcgtgggactgctgctgctggcgtggatcatgacgattccgatcgcgggcacgttgggtgggattctaatgggactgtttattaatgcgccgcattttgcattgtag

SEQ ID NO: 89368 - protein, 608 aa, Aspergillus niger
MAILHEYDYIFAIGTLFAMLDAYNNGANDVANSWATSVSSRSVSYRQAMVFGTVFEMLGAICVGARTADTIKNGIIPNSAFQGNAGVQMLAFTCALAAASSWVMWCTRHSAHVSSTYSLISAVAGVGVATVGASHVQWGWNDGKGLGAIFAGLGMAPVISGGFGAAIFMLIKLVVLIRKNPIPWAVYSSPFFFLIAATICTLSIVYKGSPSLGLSKKPSWYIAAVTMGTGGGVMLLSALFFVPFVYARVIRKDHSVKWWMFILGPMLLTRPVVTHGEQAKIPDYAVVQGSSEDLTLGSPDTLRGDDAKKSTQAGVESIPSRSEEGEKRMVAGESQQLTYKELMEQSDRRLRERLLKKRGPLGWAMRTLRDNPMGAGQLYELHNMVILAKRIPAMIVCGLLYGLHYDIHAAQSGIAGTPEGKRMQRVYAHADKYPNEVEHTYSFIQVLTACTASFAHGANDIGNSVGPWAVIYSAWSTGNAAAAKAPVPVWQLAVLSACISIGLITYGYNIMKVMGNKITYHSPSRGCSMEMGAAITVLVFSQYSLPVSTSMCITGATVGVGLCNGTLKAVNFQRVGLLLLAWIMTIPIAGTLGGILMGLFINAPHFAL

SEQ ID NO: 89369 - DNA, 1803 bp, Ostreococcus tauri
  CDS (1)..(1803)
atgactgacgagtcacgaaccgccaaatacttttccaggaaaagcaggaaaaaggaatattctttaatattctcggaatatttcacgttcttgcggcctggcgacgctgacggcgttacttcacgtcgcgctttacccgtctcgatgagcggatctgaagccctcgcgcacgcgggtcgcgcgctcctcatggcaggaggcgaagcgaccaagaacttcgaatggatcgtcgtcatcggcggcttcctggcgtttttcgccgccttcggcatcggtgctaacgacgtcgcaaacgctttcgccacttccgtcggttccggcgcgctcagcatcaagagcgccgtcgtgctcgctggtgttttcgagttctgcggcgccatgttcatgggtggacacgtcgtggaaacgatgcgtaagggtgtgaccgatcaaaagtgcttcaacggaaagtcgggatcgcacgatcccgtcctactgatgtatggctgcctctgcgtcatctttgcagttggcgtctggctcgtcgtggcgtccgcccttgaaatgcctgtttccaccacgcactcctgcgttggcggtcttatcggaatgacgctcgttgcacgtggtgacgactgcgtcgtttggtctaagaaggcggacgagtttccgtacgttaagggcgtcgctgccattgtcgtttcctgggttctctccccggtgatttcaggctgcttctccttcgctatgtttttgattcttcgaacgctcgtgatgagaagcgagaactctttcagccgcgtctcttatgtgtttccggtgttgtttggtgccactctcatcatcaacgttttcttcatcgtctacaagggctctcctcacctcggtctcaaggacacgccggtgggtacggcgtgcgctgccgcattcggagtcggtggcggtgccggtatcctctcatacttcttaatttctccgtacatcgttaggcgaaccgaggaactgtacgcccaggagcaagctgaacaggctgagcggggctccggtaagaaggttgaagaaacggttgttcgccagcctcgcgagtatcccaggggtgtctttggagctccgactcgcgtctggtatgcgatccaagatcaccttgaaacgtctctcgctgtcaaggcctccgaccttatcgaggaagacatggcggtgaacgctatccacgacaacgctgagaagttcgacgaaaagaccgagttgagcatgagataccttcaaattttgacggcgtgctgcgatgcgttcgcgcacggtgctaacgacgtcgcgaactcaatcggcccctttgccaccatcgtcctggtttacaaggctggcaaggtgagtacaaagaagaaggatcccatgggagacgacgcgtactggattctctcccttggtgcccttggcatcgtcgtcggtctcgctctgtatggttaccgcatcctgcacgcgctcgggaccaaactcgcgaagctcacccctagtcgaggtatttgcattgaacttggcgctgcgtgtgtcatcattttgggatctcgaatgggctggccgctttccacgactcactgccaagtcggcgccaccatgggtgtcgccatgcttgaagggcgtaagggcatcaactggttcatcctcgctaagactgtggctggttggatcatcaccctcgtcgtcgtcggtttctcgacttcggccttcttcgcccaaggcgcattcgctccgatggttcactacccgtgctacatcgctgccactgccaaggactccatctccgaggcgctgtgcacgatttaa

SEQ ID NO: 89370 - protein, 600 aa, Ostreococcus tauri
MTDESRTAKYFSRKSRKKEYSLIFSEYFTFLRPGDADGVTSRRALPVSMSGSEALAHAGRALLMAGGEATKNFEWIVVIGGFLAFFAAFGIGANDVANAFATSVGSGALSIKSAVVLAGVFEFCGAMFMGGHVVETMRKGVTDQKCFNGKSGSHDPVLLMYGCLCVIFAVGVWLVVASALEMPVSTTHSCVGGLIGMTLVARGDDCVVWSKKADEFPYVKGVAAIVVSWVLSPVISGCFSFAMFLILRTLVMRSENSFSRVSYVFPVLFGATLIINVFFIVYKGSPHLGLKDTPVGTACAAAFGVGGGAGILSYFLISPYIVRRTEELYAQEQAEQAERGSGKKVEETVVRQPREYPRGVFGAPTRVWYAIQDHLETSLAVKASDLIEEDMAVNAIHDNAEKFDEKTELSMRYLQILTACCDAFAHGANDVANSIGPFATIVLVYKAGKVSTKKKDPMGDDAYWILSLGALGIVVGLALYGYRILHALGTKLAKLTPSRGICIELGAACVIILGSRMGWPLSTTHCQVGATMGVAMLEGRKGINWFILAKTVAGWIITLVVVGFSTSAFFAQGAFAPMVHYPCYIAATAKDSISEALCTI

SEQ ID NO: 89371 - DNA, 2028 bp, Dunaliella viridis
  CDS (1)..(2028)
atgactgatgtaaacagcttcagcgggagcatggagaacctgagcggcttcatctccgctcccaagtggcagggcgagaacttcacataccacgacggacagtggtctgcctacgtgtggctgctggtcatcggctccttcacctccttcattgctgcgtggggtatcggtgccaacgatgtggccaactccttcgccacaagtgtgggttccaaggcgctcaccatgttccaagcctgcattatcgcgggcgtttttgagttcgttggtgccgtgtccctggggggtacagtggtgaagactgtgaagggctccatcactgacccctcaatgttcaaggaccagccccagatttttgcgtacggcatgcttggtgcctccacatctgtggcctgtgtgctcttcctggccacatacttgaagcaggctgtgtccaccacacacactgcaattgggtccgtgcttggcttcggcttggtgtacggtggcgctgatggtgtgacctggaacgaagtgtctgatgagttccccttccgcaaggggttcacacctgtcgtcatctcctggttcgtctcccccgtcttcactgccattctgtcctccggtttcttcatcatcaccaggattgtctgcctacagcgtcaggcctcctacacaattgctttctacatgatccctgtgctgatgatgatcaccattttcatcgtcctgctggccatcttcttgaagagtgtggactccgggcacgaccgagagggtgagctgaactggtccacagacaagaaggcctgggtggcaatcgttgtcggtgctggtgccggcctgctgaccatcccttacaccatctggctgaagatttccatggccaaggaggacaacgaagtgcacgaggagaacgtggcccgtgatgctgaggctgcccacgttgcagcaggaggcacgctgaaggagaagaccgctgaggagcatgaggctcaggccaagaagctccagcctaactgggaggagaggttcctcacttgggctggcaacacctggctgggccagaggaagttcatgcagaagttcctgtcagccatgacctgcgatgtgcacgcccacgtggccaccatggacaaccccaaggtcgcccagatgcacgcagatgcagaggtcttcgacccccgcactgaggatgtgttcaagcgcatgcaggtcatcactgcctctgctgtggcctttgtgcacggtgccaacgatgttgccaacggtgtgggccctcttgccggtatctgggacacctacaacacctaccagtctggcagtggcaaggcgtctcagccccgctggattctggtcatcggtgctgctggcattgtgttcggcctggccatgtacggctaccgtatcattgcgaccctgggtgtggacttggtggtcatgacccccagccgcggttacgcggtggagctggcgggtgctgccatcattgccctagcctccacttacggtctgcccgtctccaccacacaagtcatcaccggcggtgaaataggggtgggcatgtgcgagacctggaagatgacgggcgtgaactggctcctgttcatccgcaccttctggggctgggtgggtgccctggtgaccggcgccatcctctcggctctcttcttctccatcggtgtgtatggccccagccgcaccgacctggactacgtgacacactaccagagggccatgaagattgatatcgatgagtcaatggcggccctgctggaccaatgcatggagcttcaaacagctggcgggggcggatgtgactacagtgacaacagctgctcttgcaagcaagccacaccctacaccatgggtgacctcaagggcctgaaggctcaggctgatgggctgttcaacttcgaggagaatggccagattaacgagtacaacatgatgtacatgctgaggcagatcaacagcctgttcaagttcaccttcttccccagaaacttctccgagttcgcgggcgcttctaaccagaccgttccctag

SEQ ID NO: 89372 - protein, 675 aa, Dunaliella viridis
MTDVNSFSGSMENLSGFISAPKWQGENFTYHDGQWSAYVWLLVIGSFTSFIAAWGIGANDVANSFATSVGSKALTMFQACIIAGVFEFVGAVSLGGTVVKTVKGSITDPSMFKDQPQIFAYGMLGASTSVACVLFLATYLKQAVSTTHTAIGSVLGFGLVYGGADGVTWNEVSDEFPFRKGFTPVVISWFVSPVFTAILSSGFFIITRIVCLQRQASYTIAFYMIPVLMMITIFIVLLAIFLKSVDSGHDREGELNWSTDKKAWVAIVVGAGAGLLTIPYTIWLKISMAKEDNEVHEENVARDAEAAHVAAGGTLKEKTAEEHEAQAKKLQPNWEERFLTWAGNTWLGQRKFMQKFLSAMTCDVHAHVATMDNPKVAQMHADAEVFDPRTEDVFKRMQVITASAVAFVHGANDVANGVGPLAGIWDTYNTYQSGSGKASQPRWILVIGAAGIVFGLAMYGYRIIATLGVDLVVMTPSRGYAVELAGAAIIALASTYGLPVSTTQVITGGEIGVGMCETWKMTGVNWLLFIRTFWGWVGALVTGAILSALFFSIGVYGPSRTDLDYVTHYQRAMKIDIDESMAALLDQCMELQTAGGGGCDYSDNSCSCKQATPYTMGDLKGLKAQADGLFNFEENGQINEYNMMYMLRQINSLFKFTFFPRNFSEFAGASNQTVP

SEQ ID NO: 89373 - DNA, 2649 bp, Dunaliella viridis
  CDS (79)..(2097)
cttgtacatcggtgcacgcaccgagcccctccccaccgccacttcgtctgcgaaagcaggaggggtaggcacgcagccatgacggacgtggacagcttcagcggcaacatgcccaacctctcgggctttgagtccgcagcgggctggcaaggcgagaacttcacctaccacgatggcaagtggtctgcctacgtgtggctgctggtcatcggctccttcacctcattcatggctgcatggggcatcggtgccaacgatgtggccaactccttcgccacaagtgtgggctccaaggctttgaccatgttccaagcctgcgtgattgcgggcatctttgaatttgtcggcgctgtgtccctgggtggtactgttgtgaagaccgtgaagggctccatcactgacccctcaatgttcaagcaccagccccagatttttgcgtacggcatgcttggtgcctctacttctgtagccattgtgctcttcctggccacatacttgaagcaggctgtgtccaccacacacactgcaattgggtctgtgcttggcttcggcttggtgtatggaggcgctgatggtgtgacctggaacgaggtgtccgatgagttccccttccgcaaggggttcacacctgtcgtcatctcctggttcgtctcccccgtcttcactgccattctgtcctccggattcttcatcatcaccaggattgtctgcctgcagcgccagcaatcctacaagattgccttcttcatgatccctgtgctgatgatgatcaccatcttcattgtcctgctggccatcttcctgaagagtgtggactctggacacgaccgtgagggtgagctgaactggtccacagacaagaaggcctgggtggcaattgttgtcggtgctggtgccggtctgctgaccatcccctacaccatctggctgaggaagtccatgctccaggaggaccaggaagtgcacgaggagaatatggctcgtgatgctgagaccgcccacgtcgcagctggtggcacactgaaggagaagaaccctgaggatgatgtgcatgagctgaccaaggctgagaagtttatggagtggttcaacggcacctggttcggccagagacagtttgtgaagaactttgttgcagctatgacatacgatgtgcacgcccatgtggccaccatggacaaccccaaggttgcccagatgcatgcagatgctgaggtcttcgacccccgcactgaggatgtgtttaagcgcatgcagatcatcactgcctctgctgtggccttcgtgcacggtgccaatgatgtcgccaacggtgtgggccctcttgccggtatctgggacacctacaacacctaccagtctggcagtggcaaggcgtctcagccccgctggattctggtcatcggtgctgctggcattgtgttcggcctggccatgtacggctaccgtatcattgcgaccctgggtgtggacttggtggtcatgacccccaaccgtggttactctgtggagctggcagcagctgctatcattgccctggcctccacgtacggtctgcccgtctccactacgcaagttgtgactggcggtaagataggggtgggcatgtgcgagagctggaagatgacaggcgtgaactggctcctgtttatccgcaccttctggggctgggttggtgctctggtgactggcgccatcctctcagctctgctcttctccatcggtgtgtacggccccagccgcactgacctggactacgtgacccactaccagagggcgatgaagatcgacatcgaccagtccatgcaagctctccttgaccgatgtgctgctgctcctgcacctaccaatggtggtggaggctgtggcaccggagacttgaactgctcttgccagcagaggatcccctacaccatgggtgacctgcaaggcctgaagacgcaggttgatgggctgttcaacttcgaggaaaatggccagatcaacgagtacaacatgatgtacatgctgaggcagatcaacagcctgttcaagtacaccttcttcgatggcgacttctctcagtacgagaacgtgtctgagcagaccatgccttaattctgaagtcttgacaatcttttccctgttccactcactgcactcttgctcttcagttaccaattcatcctttttgaagtcttgcttttgttctgagattgaacactaagcatgacccgttctgttgtgttcacatagccatatcatttagtcaggtgttgtggctggttcatatcctgaccaaatttagatctattgctggtattgtgtactggtggaagcttgggttcccagcatggtcgtctccctcaagtacgcaggctgtattgcattacctcttgttgaccgaagacagtatctcttctaccaatgcttgttgcctgaacctcaagcgtgactgtttcgttgcttcactcttgtgtgttggctcatatttcattttcaccttcttcagcccactgaactgattgaataatgcaactgcaagaataaacacacgtctatgtatctgcactgtttgtgcaattgatccttcttgttgatcattttggaatcctccgctgattgtgtaaattttgtaagcaccacccctgttcaaaaaaaaaaaaaaaa

SEQ ID NO: 89374 - protein, 672 aa, Dunaliella viridis
MTDVDSFSGNMPNLSGFESAAGWQGENFTYHDGKWSAYVWLLVIGSFTSFMAAWGIGANDVANSFATSVGSKALTMFQACVIAGIFEFVGAVSLGGTVVKTVKGSITDPSMFKHQPQIFAYGMLGASTSVAIVLFLATYLKQAVSTTHTAIGSVLGFGLVYGGADGVTWNEVSDEFPFRKGFTPVVISWFVSPVFTAILSSGFFIITRIVCLQRQQSYKIAFFMIPVLMMITIFIVLLAIFLKSVDSGHDREGELNWSTDKKAWVAIVVGAGAGLLTIPYTIWLRKSMLQEDQEVHEENMARDAETAHVAAGGTLKEKNPEDDVHELTKAEKFMEWFNGTWFGQRQFVKNFVAAMTYDVHAHVATMDNPKVAQMHADAEVFDPRTEDVFKRMQIITASAVAFVHGANDVANGVGPLAGIWDTYNTYQSGSGKASQPRWILVIGAAGIVFGLAMYGYRIIATLGVDLVVMTPNRGYSVELAAAAIIALASTYGLPVSTTQVVTGGKIGVGMCESWKMTGVNWLLFIRTFWGWVGALVTGAILSALLFSIGVYGPSRTDLDYVTHYQRAMKIDIDQSMQALLDRCAAAPAPTNGGGGCGTGDLNCSCQQRIPYTMGDLQGLKTQVDGLFNFEENGQINEYNMMYMLRQINSLFKYTFFDGDFSQYENVSEQTMP

SEQ ID NO: 89375 - DNA, 1689 bp, Aspergillus oryzae
  CDS (1)..(1689)
atgattcccgccattaccgccaagtatgactggattctggcaatcacctctattgccttcgtcttcagcgccttcggaaatggtgccaacgatgtggccaactcatacgcaacgtctgtggctgcccggaccttggagatgtggcaggctggtattcttgctaccatcacagagttcgtcggtgccgttgctttgggtagtcgtgtgacctctacaattaaatctggcattatcagtcccgaccgcttcatgggcaagcccggcaccttcatgctagccatgggctgtgcagaagttggaagtgccgcttggttgatgtgggccacgcacttcgggtggccggtatcaaccacgcagaccgtcgtcggtgccttggtcggtgttgggttcgctacacaagcagaaatttcttggggatggaagagtggcagtgtgtcccagattgcagcatcctggggtatcgccccggctgtggcttgcggcttctcagctatcatcttcggtaccctcaagtatagcgtgctggagcgtaaggactctttcaagtggggcatgcgtctcattcccttctacctctccttgaccggagctatcctcgccctctttattgttgttgaggcccctaccgctccttcgcttgaggagttcggtgccggcaaggccgtcggtatcatcctcggcgtcttcttcggctgcctccttatttcctacgtcttcttcgtcccctacttccaccgtcgcctcgtaaaacaagaccctcgcatccgagtctggcacattcctctcggaccctggctgctcaaggatgactgccccatctattggcctggcaagggtgacagcttcgtcaccaactactatgaagatgcccatggcgaagtccgcgccggcaagaaggacaccgagaaagcaaccgaccagaaagacacgaacatttccgacgtcgagcgcactgccgaatcagccatggctactccccaaatccaaccgaaaaaagctatcatcggtccccacgagcgcttcctccaacccgtcgaacacctcacctggttccacccggccaaatactggggctggaccaaattcatcctcctccagggtgtcacccgggatgtcatcacccacgactccgagcatctccgtgccgtccacgcccgtgcccaccgctacgacgaccgcgtcgagcatctctggacctactgccaagttgtctctgccatgatgatgtctatcgcacacggctctaacgacgtcgccaacgccgttggtccctgggctggttcgtacgccacctacctctccggtgcggtgaacaccaaatcggaaactcccgtctggttcctcgtcattgctggtctgctcttgggtgccggattctggttctatggctacaacgtgctacgggcaatgggtaacaagattacccaaatgtcgcccactcgtgggtttgccactgagctaggagctgctgttaccgtcctcttggcgtcgagactgggtctccctgtttctaccacacagtgtcttgttggagccgctaccggtgtggctctcatgaactttgatgcgggagcagtgaactggcgtcagcttgcattcatcttcatgggctgggttttgaccttgccttgtgctggattggttgctgggctgatttgcttgatggctttgaatgccccgcacttttag

SEQ ID NO: 89376 - protein, 562 aa, Aspergillus oryzae
MIPAITAKYDWILAITSIAFVFSAFGNGANDVANSYATSVAARTLEMWQAGILATITEFVGAVALGSRVTSTIKSGIISPDRFMGKPGTFMLAMGCAEVGSAAWLMWATHFGWPVSTTQTVVGALVGVGFATQAEISWGWKSGSVSQIAASWGIAPAVACGFSAIIFGTLKYSVLERKDSFKWGMRLIPFYLSLTGAILALFIVVEAPTAPSLEEFGAGKAVGIILGVFFGCLLISYVFFVPYFHRRLVKQDPRIRVWHIPLGPWLLKDDCPIYWPGKGDSFVTNYYEDAHGEVRAGKKDTEKATDQKDTNISDVERTAESAMATPQIQPKKAIIGPHERFLQPVEHLTWFHPAKYWGWTKFILLQGVTRDVITHDSEHLRAVHARAHRYDDRVEHLWTYCQVVSAMMMSIAHGSNDVANAVGPWAGSYATYLSGAVNTKSETPVWFLVIAGLLLGAGFWFYGYNVLRAMGNKITQMSPTRGFATELGAAVTVLLASRLGLPVSTTQCLVGAATGVALMNFDAGAVNWRQLAFIFMGWVLTLPCAGLVAGLICLMALNAPHF

SEQ ID NO: 89377 - DNA, 1737 bp, Aspergillus oryzae
  CDS (1)..(1737)
atggcccttcaccagttcgactacatctttgctctcggcaccatttttgccttcctagatgcttggaatattggcgccaatgatgttgccaactcttgggcgacctccgtctcatcgcgatctctgaagtattggcaggccatgattcttgcctccatcatggaattctgtgggagtattggagtgggcgcccgtgttgcagaaactatccggacgaaggttgtcgacgtcgatctctttaaggaggatccctctatgcttatgctggggatgttatgtgcggtcatgggctcctccatctaccttaccatagcgacgaaatttggaatgcctgtttcgaccacgcactccatcatgggtggtgttattggaatgggtattgcgtcggttggggcgaatggtgtttcgtggtggggaggtaatatcaactctggtgttgttcaggtgttcctggcatgggtcattgccccctttatgtcgggtgcctttggtgccatcgtcttcctcatcaccaagtatggagtgatgctgcggagcaattctgtccggaatgctttcattgccattcctatctactttggcattacgtctgctctcctcaccatgcttattgtgtggaagggtgggtcgagccggattagcctcaatgacgcagagactgttggtgtgattattggggttggcgccgccgtcgccttgattgtcaccattttcttcctgccctggctgtaccgaaggttgctgaaggaggattggcaacttcaatggtatcacctcttccttggccctcttgttctacgtcgtggggaagttcctcctcctccggaagggtactcaatcgtacaagatttctacagtggccataagactatggagcagctccaggcggagcgagctgcgactcaagaaaaccgaccttctgacctagagaacgaaggcgagctagtcaaagagagccagaacacttcatccgaggctttgaagtccgggacacctagcgatgcaccttcagtggcgccaaagccagaattttcaataattggccctcgaccggaaggaaaggggttctttcacccagctatgctcttctggcagttcaagcgattcttctttcgtggaatcgagcaagatgtagtcggcttgcaaaagaagaagaatatccttaccggcgacatcgaaatgacccatgcccacgccaaacattatgataacagaactgagtacatgtactccttcctgcaggtgctgacagcatccactgcttcttttacccatggtgccaatgatgtgtccaatgctattggtccatatgccacgatttatgacatttggcaatctggaaagctcaactccaagagtcctgtcccttactggattttggcctttggaggtgctgctatcgccattggtatctggacctacggctacaatatcatgcgaaatctcggtaataggatcacgcttcactccccttcccgtggtttttctatggaacttggctctgctattactatcatcacggcgaccaggctcaagcttccggtctccacaacgcaatgtatctcgggtgcaaccgtcggtgttggtctctgtagtggaacctggcgtaccatcaattggcgcatgattctgtggatctacttcggctgggttattactctgcccataactggtattatctctggatgtcttatgggcattatcattaatgcccctcggtggggaatgggcgtctaa

SEQ ID NO: 89378 - protein, 578 aa, Aspergillus oryzae
MALHQFDYIFALGTIFAFLDAWNIGANDVANSWATSVSSRSLKYWQAMILASIMEFCGSIGVGARVAETIRTKVVDVDLFKEDPSMLMLGMLCAVMGSSIYLTIATKFGMPVSTTHSIMGGVIGMGIASVGANGVSWWGGNINSGVVQVFLAWVIAPFMSGAFGAIVFLITKYGVMLRSNSVRNAFIAIPIYFGITSALLTMLIVWKGGSSRISLNDAETVGVIIGVGAAVALIVTIFFLPWLYRRLLKEDWQLQWYHLFLGPLVLRRGEVPPPPEGYSIVQDFYSGHKTMEQLQAERAATQENRPSDLENEGELVKESQNTSSEALKSGTPSDAPSVAPKPEFSIIGPRPEGKGFFHPAMLFWQFKRFFFRGIEQDVVGLQKKKNILTGDIEMTHAHAKHYDNRTEYMYSFLQVLTASTASFTHGANDVSNAIGPYATIYDIWQSGKLNSKSPVPYWILAFGGAAIAIGIWTYGYNIMRNLGNRITLHSPSRGFSMELGSAITIITATRLKLPVSTTQCISGATVGVGLCSGTWRTINWRMILWIYFGWVITLPITGIISGCLMGIIINAPRWGMGV

SEQ ID NO: 89379 - DNA, 1710 bp, Aspergillus oryzae
  CDS (1)..(1710)
atgcctcttcatcaatacgattacattttcgccatcgggacaatattcgcctttctagatgcctggaatatcggtgccaatgatgccgctaactcttgggcgacgtctgtttcgtcgcgttcgatcaaactctggcaggccttgatcctgggatctatcatggagtttgctggagctgtcggtgtaggagacagtgtttctgatacgatccggacaaaaatcgtcgaggtcgattcgtttgcccacaatcctcccctcctgatgctcggaatgtgctgtgcagtggttggttcagctatatacctcagtatctgcacgagaattggtcttccggtgtctaccactcactccatcctcggaggtatcctgggaatgggcatcgcacttataggagccgacaatgttatttggtggggtggtgatatcaattctggagttgtccaggtgttcctcgcctggattatcgcacctctgttgtccggtgtggctgcttcgttgatcttcttgatcactaagtatggtatcctgctgcgcgggaactctgcactcaaggcgttgtatactgttccattctacttcctcttgacctccgccctccttactatgcttatcgtctggaagggtggtagcagcagaatcgacctggagggtggtgagattgctggcactgtgcttggtgttggtgctggtgtctctctcatctctgctgttttcctttgcccctggctctaccgtcgggtcatcctgagcgactggcagctcaagccctggcatatcatccaaggccctcttctcctgcgccgtggtgaagtgcctccgcgccctgcgcatgtgcaagccgtccgcaacttctacgaaggccacaagaccctggaggaactgcaagccgatcgatctggcgatgtcgaaaacagcagtgaacattcgtcctccgatccacggaaagagtcccacgttacttcgagctccagcaatgatgcaggtcctacgaatcgtgatgttatcaacctctgcggtccccggcctgagggaatctggtataaccctgtagttatattctggctgttcaagaaggccctcttccgtggtctggagcaggacattgttagcgctcagaaaaaggacagcaagcttgcgggtgaccttgaaaagacccacgcacactccactcactatgataacgaagcagagtacatgttttcgtttctgcagattctgacggcctgtaccgctgccttcacccatggtgccaatgatgtttctaatgctgttggcccatatgccaccatttatgctatttggcaaagtggtgctctcgacggcgctgagacccctgtccccatctggattcttgtattcggtggtgctgctatcgccatcggtatctggacctatggctatcatatcatgagcttcctgggtaaccgtctgaccctgcactctccctcccgtgggttcactatggagcttggcgcggccatcgctgtgattatcgctacccggcttaagcttcccgtctccaccacccagtgtatcaccggctctacagttggtgttggtctttgcaacggtacctggagaacgatcaactggagaatggttgcatggatctacatgggctggattatcaccctcccttgcgctggcatcatctccggctgtttggtcggcattatcgtaaatgcgcctcgctggggtatgcctaattag

SEQ ID NO: 89380 - protein, 569 aa, Aspergillus oryzae
MPLHQYDYIFAIGTIFAFLDAWNIGANDAANSWATSVSSRSIKLWQALILGSIMEFAGAVGVGDSVSDTIRTKIVEVDSFAHNPPLLMLGMCCAVVGSAIYLSICTRIGLPVSTTHSILGGILGMGIALIGADNVIWWGGDINSGVVQVFLAWIIAPLLSGVAASLIFLITKYGILLRGNSALKALYTVPFYFLLTSALLTMLIVWKGGSSRIDLEGGEIAGTVLGVGAGVSLISAVFLCPWLYRRVILSDWQLKPWHIIQGPLLLRRGEVPPRPAHVQAVRNFYEGHKTLEELQADRSGDVENSSEHSSSDPRKESHVTSSSSNDAGPTNRDVINLCGPRPEGIWYNPVVIFWLFKKALFRGLEQDIVSAQKKDSKLAGDLEKTHAHSTHYDNEAEYMFSFLQILTACTAAFTHGANDVSNAVGPYATIYAIWQSGALDGAETPVPIWILVFGGAAIAIGIWTYGYHIMSFLGNRLTLHSPSRGFTMELGAAIAVIIATRLKLPVSTTQCITGSTVGVGLCNGTWRTINWRMVAWIYMGWIITLPCAGIISGCLVGIIVNAPRWGMPN

SEQ ID NO: 89381 - DNA, 1797 bp, Aspergillus oryzae
  CDS (1)..(1797)
atggctgtgctcgacgagtatacctacgtgtttgccatcggcacaatctttgccttgttggacgcctacaataacggtgcaaacgatgtcgcaaactcttgggcgactagtgtgtcgtcgcgttccatttcctaccgacaggccatgatcttcggtacaatcttcgagttcctcggagccgtctgtgtcggcgcccgtaccgccgataccatcaagaacggaattattcctgtgtccgccttccgagatgacgctggggttcaattgatggcattcgcctgtgccctcgctgccgcctcctcctgggtcatgtggtgtaccaaacactccactcacgtctcctccacctactctctcgtttccgctgttgctggtgttggtgttgctaccgctggcgcatccaaggttcaatggggctggaatcatggaaagggtctcggtgccatctttgccggtctgggaatggcacccgtcatctctggtgcgttcggtgccattatctacatgttgatcaaagtcattgtccacatgcgtaagaaccctgtcccctgggcggtttatacctcccccttctggttcctcgtggccgcaaccatctgtaccctttccattgtgtacaagggctctcccagcttgggtctcagcaagaagcctggttggtatattgcggccgtgacattgggatgtggtggtggtgtcgccctgctatcggcaatctttttcgttccgtttgtgcatgcacgtgtgatcaagaaagaccaggacgtgaagtggtggatgttcatcatgggccccctccttctcaaccgcgcgtctccgaacgtgggagaacaagcaaaggttcccgactacgccgtcgtccaggacgaccacgatgacatggcatctgttccctccactgctggctccacgactggagagcctggtaaggaccaaacccaaacgaaggaaaaggccctggtcatggccgaaacccaggccacttaccaggagctcgtcgcccagggagaggcacggttccatgcaagactcatgaagaagcgtggccccctcggttgggcgatgcgtaccttgcgggataacccgatgggcgctggtgagatctatgaatggaggaacatgttgcgactggccaaacgtgtcccggctatgatcactgttggtcttctctatggtatgaactacgatatccacgccgctcagtctggtgtccacggcactccagaaggtgagcgcatggcccgggtatacgctcacgccccgaaataccccaatgaagtcgagcacacctactcgttcgttcagattcttaccgcttgcacggcttccttcgctcacggcgccaacgacattggaaactctgtgggtccttgggccgtgatgtactctgcctggaagactggcgatgcccagcagtccaaggctccggtgcccgtctggcagctcgctgttcttgccctcaccatctctgctggtctcatcacctatggctacaacatcatgaaggtcatgggtaacaagattacttaccattcgccaagtcgtggttgctgcatggagttgggtgccgcattgaccgttctcgtcttctcgcagtattccctcccagtgtcgacttcgatgtgtatcacgggtgctaccgtcggtgtcggtctttgcaacggtacctggagggccgtgaactggcaacgagtcctcctgctcatgattggatgggttatgactattcctattgctggcactctcggtggatgccttatgggtctcttcctgaacgctcctcacttttcttcttaa

SEQ ID NO: 89382 - protein, 598 aa, Aspergillus oryzae
MAVLDEYTYVFAIGTIFALLDAYNNGANDVANSWATSVSSRSISYRQAMIFGTIFEFLGAVCVGARTADTIKNGIIPVSAFRDDAGVQLMAFACALAAASSWVMWCTKHSTHVSSTYSLVSAVAGVGVATAGASKVQWGWNHGKGLGAIFAGLGMAPVISGAFGAIIYMLIKVIVHMRKNPVPWAVYTSPFWFLVAATICTLSIVYKGSPSLGLSKKPGWYIAAVTLGCGGGVALLSAIFFVPFVHARVIKKDQDVKWWMFIMGPLLLNRASPNVGEQAKVPDYAVVQDDHDDMASVPSTAGSTTGEPGKDQTQTKEKALVMAETQATYQELVAQGEARFHARLMKKRGPLGWAMRTLRDNPMGAGEIYEWRNMLRLAKRVPAMITVGLLYGMNYDIHAAQSGVHGTPEGERMARVYAHAPKYPNEVEHTYSFVQILTACTASFAHGANDIGNSVGPWAVMYSAWKTGDAQQSKAPVPVWQLAVLALTISAGLITYGYNIMKVMGNKITYHSPSRGCCMELGAALTVLVFSQYSLPVSTSMCITGATVGVGLCNGTWRAVNWQRVLLLMIGWVMTIPIAGTLGGCLMGLFLNAPHFSS

SEQ ID NO: 89383 - DNA, 1791 bp, Cryptococcus neoformans
  CDS (1)..(1791)
atgcctgttcttcaccagtgggattatctattcgcctttggtgttctttttgctgctttggatgcctacaatattggtgccaacgatgtcgctaattcatttgctacttcaatctcctcccgatcgctcactctccgacaagccgccatgcttgccgcaatttgtgaattccttggaggtgtccttgcaggtgctcaagtggctagtaccataaagaacggtatcatctccatgtcggcgttcagaaacaatcccggcatcgaacttctcgcctttgtctgcgcgcttgcagcttctgctacctggctcatgatcgccactagaaaagcatggccggtatccacaacatactcgattgtctctgctttggcaggtgtgggtgtcgcgctcgatggacctggtgctgtacagtggggctggaatgatggaaagggtattgcgactatttttgctggtttcgcgatcgctcccgccatttctgccgggtttggggcaacagtctacttgatcaccaagtatgctgtactgacgaggaagaatcctttgaaggccggattgtatgtttctccgatttactttttcacagtggcggcaatcttgacaatgtctattgtctacaaaggtgctcctcaacttaagcttaacaagctcccccagaccactatcgcccttgccatcgtactcactggtgttgttattgcgttcctgtctgtaatcttctggttgccttttgtgtattccaaggtcattaaaaaagactacactcttcgatggtatcacttcttttacggtcctcttctttggcgtcgagccgctcctcctcctcctcccgagggtgcacgacacgtccccgattaccgagtttacgatcgagatgacgagcacaaagagcctgccacggaaacccctacaaacccggtctctgaaggttcgaccgaaggtgaaggtgctcctcttgaaaccaatctgacagtcacatcccacgagaaggataaggatatcgagtctgcccccttgcagagtctttccaaaggtaaaccatatgccagcgctttggaagaccttgagaaggacgaccataaaattgagggagcgattattctacccaggaacttgtggattctattcagatacaagttacccaagatgttattgcatggtacatcggctaataagaacccagtcgacattcatgccatgcaatcacacgagggcaaggggaaggagagcgataggatgatgaagatgtatcaacacgccgcccagtatgacaatgaaactgaacacttgtactctttcctccaagtattgactgcgtgtacaaattcttttgcccacggttctaatgacctcgccaatgctgttggacctttcgcagccatttactatgtgtggtccacgggtacgatcacaccttctgagactgaaacgccagtttggatttttgttgctggaggcttgatgctcgtcattggtcttgctacttatggctataatatcatgtccgtgctcggtaacagactgaccatgcactctccttctcgaggtttctccatggagctgggatcatccatcactgtcttgctggcttctcagtatggcatccctgtcagcactaccatgtgcattacaggtgctacagctggtgtcggtatcgtttcgggaggtataaaatcgattaactggcgagcgttcggatggattttccttggctgggtcctgacagttcctattgcaggcactgctgctgggtgtttgaccggtatcatcatcaacgcaccgcgattctga

SEQ ID NO: 89384 - protein, 596 aa, Cryptococcus neoformans
MPVLHQWDYLFAFGVLFAALDAYNIGANDVANSFATSISSRSLTLRQAAMLAAICEFLGGVLAGAQVASTIKNGIISMSAFRNNPGIELLAFVCALAASATWLMIATRKAWPVSTTYSIVSALAGVGVALDGPGAVQWGWNDGKGIATIFAGFAIAPAISAGFGATVYLITKYAVLTRKNPLKAGLYVSPIYFFTVAAILTMSIVYKGAPQLKLNKLPQTTIALAIVLTGVVIAFLSVIFWLPFVYSKVIKKDYTLRWYHFFYGPLLWRRAAPPPPPEGARHVPDYRVYDRDDEHKEPATETPTNPVSEGSTEGEGAPLETNLTVTSHEKDKDIESAPLQSLSKGKPYASALEDLEKDDHKIEGAIILPRNLWILFRYKLPKMLLHGTSANKNPVDIHAMQSHEGKGKESDRMMKMYQHAAQYDNETEHLYSFLQVLTACTNSFAHGSNDLANAVGPFAAIYYVWSTGTITPSETETPVWIFVAGGLMLVIGLATYGYNIMSVLGNRLTMHSPSRGFSMELGSSITVLLASQYGIPVSTTMCITGATAGVGIVSGGIKSINWRAFGWIFLGWVLTVPIAGTAAGCLTGIIINAPRF

SEQ ID NO: 89385 - DNA, 1993 bp, Tetraselmis chuii
  CDS (92)..(1924)
aaaaccctttctcccgcacacttcttcagcagaaagttacactaggaggagctagcgatcagcccgcgttgtgttcaagtaatccatcaaaatgtggacccagtacacttgggtagtcgtttgcggcgcgctcttggccgtcttcgtggcgtttggcatcggtgctaacgatgttgccaatgcgttcgggtcttccgtcggctcgaaggccattacaatcaagcaggcgctactaatcgcggccatattcgagttcctgggtgccgttctacttgggtcaaatgtgactgacaccgttcgcaagggtatcgctaactatgaagtgttccttgatgcccccgagctttacatgtacggcatgctgagcgtgcttgttgcgaccggagtgtggctgctgctggcttcttactgggagctgcctgtttccaccacccattccaccgtcggcggtgttatcggcatggctgtcactgcgcgtggcgcggatgctgtcgtgtggtaccagaagtctaactctttccccttcatgaagggtgtcgcgtccatcgtgctctcttggattttctcccctgtcctctccggcatattttccgtcatcctttttggaactgtacgcgccaccgttttgcgcagccagaattcttacgctcgctcttggtgggtgtttcctatcctggttttcatcaccgtcgttgtgaacgccttcttcattatcttcaagggtgccaagtcgaagattagcctctctgctactgatgcggtatggatctccttcgtatgcggtgccgtagctgctgttatcgtcgccgtcggggtcgtgcccttcctgaagaggaaaattgaccgcgcggaggaagcgtctatcaaggctgctgaggcgaaggccaacgaggaccccgaggtagccgccaaggatgtggaagttgaggcggtgaagactgacaatgttctgcgctctcctctgcacgcgaagtgggagtcaatgaagcagatcggcatgtccctgtcgaagggtgtaaatcacgatgtacacgatgttgtggacactgatactgacgtgcacgacatgcatgagttctctgaaaaattcgatcccaaaaccgaggagtccttcaagtacctgcaggtcttcaccgcaatctgcgactcgttctcccacggtgccaacgatgtggccaactccattggaccctttgccgctatttgggccatctacacccacaccggtttggcaaagaagtccgaggttcctatctggattctggtgctgggtggtttcggtattgtgctgggcctcgccacttacggctacaagatcatgtgcgccatcggtgttaagatgtgccgcatcactccttctcgcggctttgcgattgagctgggcgcagccatcgtgattgtcattggctctcagctcggaattcctctgtcaaccacgcattgtcaggtcggagctaccatcggtgtgggtctattggagagcgtgaagaaaggcgttaactggaagctagtcgggcgtgtggtgattggctgggttatgaccctggtcattgttggcctcactacgtctggtctctacgcgcagggtatttatgccccctctattatcaacatcgaagaaaagaacttccttcagtccggtattgagggcaatgtgggcgcaatgatcactgctctgaaccagactgtgtacacgagcgctgacccctccctggagggcattctcactttcaacaccgagtggatcggtaatatgacccatcctcttcagtacctgtacgctcagcatgtgccggtcgaggattcgatcaccctgttgagcaaccagacctggaccacgctgtccactcttgttcctgcctctggtggcgacctgtccgtggtcaccagcgaggagggctcagtcttctaccagtgggcatagatgatagatttgtatgtagtagtttcaactaattaatgaatgttgtaacatcattaatattgaatcaaa

SEQ ID NO: 89386 - protein, 610 aa, Tetraselmis chuii
MWTQYTWVVVCGALLAVFVAFGIGANDVANAFGSSVGSKAITIKQALLIAAIFEFLGAVLLGSNVTDTVRKGIANYEVFLDAPELYMYGMLSVLVATGVWLLLASYWELPVSTTHSTVGGVIGMAVTARGADAVVWYQKSNSFPFMKGVASIVLSWIFSPVLSGIFSVILFGTVRATVLRSQNSYARSWWVFPILVFITVVVNAFFIIFKGAKSKISLSATDAVWISFVCGAVAAVIVAVGVVPFLKRKIDRAEEASIKAAEAKANEDPEVAAKDVEVEAVKTDNVLRSPLHAKWESMKQIGMSLSKGVNHDVHDVVDTDTDVHDMHEFSEKFDPKTEESFKYLQVFTAICDSFSHGANDVANSIGPFAAIWAIYTHTGLAKKSEVPIWILVLGGFGIVLGLATYGYKIMCAIGVKMCRITPSRGFAIELGAAIVIVIGSQLGIPLSTTHCQVGATIGVGLLESVKKGVNWKLVGRVVIGWVMTLVIVGLTTSGLYAQGIYAPSIINIEEKNFLQSGIEGNVGAMITALNQTVYTSADPSLEGILTFNTEWIGNMTHPLQYLYAQHVPVEDSITLLSNQTWTTLSTLVPASGGDLSVVTSEEGSVFYQWA

SEQ ID NO: 89387 - DNA, 2894 bp, Chlamydomonas reinhardtii
  CDS (148)..(2106)
ggcacgaggttaatatcggcctgtgctcaagttggctgtgatagccttccagcagcaagctccaaccttccaaacttttcagcgtccaaactttttcagcgtccactcttccccgcgcgtgctgcgtattcaacaaagtcaacagcaatggcggacttcgcaatgccagagtacctctggctggtggtggtcggctccatggccgccttcgctttcggctggggcactggctccaacgatgtggccaacgcgttcggtaccagtgttggtgccaagaccctcacactgaagcaagcagttatcatcgccatcatcttcgagttcgtcggcgcgcttgtgctcggacgtgtgtcaacctcgaccatcgccggtggtattgccaacatcaacgtgttccttgcagagcccgaggtttactcgtacggcatgatcattgccttgaccgtgggcttcgtgtggcaagcactggcctcctactgggagctcaacgtgtccgcgacccactcgatcattggtgccatcatcggcttctcgttcgtgttcggcggcgccaacgctgttaactgggccaccccggactcggcctcattccctccctacaagggcgttgtgcccatcgtgctggcctggttcgtgtcgcccgtgctgaccggcctgtgctcgtgcattctcttcctgattgtccgcaccctggtgcttcgccgcgagaactcctacgtcctgtccttctgggttctgcctgtgatggtcatgatcaccacatggatcaacatttacttcgtgttcaccaagggtgccaagaagactctgtcttctagcgacgactggaccgacgccaaggctgcctggattgctgcctgctgcgctgccggcctggccttcctgaccatcgtcctggtcctgcccctgctcaagtggaaggccgacaagaagttccgtatggatgaggagaaggctgccggcggcgccgacgaggaggctgctaaggctaaggctaaggctgaggacgaggccgcttccgagaccaactccaagttcctgaaggcgatgacgtcgctgaagcgcgccgccatgcacggcctggaggtggacgtgcatgaggtggttgaggaggaccccattgtggccgccatccacaagaacgccgaggtgtttgaccccaaggccgagtacgcgttcagctacctgcaggtcttctccgccatctgcgtcattttcgctcacggcgccggcgaggtgggctacatggccggccccctggccaccatctggttcaccgtcaaggacggcacgctctacagcaaggtgcaggcacccatctggattatcatcatctccgccctgggcctggtgatcggcctggccacctacggctacaacgtcacccgcgccgtcggcacccgcatggccaagctgtcgcccactcgtggcttcgctgctgagctgtcaaccgccatcgtcattatggttgccgcacagtacggccttcccacctcgtcttctcagtgcatcacgggtggcattgtgggcctgggcatgatcgagggcaagaccggcgtgaactggatgttcctgctgcgcaccttcgcctcgtgggttgctaccgtcgtcgttgtggccctgactaccgccgccatctttgccatgggcgtgttcgcgccctcgatcagctgcaacaagcagctctacctgtacgagcgctataccatcgagcagggccagtccattgccaaggacgtgctgtccaccctgaacgcctacaagacctttgcctaccagaacaccaccctgcccaacctgaaccagaccaagtggcaggcgatgaacaagtccatcaacgcctacatctccaacggcaccaagttcctcacgtacaagagctacggctcgctgaacccccagacgaccaacagctacctctctgccgccatcacgctcatggcctcgacctccatcaccacgctgggccaggcgcagacctaccccaccgccaaggtgtgcaacgacaacagcacgctgcccatgaccttcaaccaggcgtgcaaggcgccgcagcccatgaaggcgatcggcagcacctacggcttcaacatcaccaccgtataagcggtccctagacgacgggttgtgctagctaggtagggaaagcgttgctgacttccaagcacaagctggtcattagcagctgagcatgttcaatgggatgtggtaacacctgggttcacgtagccacggctggcgtcgccataactgggctttactgccggacgtgttcttgtatacgtgaagtgcaaacaactatgcactctatggtctctgttttgtttgattggccgccgtcgctgccacattcatgtgcgacgcgcaagcgtattagtgcagaaggcgtgactcaacagctggatgtatggcgctcatcatcttgtttggcgcagtgaggaactgaggatgagcgggttgacttgtttgacttgttgttgtgacgggcagggcaataggcacggatgcgaagtgcagctgcttcgggactcccgtcgcgaattcgcagcgacggtgtgcgtgcaaatgcacggctggttgggcgctgcactgcgtaacacttttgcgaactgtgtcactactgtgacgatcagtaggcatgccccgagggtaaatggcatgcagcgttgccgaaatgtacgggcgtccacgccgcacgagacggctgaacagtgctacgatcagggatgcgccctggctagaatggaaactggttgatgaaggcacggaaacgtgttgtgagactgagcaacacctgcgaggaagtgggcggggatttgtgcagggccttgtcctagggtgttgatagctttctccgtgtaacccaggattcgagaaaaaaaaaaaaaaaaaaa

SEQ ID NO: 89388 - protein, 652 aa, Chlamydomonas reinhardtii
MADFAMPEYLWLVVVGSMAAFAFGWGTGSNDVANAFGTSVGAKTLTLKQAVIIAIIFEFVGALVLGRVSTSTIAGGIANINVFLAEPEVYSYGMIIALTVGFVWQALASYWELNVSATHSIIGAIIGFSFVFGGANAVNWATPDSASFPPYKGVVPIVLAWFVSPVLTGLCSCILFLIVRTLVLRRENSYVLSFWVLPVMVMITTWINIYFVFTKGAKKTLSSSDDWTDAKAAWIAACCAAGLAFLTIVLVLPLLKWKADKKFRMDEEKAAGGADEEAAKAKAKAEDEAASETNSKFLKAMTSLKRAAMHGLEVDVHEVVEEDPIVAAIHKNAEVFDPKAEYAFSYLQVFSAICVIFAHGAGEVGYMAGPLATIWFTVKDGTLYSKVQAPIWIIIISALGLVIGLATYGYNVTRAVGTRMAKLSPTRGFAAELSTAIVIMVAAQYGLPTSSSQCITGGIVGLGMIEGKTGVNWMFLLRTFASWVATVVVVALTTAAIFAMGVFAPSISCNKQLYLYERYTIEQGQSIAKDVLSTLNAYKTFAYQNTTLPNLNQTKWQAMNKSINAYISNGTKFLTYKSYGSLNPQTTNSYLSAAITLMASTSITTLGQAQTYPTAKVCNDNSTLPMTFNQACKAPQPMKAIGSTYGFNITTV

SEQ ID NO: 89389 - DNA, 27 bp, Artificial sequence
  primer
atggctttacatcaatttgactatatt

SEQ ID NO: 89390 - DNA, 25 bp, Artificial sequence
  primer
ttatgtcatttggtattccacacca

SEQ ID NO: 89391 - protein, 678 aa, Artificial sequence
  consensus sequence
  Variant (2)..(4): Xaa in position 2 to 4 is any amino acid
  Variant (12)..(15): Xaa in position 12 to 15 is any amino acid
  Variant (18)..(18): Xaa in position 18 is any amino acid
  Variant (20)..(25): Xaa in position 20 to 25 is any amino acid
  Variant (28)..(30): Xaa in position 28 to 30 is any amino acid
  Variant (32)..(34): Xaa in position 32 to 34 is any amino acid
  Variant (36)..(37): Xaa in position 36 to 37 is any amino acid
  Variant (40)..(42): Xaa in position 40 to 42 is any amino acid
  Variant (44)..(45): Xaa in position 44 to 45 is any amino acid
  Variant (47)..(48): Xaa in position 47 to 48 is any amino acid
  Variant (51)..(53): Xaa in position 51 to 53 is any amino acid
  Variant (55)..(72): Xaa in position 55 to 72 is any amino acid
  Variant (73)..(78): Xaa in position 73 to 78 is any or no amino acid
  Variant (80)..(85): Xaa in position 80 to 85 is any amino acid
  Variant (87)..(89): Xaa in position 87 to 89 is any amino acid
  Variant (91)..(96): Xaa in position 91 to 96 is any amino acid
  Variant (99)..(99): Xaa in position 99 is any amino acid
  Variant (101)..(101): Xaa in position 101 is any amino acid
  Variant (103)..(104): Xaa in position 103 to 104 is any amino acid
  Variant (106)..(108): Xaa in position 106 to 108 is any amino acid
  Variant (110)..(115): Xaa in position 110 to 115 is any amino acid
  Variant (117)..(121): Xaa in position 117 to 121 is any amino acid
  Variant (123)..(131): Xaa in position 123 to 131 is any amino acid
  Variant (132)..(142): Xaa in position 132 to 142 is any or no amino acid
  Variant (144)..(146): Xaa in position 144 to 146 is any amino acid
  Variant (148)..(157): Xaa in position 148 to 157 is any amino acid
  Variant (159)..(179): Xaa in position 159 to 179 is any amino acid
  Variant (180)..(182): Xaa in position 180 to 182 is any or no amino acid
  Variant (184)..(199): Xaa in position 184 to 199 is any amino acid
  Variant (202)..(246): Xaa in position 202 to 246 is any amino acid
  Variant (247)..(449): Xaa in position 247 to 449 is any or no amino acid
  Variant (451)..(456): Xaa in position 451 to 456 is any amino acid
  Variant (458)..(460): Xaa in position 458 to 460 is any amino acid
  Variant (462)..(465): Xaa in position 462 to 465 is any amino acid
  Variant (467)..(467): Xaa in position 467 is any amino acid
  Variant (470)..(470): Xaa in position 470 is any amino acid
  Variant (473)..(474): Xaa in position 473 to 474 is any amino acid
  Variant (476)..(477): Xaa in position 476 to 477 is any amino acid
  Variant (480)..(491): Xaa in position 480 to 491 is any amino acid
  Variant (492)..(505): Xaa in position 492 to 505 is any or no amino acid
  Variant (507)..(507): Xaa in position 507 is any amino acid
  Variant (509)..(517): Xaa in position 509 to 517 is any amino acid
  Variant (519)..(522): Xaa in position 519 to 522 is any amino acid
  Variant (524)..(530): Xaa in position 524 to 530 is any amino acid
  Variant (532)..(537): Xaa in position 532 to 537 is any amino acid
  Variant (538)..(538): Xaa in position 538 is any or no amino acid
  Variant (540)..(540): Xaa in position 540 is any amino acid
  Variant (543)..(545): Xaa in position 543 to 545 is any amino acid
  Variant (547)..(549): Xaa in position 547 to 549 is any amino acid
  Variant (551)..(551): Xaa in position 551 is any amino acid
  Variant (553)..(555): Xaa in position 553 to 555 is any amino acid
  Variant (557)..(561): Xaa in position 557 to 561 is any amino acid
  Variant (563)..(563): Xaa in position 563 is any amino acid
  Variant (567)..(570): Xaa in position 567 to 570 is any amino acid
  Variant (572)..(575): Xaa in position 572 to 575 is any amino acid
  Variant (578)..(585): Xaa in position 578 to 585 is any amino acid
  Variant (586)..(661): Xaa in position 586 to 661 is any or no amino acid
  Variant (663)..(672): Xaa in position 663 to 672 is any amino acid
  Variant (674)..(675): Xaa in position 674 to 675 is any amino acid
  Variant (677)..(677): Xaa in position 677 is any amino acid
AXXXGANDVANXXXXSVXSXXXXXXQAXXXAXXXEXXGAXXXGXXVXXTIXXXIXXXXXXXXXXXXXXXXXXXXXXXXAXXXXXXWXXXAXXXXXXVSXTXSXXGXXXGXXXXXXGXXXXXWXXXXXXXXXXXXXXXXXXXXWXXXPXXXXXXXXXXFXXXXXXXXXXXXXXXXXXXXXXXXPXXXXXXXXXXXXXXXXKGXXXXXXXXXXXXXXXXXXXXXXXXXXXXXXXXXXXXXXXXXXXXXXXXXXXXXXXXXXXXXXXXXXXXXXXXXXXXXXXXXXXXXXXXXXXXXXXXXXXXXXXXXXXXXXXXXXXXXXXXXXXXXXXXXXXXXXXXXXXXXXXXXXXXXXXXXXXXXXXXXXXXXXXXXXXXXXXXXXXXXXXXXXXXXXXXXXXXXXXXXXXXXXXXXXXXXXXXXXXXXXXXXXXXXXXXXXXXXXXXXXXXXXXXEXXXXXXQXXXAXXXXFXHGXNDXXNXXGPXXXXXXXXXXXXXXXXXXXXXXXXXXWXLXXXXXXXXXGXXXXGXXXXXXXGXXXXXXXPXRGXXXEXXXAXTXXXAXXXXXPXSTTXXXXGXXXXVGXXXXXXXXXXXXXXXXXXXXXXXXXXXXXXXXXXXXXXXXXXXXXXXXXXXXXXXXXXXXXXXXXXXXXXXXXXXXXXXXXXXXNXXXXXXXXXXWXXTXP

SEQ ID NO: 89392 - protein, 52 aa, Artificial sequence
  protein pattern
  Variant (2)..(2): Xaa in position 2 is any or no amino acid
  Variant (8)..(8): Xaa in position 8 is Ala or Ser
  Variant (9)..(9): Xaa in position 9 is any amino acid
  Variant (10)..(10): Xaa in position 10 is Ala, Gly or Ser
  Variant (11)..(11): Xaa in position 11 is Ser or Thr
  Variant (13)..(13): Xaa in position 13 is Ile or Val
  Variant (14)..(14): Xaa in position 14 is Ala, Gly or Ser
  Variant (15)..(15): Xaa in position 15 is Ala or Ser
  Variant (16)..(16): Xaa in position 16 is any amino acid
  Variant (17)..(17): Xaa in position 17 is Ala, Ser, Thr or Val
  Variant (18)..(18): Xaa in position 18 is Ile, Leu or Val
  Variant (19)..(22): Xaa in position 19 to 22 is any amino acid
  Variant (24)..(26): Xaa in position 24 to 26 is any amino acid
  Variant (27)..(27): Xaa in position 27 is Ala, Cys or Gly
  Variant (28)..(28): Xaa in position 28 is any amino acid
  Variant (29)..(29): Xaa in position 29 is Phe, Ile, Leu or Val
  Variant (30)..(30): Xaa in position 30 is any amino acid
  Variant (32)..(33): Xaa in position 32 to 33 is any amino acid
  Variant (35)..(35): Xaa in position 35 is Ala, Gly or Ser
  Variant (36)..(38): Xaa in position 36 to 38 is any amino acid
  Variant (40)..(41): Xaa in position 40 to 41 is any amino acid
  Variant (42)..(42): Xaa in position 42 is Ser, Thr or Val
  Variant (43)..(43): Xaa in position 43 is Ala, Ser, Thr or Val
  Variant (44)..(44): Xaa in position 44 is any amino acid
  Variant (46)..(46): Xaa in position 46 is Ile, Met or Val
  Variant (47)..(49): Xaa in position 47 to 49 is any amino acid
  Variant (50)..(50): Xaa in position 50 is Ile or Val
  Variant (51)..(51): Xaa in position 51 is any amino acid
  Variant (52)..(52): Xaa in position 52 is Asp, Asn, Pro or Ser
GXNDVANXXXXSXXXXXXXXXXAXXXXXXXEXXGXXXXGXXXXXTXXXXXXX

SEQ ID NO: 89393 - protein, 20 aa, Artificial sequence
  protein pattern
  Variant (2)..(5): Xaa in position 2 to 5 is any amino acid
  Variant (6)..(6): Xaa in position 6 is any or no amino acid
  Variant (8)..(8): Xaa in position 8 is Ala, Ser, Thr or Val
  Variant (11)..(11): Xaa in position 11 is Ala, Gly or Ser
  Variant (14)..(14): Xaa in position 14 is Ile, Leu or Val
  Variant (15)..(15): Xaa in position 15 is Ala, Gly or Ser
  Variant (17)..(17): Xaa in position 17 is Ala, Gly or Ser
  Variant (18)..(18): Xaa in position 18 is any amino acid
  Variant (19)..(19): Xaa in position 19 is Ala or Gly
AXXXXXFXHGXNDXXNXXXP

SEQ ID NO: 89394 - protein, 26 aa, Artificial sequence
  protein pattern
  Variant (3)..(3): Xaa in position 3 is Ala, Gly, Ser or Thr
  Variant (5)..(5): Xaa in position 5 is any amino acid
  Variant (7)..(7): Xaa in position 7 is any amino acid
  Variant (8)..(8): Xaa in position 8 is Ile, Leu, Met or Val
  Variant (9)..(9): Xaa in position 9 is Gly or Ser
  Variant (10)..(10): Xaa in position 10 is Ala, Gly or Ser
  Variant (11)..(12): Xaa in position 11 to 12 is any amino acid
  Variant (14)..(19): Xaa in position 14 to 19 is any amino acid
  Variant (20)..(20): Xaa in position 20 is Ala, Gly, Gln or Ser
  Variant (21)..(25): Xaa in position 21 to 25 is any amino acid
VSXTXSXXXXXXGXXXXXXXXXXXXW

SEQ ID NO: 89395 - DNA, 1083 bp, Saccharomyces cerevisiae
  CDS (1)..(1083)
atgtcgatagtctacaataaaacaccattattacgtcaattcttccccggaaaggcttctgcacaatttttcttgaaatatgaatgccttcaaccaagtggctccttcaaaagtagaggaatcggtaatctcatcatgaaaagtgccattcgaattcaaaaggacggtaaaagatctcctcaggttttcgctagttctggcggtaatgccggttttgctgctgcaacagcatgtcaaagactgtctctaccatgtacagtcgtggttcctacagcgacaaagaagagaatggtagataaaatcaggaacaccggtgcccaggttatcgtgagtggtgcctactggaaagaagcagatacttttttaaaaacaaatgtcatgaataaaatagactctcaggtcattgagcccatttatgttcatcccttcgataatccggatatttgggaaggacattcatctatgatagatgaaatagtacaagatttgaaatcgcaacatatttccgtgaataaggttaaaggcatagtatgcagcgttggtggaggtggtttatacaatggtattattcaaggtttggaaaggtatggtttagctgataggatccctattgtgggggtggaaacgaatggatgtcatgttttcaatacttctttgaaaataggccaaccagttcaattcaagaagataacaagtattgctacttctctaggaacggccgtgatctctaatcaaactttcgaatacgctcgcaaatacaacaccagatccgttgtaatagaggacaaagatgttattgaaacctgtcttaaatatacacatcaattcaatatggtgattgaaccggcatgtggcgccgcattgcatttgggttacaacactaagatcctagaaaatgcactgggctcaaaattagctgcggatgacattgtgataattattgcttgtggcggctcctctaatactataaaggacttggaagaagcgttggatagcatgagaaaaaaagacactcctgtaatagaagtcgctgacaatttcatatttccagaaaaaaatattgtgaatttaaaaagtgcttga

SEQ ID NO: 89396 - protein, 360 aa, Saccharomyces cerevisiae
MSIVYNKTPLLRQFFPGKASAQFFLKYECLQPSGSFKSRGIGNLIMKSAIRIQKDGKRSPQVFASSGGNAGFAAATACQRLSLPCTVVVPTATKKRMVDKIRNTGAQVIVSGAYWKEADTFLKTNVMNKIDSQVIEPIYVHPFDNPDIWEGHSSMIDEIVQDLKSQHISVNKVKGIVCSVGGGGLYNGIIQGLERYGLADRIPIVGVETNGCHVFNTSLKIGQPVQFKKITSIATSLGTAVISNQTFEYARKYNTRSVVIEDKDVIETCLKYTHQFNMVIEPACGAALHLGYNTKILENALGSKLAADDIVIIIACGGSSNTIKDLEEALDSMRKKDTPVIEVADNFIFPEKNIVNLKSA

SEQ ID NO: 89397 - DNA, 1005 bp, Mesorhizobium loti MAFF303099
  CDS (1)..(1005): transl_table=11
atgatggcagaccttctcgtcccctcgctggcccatctcaaacaggcctatgccgtcacctccagggcgacgcagatcacgccgctgctggaatcgaccgcactcgccagggagaccggtgctgcccgtgtcttcatcaagccggaatcgctgcaatgggccggatcgttcaagatccgcggcgcctattggcggttgaagcggctgtcggccgacgaagcgaggaaaggagtcgtcgcctactcctccggcaatttcgcgcaaggcctggcggcagccggccaagcgctcggcattcccgtcaccatcgtcatgccgatcgacgcacccgccgccaagcgtgacgcgacggcgggctatggcgcgcgtgtcgtgttgaccgaccatggcgagcgcgcgcgagaagaggttgccgctgccaaggcgcgcgagatcgccgagacggaagggctggccctgctgcatcccttcgacgatccggagatcgtcgccggccaggctggcgccgggctcgaagcgctcgaccagcttgaggccaaggacgccagcgccgacctgttgttctgctcggtcggcggcggcgggctgatcggcggcgtttcgctcgccttccactatctgtcgccggcgacggagatcatcggcgtcgagccggaaggcttcaatggcatgggctcgtcgctggcgcatggcagcatcgagaccatgccgatcgggccgaaatcgatttgcgacgggctgatgtcgcggcggccgggcgatgcgccgttcgcggcggtcaagaccgctggcgttcgcggaatcaccgtcgatgatcaatcggtgcggcgtgccatgcggatcgccttcgagcggatgaagctggtgctggagccgtccggggctgcgtcgctggcagcattgctcggtggcaaggtggatgtgactgataaaaccgtccttgttgtggctaccggcggcaatgtctcgctcgccgattttatggcgcatatgaaccatgcttga

SEQ ID NO: 89398 - protein, 334 aa, Mesorhizobium loti MAFF303099
MMADLLVPSLAHLKQAYAVTSRATQITPLLESTALARETGAARVFIKPESLQWAGSFKIRGAYWRLKRLSADEARKGVVAYSSGNFAQGLAAAGQALGIPVTIVMPIDAPAAKRDATAGYGARVVLTDHGERAREEVAAAKAREIAETEGLALLHPFDDPEIVAGQAGAGLEALDQLEAKDASADLLFCSVGGGGLIGGVSLAFHYLSPATEIIGVEPEGFNGMGSSLAHGSIETMPIGPKSICDGLMSRRPGDAPFAAVKTAGVRGITVDDQSVRRAMRIAFERMKLVLEPSGAASLAALLGGKVDVTDKTVLVVATGGNVSLADFMAHMNHA

SEQ ID NO: 89399 - DNA, 1248 bp, Sinorhizobium meliloti 1021; identical to SEQ ID NO: 12369
  CDS (1)..(1248): transl_table=11

SEQ ID NO: 89400 - protein, 415 aa, Sinorhizobium meliloti 1021; identical to SEQ ID NO: 12370

SEQ ID NO: 89401 - DNA, 1269 bp, Listeria monocytogenes EGD-e
  CDS (1)..(1269): transl_table=11
atggaattagttgacttattagtaacagaagaagatgtcgaaaaggcctatgaagtcttaaagtcggtcgtcaaacatacgccactagaatatgatttttatctttcggaaaaatatcattgcaatgtctatctgaaacgcgaagatttgcaaagagtgcgttcttttaaattacgtggtgctttttatgctatttctagattatcagcggaacaattggaaaaaggagtggtgtgcgcaagtgctggaaatcatgcgcaaggagttgcatatacgtgcaaacgaatgacagttccagctacgatttttatgccaacgactaccccgcaacaaaaagtatcacaagtaaaattttttggtggtagtaatgtcgaagtggttttagttggcgatacgtttgatgcttctgcaactgccgcgaaagaatttgctgcagcacatggccaaacttttatcccaccgtttgatgatcctgatattattgcaggccaaggctcgcttgctgtggagatggtcaaagatttaaataaagcacacgagcaagcagattatgtttttgctggaattgggggtggtggcttgattagcggtgttgcaacgtatctcaaagcgaagagcccgattacaaaaatcatcggggtagaacctgatggcgcgccttcaatgacagcagctttaaaacaaaatcaagtcgtaacactagataaaatcgataaatttgtcgatggtgctgcggtaaaagaagttggtagcttaacgttccaacatgccaaagtgttagtcgatgaagtgacaactgtttctgaaggtgctgtttgttctacgattttggatatgtatacgaagcaagcgattgttgcagaacctgctggagcactttccgttgctgcacttgaaacctaccgcgaggaaattaaagacaagacggttgtttgtattgtaagtggcggaaacaatgatattaaccggatgcaagaaattgaagaacgttccctcctacatgaaggattaaagcattattttatcgtcaatttctcgcagcgtcctggggctttgaaagaatttgttaacgatgtgctcggtccacatgacgatatcaccaaattcgaatatacgaaaaaagtgaatcgaggtaatggacctgtaattatcggtgttttgttgcaagataaaaatgattatgaaggattgcttgaccgggttgctgcttttgacccgagctatattccgattaatgataatcaaaccctatacactttgcttgtataa

SEQ ID NO: 89402 - protein, 422 aa, Listeria monocytogenes EGD-e
MELVDLLVTEEDVEKAYEVLKSVVKHTPLEYDFYLSEKYHCNVYLKREDLQRVRSFKLRGAFYAISRLSAEQLEKGVVCASAGNHAQGVAYTCKRMTVPATIFMPTTTPQQKVSQVKFFGGSNVEVVLVGDTFDASATAAKEFAAAHGQTFIPPFDDPDIIAGQGSLAVEMVKDLNKAHEQADYVFAGIGGGGLISGVATYLKAKSPITKIIGVEPDGAPSMTAALKQNQVVTLDKIDKFVDGAAVKEVGSLTFQHAKVLVDEVTTVSEGAVCSTILDMYTKQAIVAEPAGALSVAALETYREEIKDKTVVCIVSGGNNDINRMQEIEERSLLHEGLKHYFIVNFSQRPGALKEFVNDVLGPHDDITKFEYTKKVNRGNGPVIIGVLLQDKNDYEGLLDRVAAFDPSYIPINDNQTLYTLLV

SEQ ID NO: 89403 - DNA, 1212 bp, Pyrobaculum aerophilum str. IM2
  CDS (1)..(1212): transl_table=11
atgatcctcctggaggaggctgcgtcggtaataagagaaaaacagcgggaatcaaaaatccataggacgccgactttgaggtcagagtctctgactagaataacaggcggggaggtgttcctcaagttggaatcgcttcaaaagacaggcagtttcaagatcaggggggcatattttgccatgtataaatacataaaggagggttatagggagtttataaccgcctcgtcgggtaatcacgcgcagggagttgcctatgcggcacaattacacggagtaaaggccactgttgtaatgcctgaaactacgccttggctcaaggttaaaaagacccaggattacggcgccaacgttatattatacggcgagagttattacgaggcggagaaaaaagccatggaattagtacgcggaggagttaagttcctccacgcgtataacgactggtacgtcatctcgggacaagccactttaggccttgagattgtagaggatgtcggtgacgtagacgtagtagttgtgccaataggcggcggggggcttatctccggcgttgcatatgccgtgaagaagagaaggcctggggcaaaggtaataggggttcaagccagcggagcgccggcggtgtacttgtctttaaaagaggggcggcccattgtgattgagaaagtagacactattgccgacggtatcgctattaaaagccccggcgacattacgttgaaattaatacaagagtacgtagacgacgtggtgttagtagacgacaatgaaattgtagatgccatttacctcctccttgaaaggacaagagtagtggctgagggcgctggggctgttgcagtggccgcgttaatgtcggggaaaattaacgtaagtggtaaaaaagtagtggcggttgtctccggcggtaatatagacgcgcctatttttatgcgcgttctcatgaaggcaatggcgagacagaggcgggtgattaaattagtcggcgaagtgcctgacaagcctggaactcttgcgaaggcctcttctttcctggcctcacacaatgtgaatatcctagaggttttccacgagcgctacgacccggaacaacggcctaattatgtaagactcatatttgtagtggaaattccaggcacgttagacgtatcaaagctcttagacgaactggaaaaaaacggcttctttttcagagtcgcctcgcagtaa

SEQ ID NO: 89404 - protein, 403 aa, Pyrobaculum aerophilum str. IM2
MILLEEAASVIREKQRESKIHRTPTLRSESLTRITGGEVFLKLESLQKTGSFKIRGAYFAMYKYIKEGYREFITASSGNHAQGVAYAAQLHGVKATVVMPETTPWLKVKKTQDYGANVILYGESYYEAEKKAMELVRGGVKFLHAYNDWYVISGQATLGLEIVEDVGDVDVVVVPIGGGGLISGVAYAVKKRRPGAKVIGVQASGAPAVYLSLKEGRPIVIEKVDTIADGIAIKSPGDITLKLIQEYVDDVVLVDDNEIVDAIYLLLERTRVVAEGAGAVAVAALMSGKINVSGKKVVAVVSGGNIDAPIFMRVLMKAMARQRRVIKLVGEVPDKPGTLAKASSFLASHNVNILEVFHERYDPEQRPNYVRLIFVVEIPGTLDVSKLLDELEKNGFFFRVASQ

SEQ ID NO: 89405 - DNA, 933 bp, Corynebacterium glutamicum ATCC 13032
  CDS (1)..(933): transl_table=11
atgctcaccctcaacgatgtcatcaccgcccaacaacgaaccgcccctcatgttcgacgaacgccacttttcgaagcagaccccatcgacggcacacaaatctggatcaaagcagagttcctccaaaagtgcggcgtgttcaaaacgcgtggagcattcaaccgccagctcgcagcttcggaaaacggactactcgacccaacggttggcatcgtcgcggcatcaggcggaaacgcaggactcgcaaatgcttttgccgcagcatccttaagcgttcccgccacggtattggtgcccgaaactgccccacaagtaaaagttgatcgcctcaagcaatacggtgcaaccgtgcaacaaatcggatctgaatatgcggaagcatttgaggcagctcaaacctttgagtcggaaactggtgctctgttttgccacgcctacgaccagcccgacatcgcagctggagcaggcgtcattgggctagaaattgtcgaagatcttcccgacgttgacaccatcgtggttgctgtcggtggcggtggactctatgcaggaatcgcagccgtcgtagcagcccacgacatcaaagtggtggccgttgaaccctccaaaattccaaccctgcacaactcactcattgccggccaaccagtcgatgtgaacgtttctggtatcgcggcagattctttgggggctcgccaaattggacgagaagcctttgacatcgcaactgcccatcccccaataggcgtcctagtggacgatgaagcaatcatcgcagctcgacgccacctctgggacaactaccgcatccctgccgagcatggcgctgccgcagcactcgcctctcttaccagtggagcatacaaacctgcagcagatgaaaaagtggcagtcattgtgtgcggagcgaacactgacctcacaacactgtga

SEQ ID NO: 89406 - protein, 310 aa, Corynebacterium glutamicum ATCC 13032
MLTLNDVITAQQRTAPHVRRTPLFEADPIDGTQIWIKAEFLQKCGVFKTRGAFNRQLAASENGLLDPTVGIVAASGGNAGLANAFAAASLSVPATVLVPETAPQVKVDRLKQYGATVQQIGSEYAEAFEAAQTFESETGALFCHAYDQPDIAAGAGVIGLEIVEDLPDVDTIVVAVGGGGLYAGIAAVVAAHDIKVVAVEPSKIPTLHNSLIAGQPVDVNVSGIAADSLGARQIGREAFDIATAHPPIGVLVDDEAIIAARRHLWDNYRIPAEHGAAAALASLTSGAYKPAADEKVAVIVCGANTDLTTL

SEQ ID NO: 89407 - DNA, 1410 bp, Drosophila melanogaster
  CDS (1)..(1410)
atgtcccaggcagtgaaaacggaaacgcccaaggaaccaaatgttgtggctgccaaagccaatggcggcaccgctgtcaatggaaagttggaagcccagaagagaccccggcatgtttctggtggtgtggaggaaatcatcgatcccttttgcaatccggagaaaccgcaacgcatatccttccatgacgtcacatccgctgcctttctcatccgcggtggcgtggaacgcactccttgtccgaaatccacatcatcggatctatatggcatggagttatatctgaaaaaggatttcctacaatatacaggcagcttcaaggagcgtggcgcacgctatgccttgctatcattgaccgaggaacagaagcgaaccggagtgatcagtgcctccttgggtaatcacgcccaggccctgtgctatcatggctggaaactcaatataccagtgaccgtggtgatgcccaaggcggcgcccatcatgaagatccaaaagtgccggaactacaaggcacgcgtcatcgtcgacggaaatgacatgggcgaagccaagtccctggccatgcgaatgtcccgcgaggagggactcctgtacgtgaatggctacgatcatccgcacattatggccggccagggaactattggtttggagatactcgaacaggtgccggaaccggatgcagtggtggtgccagtgggcggcggtggactgattgccggtattgccacagccgttaaagctttgtcccccaaaaccaagattattggtgtggagtcggagaagtgcgccagcttcacccgggccatggaaaatgatggacctattcacacgcccatcaagaacacattggctgatggcttggccgttcctaaagttggctataatgcctatgccaccgcaatgccgctaatagatcgcatggtggtggtcaaggaggagtggatcgcagtggctatcctaagattggtggaggaggagaagtgcgtcgtcgagggagcgggtggtgcgggtctggcggccattctggccggacacttggatgagctcaagggaaagaaagttgtggtgcttctgtgtggaggaaacatagacaccaccgtttttggacgttgtttggagcgaggtttggctgccgttggacgcctggttaagtttaatgtggaggttagcgatcgtcctggcggaatcaacgatctttgcgccctgcttgtccgagtaggcgtgtccattaaggacatcatgcacgagcgagcctggctgagggatgtttataccgtggaagtgaaggtcgtgtgcgaaaccgtggactggacccatagtttgcagctaaaaaacgagctgaagaagttctactcgaaagttcagttctccgatgttccgctggccctgtcaaatgataccgattcgtag

SEQ ID NO: 89408 - protein, 469 aa, Drosophila melanogaster
MSQAVKTETPKEPNVVAAKANGGTAVNGKLEAQKRPRHVSGGVEEIIDPFCNPEKPQRISFHDVTSAAFLIRGGVERTPCPKSTSSDLYGMELYLKKDFLQYTGSFKERGARYALLSLTEEQKRTGVISASLGNHAQALCYHGWKLNIPVTVVMPKAAPIMKIQKCRNYKARVIVDGNDMGEAKSLAMRMSREEGLLYVNGYDHPHIMAGQGTIGLEILEQVPEPDAVVVPVGGGGLIAGIATAVKALSPKTKIIGVESEKCASFTRAMENDGPIHTPIKNTLADGLAVPKVGYNAYATAMPLIDRMVVVKEEWIAVAILRLVEEEKCVVEGAGGAGLAAILAGHLDELKGKKVVVLLCGGNIDTTVFGRCLERGLAAVGRLVKFNVEVSDRPGGINDLCALLVRVGVSIKDIMHERAWLRDVYTVEVKVVCETVDWTHSLQLKNELKKFYSKVQFSDVPLALSNDTDS

SEQ ID NO: 89409 - DNA, 918 bp, Pseudomonas putida KT2440
  CDS (1)..(918): transl_table=11
atgaccttgcacattcatacccccctgatcgagtcgcgcccgctgtcgttggcggccggtcgtaatatctggctcaagctcgacgccctgcaaccctgcggttcgttcaaactgcgcggtgtaggccacgcctgcgaggtacaccacgcgcgtggcgcccggcactttgtgtcctcgtcaggtggcaatgccggtttggcagtcgcctatgccggacgcaagctgggggtgccggtgaccgtggtgatacccgaaaccaccaccgaacgggccaagcagttgctgcacctggaagacgccaaggtggtggtgcaaggcagttcctggcaagaggccaacgccctggcacagacactggtaggcccgaacgatgccttcatccacccattcgacgacccactgctgtgggccgggcatgccagcctggtggatgaagtggccgaggccggcctgaagccggacgcggtggtgttgtcagtcggcgggggcggcttgctcagtggcgtggtggaggggctcaagcgcaatggctggggcgatgtgcctgtgctggcggtagaaaccgagggcgcggcgtcgctgcatgcggccatgcaggctgggcattcggtggagctggagcgcatcgcctcggtggcgacgtcgctgggggccaagcgtgtggctgatcaggcgctgatgtgcgtgcagcagcatccggtgcacagccatctggtcagcgatcgcgcagcgctggaggcctgtgagcggttcttgctggaccaccgtgtgctggtcgagcccgcgtgcggggcggcgttggcagtggcctatgatgccaaggctctgggcgccttgcgcaatgtcctggtggtggtctgtggtggcgctaccgcaacactggagcagatccaggcctggctgcagcaggcagactga

SEQ ID NO: 89410 - protein, 305 aa, Pseudomonas putida KT2440
MTLHIHTPLIESRPLSLAAGRNIWLKLDALQPCGSFKLRGVGHACEVHHARGARHFVSSSGGNAGLAVAYAGRKLGVPVTVVIPETTTERAKQLLHLEDAKVVVQGSSWQEANALAQTLVGPNDAFIHPFDDPLLWAGHASLVDEVAEAGLKPDAVVLSVGGGGLLSGVVEGLKRNGWGDVPVLAVETEGAASLHAAMQAGHSVELERIASVATSLGAKRVADQALMCVQQHPVHSHLVSDRAALEACERFLLDHRVLVEPACGAALAVAYDAKALGALRNVLVVVCGGATATLEQIQAWLQQAD

SEQ ID NO: 89411 - DNA, 1248 bp, Rhodopirellula baltica SH 1; identical to SEQ ID NO: 12413
  CDS (1)..(1248): transl_table=11

SEQ ID NO: 89412 - protein, 415 aa, Rhodopirellula baltica SH 1; identical to SEQ ID NO: 12414

SEQ ID NO: 89413 - DNA, 1035 bp, Magnaporthe grisea 70-15
  CDS (1)..(1035)
atgggatcctactcagtagagcctgtgaagccatgggttgagaccccatgcttgtactctccccaagtctcgcgcgcagctggctgcaacatctacctcaaattagacaacctccagccctcgggctcgttcaagtccaggggtatcggcaacatgatgcaacgcgccatagccctgacgccgagggacgacgtgcacttctactgcccatcaggcggaaacgccggcctggcctgcgccacgtctgccgcatcactcggcaagcccgccactatcgtcgtcccgatcaagaccccggcccacatggtcgagaagcttgaggcgctaggagcagaggtgctccgccggggcggcagcatcgccgaggcggacgcgtacctcaagtcgcagctgctgataaacgacccgaacggcgtctacgtctcgccctttgaccaccctgacatctgggagggcgcctcgagcatcgtcgacgagatcacgacccagatgaggctgcagccgggagggcccaaggaggccgacggcatcgtctgcaacgttggcggcggcggcctgctgatcggcatcatggacgggctggaccgcatctactgcggccgcccgcagaaccagccccgggtgctggccgtcgagacgcgcggtgccgagagcctcgacgccagcatccgtgccggcgagctggtgacgctgccaaacattacttccatctgctcgtcgctgggcgtagctagagtggcaccccgcgcttacgagtggaccaaggccgcggccggtcagctcgccacgacggtggtggacgacgccgatgccgtcatggggtctgtcaagttcctggacgacgcgaggctgctcgtcgaggttgcctgcggcgctaccatttcggttgtgtacaacggccaactgaggcagaagctggggaagggcctgagcgacgccgagtgggccgagaagaacatagtgctggtggtgtgcggtgggtctcacaccactctcgaggcactgttgaggtacagggaagagtttggagtataa

SEQ ID NO: 89414 - protein, 344 aa, Magnaporthe grisea 70-15
MGSYSVEPVKPWVETPCLYSPQVSRAAGCNIYLKLDNLQPSGSFKSRGIGNMMQRAIALTPRDDVHFYCPSGGNAGLACATSAASLGKPATIVVPIKTPAHMVEKLEALGAEVLRRGGSIAEADAYLKSQLLINDPNGVYVSPFDHPDIWEGASSIVDEITTQMRLQPGGPKEADGIVCNVGGGGLLIGIMDGLDRIYCGRPQNQPRVLAVETRGAESLDASIRAGELVTLPNITSICSSLGVARVAPRAYEWTKAAAGQLATTVVDDADAVMGSVKFLDDARLLVEVACGATISVVYNGQLRQKLGKGLSDAEWAEKNIVLVVCGGSHTTLEALLRYREEFGV

SEQ ID NO: 89415 - DNA, 1083 bp, Candida glabrata CBS 138
  CDS (1)..(1083)
atgtcagtatacaacaagacaccactaatacgtcagatatttccaagcataccacagatgtacttgaaacatgaatgtttccaaccaagtggaagtttcaaaagcagaggtattggccatctaatatcgaaacaatcacaaagaatattaggcaatggcctgggtaagaagccaatggtattcgccagctctggtggtaatgcaggactagcagcagccacagctgcaaaatttttaaacctaccttgtaccgtcgtcataccaaccgctacgaaacagaggatggcagataagattagagctaccggagctaatgtcattgtttctggtaacttctggaaggaggcagataactacctgaaagataatatcctatctaagttagaagagttacataaaaatgtggaaccaatatatgtacacccatttgataatccagatatatgggaaggtcatgcttcaatggtagatgaaattgttgaagactttaaaaataaaatgatacctcttaacaagataaaagctatagtgtgcagtgttggaggaggcggactttacaatggtataatacaaggcctcgaaaaatataacttagctgacaagatacctattgtaggcgtagagactaaaggttgccatgtattcaatacatctttgagaatgaacaaagtggtgagcttcaagaagatcaccagtattgctacctcgttaggtactgccgacatatctacagaggcctttaaatacgccaaaagatatggtacgaagtctgtggttttaagtgatcaggacgttgtcaagacatgcctaagatacactcatgactttaacatggtaattgaaccagcatgtggcgctgccgtccatttggcttatcacaccgagatcttagaaaaagaactcggcacaaaactaaatgcggatgacattgtactagtagtggcctgtggaggttcatcgaacactgtcgaagatatggaatcgatactacaaagactgtccaccgaggagaataacatcaatatcccaaatgttgcagaaaatattattgtcagaatgcctgaggtgtctgtcctagcttaa

SEQ ID NO: 89416 - protein, 360 aa, Candida glabrata CBS 138
MSVYNKTPLIRQIFPSIPQMYLKHECFQPSGSFKSRGIGHLISKQSQRILGNGLGKKPMVFASSGGNAGLAAATAAKFLNLPCTVVIPTATKQRMADKIRATGANVIVSGNFWKEADNYLKDNILSKLEELHKNVEPIYVHPFDNPDIWEGHASMVDEIVEDFKNKMIPLNKIKAIVCSVGGGGLYNGIIQGLEKYNLADKIPIVGVETKGCHVFNTSLRMNKVVSFKKITSIATSLGTADISTEAFKYAKRYGTKSVVLSDQDVVKTCLRYTHDFNMVIEPACGAAVHLAYHTEILEKELGTKLNADDIVLVVACGGSSNTVEDMESILQRLSTEENNINIPNVAENIIVRMPEVSVLA

SEQ ID NO: 89417 - DNA, 1134 bp, Kluyveromyces lactis NRRL Y-1140
  CDS (1)..(1134)
atgtatgtccatatctttccaacttcatatagtcaaacgagtattaatagattaataatgaaagcccaattgttcagcaaaacaccgttattgaaacatcaattcaaaagaagtaaaggccctcaagtgcttttgaagtatgaatttttacagccgagtggtagtttcaaaagtagaggtatcggacatttaatctctacaaaggtagaagaaataaagaaatcctcgcctgaaaaaatcggtcacgtgtttgctagctctggcggtaacgctggattggcggcggcggttgcgtccctcgaattgaacgttccctgtacagtagttgtgtcgaatgcaacacgtccaagaattatagaaaagattcgctcctacggcgcagatgttgttgttcatggtaaccattggaaagaggcagattctttcatgaaggagcaccttatgaagaaacttgattcctttaaatacgagccaatttacagccatcctttcgataatccgctaatttgggaaggccattcctttatggtggatgaaatcatggatgtcttggctagttcaaaaatacctataaccaaaattaaaggtattgtttgcagttttggaggcggaggtctatataacgggttgattttgggtttgcaacggtataatttagctgacaaaattccgatagtatgtgtcgaaacgaagggaacagacgtattgagcgcctctttgcgtgtaggagcaccagtggagtttgaaaaaatatccagttgtgctacttcactagggacagcaaccatatcaacaacggcttaccaaaatgtgaaacgtcacggaagcaagtcagctgtcatctctgatactgaagtgatttcaacttgccttcaattttctaacgataccaacatagttgcggaacctgggtgtggggcaacgttatacttcgggtataatatcgataaactacaaaatattctcggttcagacattaaagatgatgattatgtcatcttgatcggttgtggtgggtcatctacaagcttagaggatcttaaagagttatctagttttactaattgtgaatttgagcttccttctactggtgtgagccgtctgaattcccattcgttacacacactccagtag

SEQ ID NO: 89418 - protein, 377 aa, Kluyveromyces lactis NRRL Y-1140
MYVHIFPTSYSQTSINRLIMKAQLFSKTPLLKHQFKRSKGPQVLLKYEFLQPSGSFKSRGIGHLISTKVEEIKKSSPEKIGHVFASSGGNAGLAAAVASLELNVPCTVVVSNATRPRIIEKIRSYGADVVVHGNHWKEADSFMKEHLMKKLDSFKYEPIYSHPFDNPLIWEGHSFMVDEIMDVLASSKIPITKIKGIVCSFGGGGLYNGLILGLQRYNLADKIPIVCVETKGTDVLSASLRVGAPVEFEKISSCATSLGTATISTTAYQNVKRHGSKSAVISDTEVISTCLQFSNDTNIVAEPGCGATLYFGYNIDKLQNILGSDIKDDDYVILIGCGGSSTSLEDLKELSSFTNCEFELPSTGVSRLNSHSLHTLQ

SEQ ID NO: 89419 - DNA, 969 bp, Kluyveromyces lactis NRRL Y-1140
  CDS (1)..(969)
atggatcaattgacaataaaaaccccattactgccatttagagaaccgttaaacggcggacccacttttctgttgaaatatgagaatttacagccaggcggaagcttcaaatcaagaggaattagtcatctcatcaagacgacaatggattccatatctgatcctgaaaacgaattagctgtttattcaagttctggtgggaatgctgggcttgcagctgctcgtgcatgtgctaccttgaaagtaccatgcactgttattgtccctaaatcgacaaagccaaggatgattaagaaaatagagtcagcaggtgctaaggtcgtgatctttggtgatcattggaaagaagctgacacgtatttaagagaatatgtcatgagacagtcttcgtattcaaatactctttatgtgcaccctttcgataaccccattatctgggatggtcattcgacaatgattgatgaaatcattgaacagctggcggaatcccatactgacatcaatgatgtaaaagggattgtgtgcagcgttggaggaggcggtctgtacaatggggtcgttaatggattagaaagacatggattggcgggctcaattcctgtttttgccatggaaaccgatgggtgtgatgtattgagcaagtctttgatagctggtgaacccgtagtattggatagaatcagtagcatagctacttctttgggatcaaccgaaatatgcgcagactcttttcaaaaggctattaaattttcgtcgaagtcaattgtcttagatgataagaatgttgttgatacttgtttgaggttctttgatgagacctcgattttggtcgaaccagcatgcggtgcttcgttacatacttgttatcgtcctgaactgttaggaccattgggaccagatgatatcgtagtagttatcctttgcggtggatcatgcaacacttatgatgatctaaaaagtttccattga

SEQ ID NO: 89420 - protein, 322 aa, Kluyveromyces lactis NRRL Y-1140
MDQLTIKTPLLPFREPLNGGPTFLLKYENLQPGGSFKSRGISHLIKTTMDSISDPENELAVYSSSGGNAGLAAARACATLKVPCTVIVPKSTKPRMIKKIESAGAKVVIFGDHWKEADTYLREYVMRQSSYSNTLYVHPFDNPIIWDGHSTMIDEIIEQLAESHTDINDVKGIVCSVGGGGLYNGVVNGLERHGLAGSIPVFAMETDGCDVLSKSLIAGEPVVLDRISSIATSLGSTEICADSFQKAIKFSSKSIVLDDKNVVDTCLRFFDETSILVEPACGASLHTCYRPELLGPLGPDDIVVVILCGGSCNTYDDLKSFH

SEQ ID NO: 89421 - DNA, 1053 bp, Debaryomyces hansenii CBS767
  CDS (1)..(1053)
atgtcgttaccagttgaaacattgcgtgattcgcagccatttatcaagacctctttggtggaagttactaaggacttgccaaataaaccgccatgccgtgttttcttgaagaatgaatatgaacaaccatgtggtagttttaaattgagaggcatttccaatttgatttacagactgattcaaaaagccaaaaaggaaaagattgacaagacactctacgtgtttgcatcaagtggaggaaatgccgggttggcagcagcatacctggcgcgttactttaggataggatgcaccgttgttttgccaaccacatcaaagccagagattattgagaaattgcagagctatggggccaagactattatgcacgggaaaaatattaatgaagccgacggatacttgaagaacatgatgagaaacatagacttaaacatttacccaatctattgccatccatttgacaatccattaatatgggagggtcactcgtcgttagtggacgaagtataccaagaacaattatcctataacgactcacaaaaagtcaaaggtattgtgtgctctgttggtggaggcggcctttataacgggattatgaagggccttgaacaaaacaaaacaaacaaagatacaagcttgatgcttgttgagactaaccaggctccaactttgttggaaacaatcaaggctggagaagtctttacattagattcggtcaactcattagccacctcacttgcatgctcatacttgtctgaacaaagtttagacaactactataattctaaattcaagacttatgtcgattcgatcgacgacttagatgccattcaaggcttaattgatttttatagtaattccggtgttgttgttgagccagcttgcggtactgcattgtcattagtatacaatagaatggatatattgacaaagcattatactaatttatcccccgatgatatcattattgtcgttgcttgcgggggctcatgcacgaatttagagggtgttgaaaacttcaagaagatgcttaacactacatgcaagctttag

SEQ ID NO: 89422 - protein, 350 aa, Debaryomyces hansenii CBS767
MSLPVETLRDSQPFIKTSLVEVTKDLPNKPPCRVFLKNEYEQPCGSFKLRGISNLIYRLIQKAKKEKIDKTLYVFASSGGNAGLAAAYLARYFRIGCTVVLPTTSKPEIIEKLQSYGAKTIMHGKNINEADGYLKNMMRNIDLNIYPIYCHPFDNPLIWEGHSSLVDEVYQEQLSYNDSQKVKGIVCSVGGGGLYNGIMKGLEQNKTNKDTSLMLVETNQAPTLLETIKAGEVFTLDSVNSLATSLACSYLSEQSLDNYYNSKFKTYVDSIDDLDAIQGLIDFYSNSGVVVEPACGTALSLVYNRMDILTKHYTNLSPDDIIIVVACGGSCTNLEGVENFKKMLNTTCKL

SEQ ID NO: 89423 - DNA, 1023 bp, Debaryomyces hansenii CBS767
  CDS (1)..(1023)
atgatatcacagctagccaaaggagagccatctatcgatacatcattaattgaggttactgataaattacctaataaaccaccatgccggattttcattaagaatgaatatgaacagccatcaggtagctttaaattgagaggtatgggccatttagtggccaaatcgattgaaagagctcatgaactaaagaaggaaaatgtagagacatttgcatcgtccgggggtaatgctggtttagctgctgcgtacaccagtagacattacaatttatcttgtacagtggttttaccaactacagctcacagtggggttgttgaaaagttggaaaaattgggtgctaaagtacaagtccatggtgcccattggggtgaagccgactcatacttgagagaaatagtaatgaagagtgtagatgcgtcagtatatcctgtttattgtccaccatttgatgatccgttactttgggaaggccatggtacaataattgacgagattgtaaatcaaaatcaactatcaccagaagaatgtggtaaggttagagggattgtttgcagtgtaggcgggggtggtctatataatggtgtagtagctggattactgagaaatgcacaatttaaagatgttcctatacttgctgtcgaaacatttcaaactccaactttctcagaagctcttaaagctggaaaagtagtcaccttaaaatcaattaatactttggtgtcatgtttggcatctccttatatttcggcccaatccttggctaattacaataagcataggacacacgtccagatgattgacgatctcgaagcagtaaaaggttcaattgacttctatgatcatttcgggacattggtcgagccggcatgtggtgctaccatttcaatggcctttgataacactctgtatttgaaatgctttggcaacttatccgacgaagaaatcattatatttataggctgtggaggtgctgctatctcagtagactcgttgaatgagtaccgtaagctatttacttag

SEQ ID NO: 89424 - protein, 340 aa, Debaryomyces hansenii CBS767
MISQLAKGEPSIDTSLIEVTDKLPNKPPCRIFIKNEYEQPSGSFKLRGMGHLVAKSIERAHELKKENVETFASSGGNAGLAAAYTSRHYNLSCTVVLPTTAHSGVVEKLEKLGAKVQVHGAHWGEADSYLREIVMKSVDASVYPVYCPPFDDPLLWEGHGTIIDEIVNQNQLSPEECGKVRGIVCSVGGGGLYNGVVAGLLRNAQFKDVPILAVETFQTPTFSEALKAGKVVTLKSINTLVSCLASPYISAQSLANYNKHRTHVQMIDDLEAVKGSIDFYDHFGTLVEPACGATISMAFDNTLYLKCFGNLSDEEIIIFIGCGGAAISVDSLNEYRKLFT

SEQ ID NO: 89425 - DNA, 1095 bp, Yarrowia lipolytica CLIB122
  CDS (1)..(1095)
atgacaacctctactcccccatctccaccctctccggcagcctcccccatccctaaaaccacccttccatacatccagacgcctttgatcgagtctctgtacctctcacagctagcaggatgtaaggtgcttctcaaatacgaaactacacagccctctggctccttcaagtctcgaggtcttggacacctggtctacaaacacgtccagactcactttggaaacgccgaggatgcccccaccgacacaaacacaaccaagctgcacttcttttcttcttctggaggaaacgctggctgtgccactgcatacgccgccaaaaaatacaaccagctctgcaccgtctgtgttcctctctcgaccccccccggaatgatccagcgaattgaaaagactggcgctcgagttattccttatggccaatacattgctgacgcagacaagtacctcaaggagattcttattccggcatgcgacctttctctcgaaaagcccgtatactgccatccctacaacgatcccctcgtgtggactggaaatgctaccgtggctgatgaaattgtggtccagactgagacattgtttcctgactacaaccccgctgctgtggtttgttctgttggcggcggtgggctgtttaatggaatctgcaccggctttgagaactcgggaaagaagcagtggcagaaaattcctttggtggcagtcgagactgaaggttgctctaccctgtttgactctctggcaacaggctcccaggtctgccttgatcgacctcacaccattgcttcttcgctggctactcagaacgtgactcgagagacaatcgaatgggccaagaaacatcccactacagctgtcaaggtgactgaccgggaggcagcggcatcctgtctcgagttcgtagccgaccacaaggtgcttgttgaggctgcttgtggaactgcgctggctccaatctacaacggtacactaaaagatattgtgcctggtctcggacccgaagacgcagttattgtgattgtctgcggaggcactaacgtcacctttgcgcagctccgagagtatgctgataagtttgagttggacttctag

SEQ ID NO: 89426 - protein, 364 aa, Yarrowia lipolytica CLIB122
MTTSTPPSPPSPAASPIPKTTLPYIQTPLIESLYLSQLAGCKVLLKYETTQPSGSFKSRGLGHLVYKHVQTHFGNAEDAPTDTNTTKLHFFSSSGGNAGCATAYAAKKYNQLCTVCVPLSTPPGMIQRIEKTGARVIPYGQYIADADKYLKEILIPACDLSLEKPVYCHPYNDPLVWTGNATVADEIVVQTETLFPDYNPAAVVCSVGGGGLFNGICTGFENSGKKQWQKIPLVAVETEGCSTLFDSLATGSQVCLDRPHTIASSLATQNVTRETIEWAKKHPTTAVKVTDREAAASCLEFVADHKVLVEAACGTALAPIYNGTLKDIVPGLGPEDAVIVIVCGGTNVTFAQLREYADKFELDF

SEQ ID NO: 89427 - DNA, 990 bp, Yarrowia lipolytica CLIB122
  CDS (1)..(990)
atgcgaccaggctacattgaaacaccgctgctgaagaacgacatcttctcgcaccaggtcgggtgcaacgtgtacctgaaaatggagaacttgcagccctcagggtcgttcaaatcccgaggcatgacccaggtcatctccgatgcgctggactcagacccccaggcttctctagacactctccacgtgtgttccagctctggaggcaacgcagggctcgccgcagcagtcacctcgcgactcaatggtgtcgcgtgcacggtggttgtgccggaatcgactaaacctcgaatggtggagaaactgagagctgcaggagcagaagtgattgtgcacggaaaacactggtcagaagccaacgactttctgcaaaaggaagagatgccgcggctcgaaaagacgggaaaaacgccaatctactgccatccctttgacgctccagcggtgtggaagggaaactcgactctcatcgacgaaatcatcaagcagggaatcaccccagacgccgtcgtgtgcagcgtgggaggcggaggactgttcaacggagtagtcgagggccttaaacgacacaagctcaactgccccgtgattgtagtggaaacaaacggtgctgatgctctgagccggagtctacagaagggcgagcaggtcactctacctggaattacgtcaattgccacttctctgggagccgttcgagtcgctgacaagacgtttgaaaacgcccagacataccctactgtgtctgcagtcgtttcagatgacgacgcagtatcagctctggtggagtacgctgagaccaagcagatcatcgtggaacccgcctgtggagcttccctcgctgttctgcctgctctaaaggatctggttgatttgaaacctgattctaacgttgttgttgttctctgtggaggctcggctactggcatttctgatatcgcgcagttcaagaaagacttggaagcaaaggagacaactgaagagaagtag

SEQ ID NO: 89428 - protein, 329 aa, Yarrowia lipolytica CLIB122
MRPGYIETPLLKNDIFSHQVGCNVYLKMENLQPSGSFKSRGMTQVISDALDSDPQASLDTLHVCSSSGGNAGLAAAVTSRLNGVACTVVVPESTKPRMVEKLRAAGAEVIVHGKHWSEANDFLQKEEMPRLEKTGKTPIYCHPFDAPAVWKGNSTLIDEIIKQGITPDAVVCSVGGGGLFNGVVEGLKRHKLNCPVIVVETNGADALSRSLQKGEQVTLPGITSIATSLGAVRVADKTFENAQTYPTVSAVVSDDDAVSALVEYAETKQIIVEPACGASLAVLPALKDLVDLKPDSNVVVVLCGGSATGISDIAQFKKDLEAKETTEEK

SEQ ID NO: 89429 - DNA, 1278 bp, Aspergillus nidulans FGSC A4
  CDS (1)..(1278)
atggcgttcgtgaagagaataccctggatcgaaacacccctgattgaatctgcttccttatcaaagacggctggatgcagagtattcctcaaactagacctccttcagccttctggctctttcaaatctagaggaattggaaacctcatctgcaatgcccttcaagacccagccaacagaggcaaagaactccacttctttagctcctctggcggaaacgccggtctggctgccgttatcgcggcgcgtgatctcggctgccgttgtacagttgtcgtgccgtactcgacgaaacctatgatgatcacaaagctgcgggaggccggtgccactgatgtgatccaacatggggacagttggtttgaggccgatacgtatcttcgggagacatttattgagaatcaggaccaaggaggcgatgccgcgacaaagaggaatatctacgttccaccgtttgatcatccgcagatctggaagggtgtcgggactatgattgatgagatcgcacagcaaatgccgcctagggatgtttcgaaaggttcttttcccgcagatgctgtgatttgtagcgttggtggaggtggcctctttaatggtgtggttgaggggctgggtcgacatctggcaactaaaaatggcgatgctcctgggggcaaggtccgcgttttagccgtcgaaactgaaggaactgattccctcgctttgtcccttcgaaaaggtacattgcagccgctcccggctattacgtccctcgctacatcgctaggagcacttcaagtggcgccgcagactctgaagaacgcgcagtgcccgcccgccagagtagatgtcgtcagcgttgtcggctctgatgcggaagctgcccaaggcgtgattcggctcgcggatgaacaccggttgcaagttgaattggcttgtggtatcagtgtagaggttggtggctcggtgaagctgagggattacatgcctgatctgacgccggacagccggatagttattgttatttgtggaggaagcaatgtcactgcggagatggtggtggagtataggaaaaggcttcatgatggttgggatagcgcatacgcggcttttgcgtcgcctgcggtcggatccgtagttcacgcatttgacgccattcttggtagtcaggtccccgtcttatttctaatgtatccatccatatgctccagctgtaaagctgccagcataaacaagaagagcacaatgcactccagctttacttggagaagtagacaaattcagacttcgactgtgtga

SEQ ID NO: 89430 - protein, 425 aa, Aspergillus nidulans FGSC A4
MAFVKRIPWIETPLIESASLSKTAGCRVFLKLDLLQPSGSFKSRGIGNLICNALQDPANRGKELHFFSSSGGNAGLAAVIAARDLGCRCTVVVPYSTKPMMITKLREAGATDVIQHGDSWFEADTYLRETFIENQDQGGDAATKRNIYVPPFDHPQIWKGVGTMIDEIAQQMPPRDVSKGSFPADAVICSVGGGGLFNGVVEGLGRHLATKNGDAPGGKVRVLAVETEGTDSLALSLRKGTLQPLPAITSLATSLGALQVAPQTLKNAQCPPARVDVVSVVGSDAEAAQGVIRLADEHRLQVELACGISVEVGGSVKLRDYMPDLTPDSRIVIVICGGSNVTAEMVVEYRKRLHDGWDSAYAAFASPAVGSVVHAFDAILGSQVPVLFLMYPSICSSCKAASINKKSTMHSSFTWRSRQIQTSTV

SEQ ID NO: 89431 - DNA, 999 bp, Candida albicans SC5314
  CDS (1)..(999): transl_table=12
atgaaagagccttccatcactactacctttgttgaggttacagacaaacttcctacaaagcctccgtgcagggtgtttttcaagaatgagtatgagcagccctccggcagtttcaaattaagaggcatgggacacttggttggccagtctatagatgtggccagaaaacttggcaaatcgaacgtagcagttttttcgtcatctggtggtaatgcaggattagcagctgcttatgccagccagttttttggagtatcgtgcactgtggtgttgcctgaaagttcgaagccaactgttatagaaaagttgaaatccttgggtgcagatgtcattattcatgggaaacattggggagaggccgataactatttaactgattttgttattaaaaatcttgacaaaacagtctatccggtctattgtcacccttttgatgacccattgttgtgggagggtcatagtaagatcatcacggaaatcatcgatcaaaagcaattacccaactttgataaagttaagggggtcatttgttcggtaggagggggtggcttatacaacggaatagttgaaggtttggaaaatcataaggagataccagtgttggcaattgaaactaaacaagcggccacgtttcacgaggcggtcaaagaaggtaaagttgttcatttacaaaaagtgcaaactttggccacttctttggcttcgccgtacctttcttccaaggcattagcaaactatattgagcgtcctacagttcttgctgaaattgatgacttggacgctgttaaaggtgttgttgatgtatacgaccatttcggatatatggttgagcctgcatgtggtgcatccgttgcatcagtgatgcacaggcaagatttattgaataaatttggtacattaagtccagatgatattatcattgttgtcatatgtggtggatcggctatcaacaagtatattatagacgaatatagaagtttattagaaaaagactcttga

SEQ ID NO: 89432 - protein, 332 aa, Candida albicans SC5314
MKEPSITTTFVEVTDKLPTKPPCRVFFKNEYEQPSGSFKLRGMGHLVGQSIDVARKLGKSNVAVFSSSGGNAGLAAAYASQFFGVSCTVVLPESSKPTVIEKLKSLGADVIIHGKHWGEADNYLTDFVIKNLDKTVYPVYCHPFDDPLLWEGHSKIITEIIDQKQLPNFDKVKGVICSVGGGGLYNGIVEGLENHKEIPVLAIETKQAATFHEAVKEGKVVHLQKVQTLATSLASPYLSSKALANYIERPTVLAEIDDLDAVKGVVDVYDHFGYMVEPACGASVASVMHRQDLLNKFGTLSPDDIIIVVICGGSAINKYIIDEYRSLLEKDS

SEQ ID NO: 89433 - DNA, 1062 bp, Candida albicans SC5314
  CDS (1)..(1062): transl_table=12
atgtcgacttcaatggatttgcagccatacacaaaattgtcacagccatatattcaaacttcattgactgaagtaacaaacatattacctacaaaaccaccgtgtcgtatttttttcaaaaatgaattggaacaaccatcggggagttttaaattaagaggaattggtcatttagtacataaatcaatagaaaatgcccttaaaaaccatctgaacaaaactattcatgtgtttgcttctagtggtggtaatgctggcttagcagctgcttatctggctcaattttataaagttaaatgtacagttgtattaccaataatttcaaagccagtggtgcaagaaaaattaaaatcttatggtgccagaattgttttgtttgggaatactattaacgaagctgatcaacatttgaaaaatttaatgagttcgattgatttagattcaatttatccagtttattgtcatccttttaataatccattgatttggaatggtcattcctcgttagtcgatgaagtgagtcaacaattggattctaaagatagaaaattgttaaagggaatggtttgttcctttggtggtggcggattatataatggtatctatcaaggtatggttaaaaatcaaattagaggggatattttacttattgaaacacttcaggcaccaacattgactcaatctttagaggctgatgaagtcatcactttgaaatctgtcaattcacttgcaacttcattggcttgttcatacaccactgaacaatcattgaaatactataaagatcaaagtttggttaaatctcaagtggaactcatcgacgatatagattcattaagagcatgtgttgcttttgaaaaatgttttggtaaagttgttgagccagcttgtggagcagcaatggcagttgtttataacaaaattgacttgttgtacaagaattttaaacatttgcaaccagaagatattgttgttattgttgtatgtggcggttcatgtactacagggtctgatcttaaagggtttgaaaaaatgatacagaaatcagaaattaaattatag

SEQ ID NO: 89434 - protein, 353 aa, Candida albicans SC5314
MSTSMDLQPYTKLSQPYIQTSLTEVTNILPTKPPCRIFFKNELEQPSGSFKLRGIGHLVHKSIENALKNHSNKTIHVFASSGGNAGLAAAYSAQFYKVKCTVVLPIISKPVVQEKLKSYGARIVLFGNTINEADQHLKNLMSSIDLDSIYPVYCHPFNNPLIWNGHSSLVDEVSQQLDSKDRKLLKGMVCSFGGGGLYNGIYQGMVKNQIRGDILLIETLQAPTLTQSLEADEVITLKSVNSLATSLACSYTTEQSLKYYKDQSLVKSQVELIDDIDSLRACVAFEKCFGKVVEPACGAAMAVVYNKIDLLYKNFKHLQPEDIVVIVVCGGSCTTGSDLKGFEKMIQKSEIKL

SEQ ID NO: 89435 - DNA, 1269 bp, Listeria monocytogenes str. 4b F2365; identical to SEQ ID NO: 12471
  CDS (1)..(1269): transl_table=11

SEQ ID NO: 89436 - protein, 422 aa, Listeria monocytogenes str. 4b F2365; identical to SEQ ID NO: 12472

SEQ ID NO: 89437 - DNA, 969 bp, Pseudomonas fluorescens Pf-5
  CDS (1)..(969): transl_table=11
atgactcagctgattgatttcaaatccatcgttgcagcagcgcagcggatagatggatcggtagttcgtacgccgacggtggaaagttcaatgctggcaggcatggttgaacgacctgtctttctcaagcttgaaaacctgcaggccggtggttcattcaaggcccgcggggtactcaacaagttctcggcgttgcaggagggcctgagcgatagccacttcgtcgccgtcagtgggggtaacttcggcattgccatcggcgaggcggccaagcgcttcggcgccagggtgacggtgatcatgcccgagagcgcgccgtcttcgtcggtcgagcgcattcgcgcctccggcagtacggtcattgtcgaagcggatgtgcatgctgcctttgctcgggccaagaccctggaggcagagggctatgtggtgatcgacgattgcgccgacacgctgattgccgaggggcatggaacactggcccttgagttcattgccgactgcccatccctgaccgacgtgtttgtcgcggtcggcggcggggcgatgctggcgggggtggccacggccttgaaggcgatcaagcccgggatccgggtctggggcgtagagaccgccggcgcacactccatgagccaggccttgcaggcgggcaggccggtggatatcgacgtcagttcgatcgtctccacccttggcgttccgatcatcgacgagctgatgtttgcccacgctcgccactatgtcgaagacatggttgtggtccctgacgaagaggcgatcaagggcatgctgtcctttgcgcaaggggcaaggcaatgggttgagctggcttctggcgcgcttgtgcccgcggtcattgccaccgcgcccaggctgcctgccgacgcggttattggccttgtcgtctgtggtgggaacatatcccttcaagacatgacgaaatgggctgcctatgcgggaatttcctga

SEQ ID NO: 89438 - protein, 322 aa, Pseudomonas fluorescens Pf-5
MTQLIDFKSIVAAAQRIDGSVVRTPTVESSMLAGMVERPVFLKLENLQAGGSFKARGVLNKFSALQEGLSDSHFVAVSGGNFGIAIGEAAKRFGARVTVIMPESAPSSSVERIRASGSTVIVEADVHAAFARAKTLEAEGYVVIDDCADTLIAEGHGTLALEFIADCPSLTDVFVAVGGGAMLAGVATALKAIKPGIRVWGVETAGAHSMSQALQAGRPVDIDVSSIVSTLGVPIIDELMFAHARHYVEDMVVVPDEEAIKGMLSFAQGARQWVELASGALVPAVIATAPRLPADAVIGLVVCGGNISLQDMTKWAAYAGIS

SEQ ID NO: 89439 - DNA, 918 bp, Pseudomonas fluorescens PfO-1
  CDS (1)..(918): transl_table=11
atgttgcacatccgcacgccgctgatcctccatccgaccctgtcgactgcgtcccggcgcatgtggctgaagctggaaaacctgcaaccctgtggctcgttcaagctgcgcgggatgggcttgttgtgcagtcaggcagcggcgcagggcaagcgcaaggtcgtatgcccgtccggcggcaatgccgggctggccacggcggtggcagcggtcagcctgggtttgcaagcctgcatcgtggtgccgcacaccacgcctgaagcgacccgcgcgcgtattcgccgcaccggcgcggacgtcatcgtccacggcaaagtctgggacgaggccaatcagcgagcgcgagaactggccagcgcggcggacaccgaatacgtgccggccttcgatcacccggtgttgtgggaagggcacagctcgatggtcgacgaaatcctcgacgactgcccgcaggtcgataccgtggtcacgtcggtcggcggcggtggtttgctggcgggcatcctcaccgggctgctgcgccatgaccgccgagactgccgcatcatcacctgcgaaaccacaggcgccgcctcgttcgctgcggccgtccaggctggccatccggtgcgcctgagtcggatcgacagtgtcgccacctccctcggcgccgcccaggtggcggcttggccggtagagcatatcggcgagttcgatcatgagtgtctggtgctgtcagatgacgacgcgatcatgggcgtggtgcgttatgccagtgatctgcggcaattggtggagcctgcgtgcggggtttcgctggcggtggcgtacctcgatcatccggcgttggcgggggcgaatgatgtggtggtcattgtttgcggcggggtgagtatcagtgcgcaactggtggcggggtgggcgcggttgggatcttga

SEQ ID NO: 89440 - protein, 305 aa, Pseudomonas fluorescens PfO-1
MLHIRTPLILHPTLSTASRRMWLKLENLQPCGSFKLRGMGLLCSQAAAQGKRKVVCPSGGNAGLATAVAAVSLGLQACIVVPHTTPEATRARIRRTGADVIVHGKVWDEANQRARELASAADTEYVPAFDHPVLWEGHSSMVDEILDDCPQVDTVVTSVGGGGLLAGILTGLLRHDRRDCRIITCETTGAASFAAAVQAGHPVRLSRIDSVATSLGAAQVAAWPVEHIGEFDHECLVLSDDDAIMGVVRYASDLRQLVEPACGVSLAVAYLDHPALAGANDVVVIVCGGVSISAQLVAGWARLGS

SEQ ID NO: 89441 - DNA, 921 bp, Burkholderia sp. 383
  CDS (1)..(921): transl_table=11
atgccgcttcatatcccgaccccttatatccgctcgcaaattgcgtcccgccggctcggcaggaccatccggctgaagctcgatgcgctgcagccgtcgggctcgttcaagctgcgcggcatcggcgccgtttgtgaagcgcggcatgcggccggcgcgcggcgcttcgtgtcgtcgtcgggcggcaatgcgggcatcgcggtcgcgtattgcggccgcgaactcggcgtgccggtgctcgtcgtcgtgccggagagcgcgtcggcccgcgcccgcgagctgatccgcgtcgagggcgcggaggtggtcgtgcacggcgcgagctgggccgaggcgaacgcgtacgcgcagtcggcactcggcgagcacgatgcgttcgtgcatccgttcgacgaccgtgtgctgtggcagggccacgcgacgatgatcgacgagatggcggcggccggcccgaagcccggcgcggtcgtgctcgcggtcggcggcggcgggctgctgtgcggcgtgctcgaagggctggcgcgcaacggctggcacgacgtgccggtagtcgccgccgaaacggagggcgccgactgctatgcgcgctcgctggcgcaggggcgtgtggtcgagttgtcggcgatcacgagcatcgcgacgtcgctcggcgcgaagcggccatgcgatgcggcggtcgaatgggccgcgcgacacgagatccatccggtcgtcgtgtccgatgccgacgcggtggccgcgtcgctgcgcttcctcgatgaacaccggatcgttgtcgagcccgcatgcggtgctgcgctggccgcactcgagcgaccggtgcccgtgcttgcatcggcgacggatatcgccgtgatcgtctgcggcggcgtgacggcaaccgtcgagcagatgcagacgttgcgcgcgacgttgcggtag

SEQ ID NO: 89442 - protein, 306 aa, Burkholderia sp. 383
MPLHIPTPYIRSQIASRRLGRTIRLKLDALQPSGSFKLRGIGAVCEARHAAGARRFVSSSGGNAGIAVAYCGRELGVPVLVVVPESASARARELIRVEGAEVVVHGASWAEANAYAQSALGEHDAFVHPFDDRVLWQGHATMIDEMAAAGPKPGAVVLAVGGGGLLCGVLEGLARNGWHDVPVVAAETEGADCYARSLAQGRVVELSAITSIATSLGAKRPCDAAVEWAARHEIHPVVVSDADAVAASLRFLDEHRIVVEPACGAALAALERPVPVLASATDIAVIVCGGVTATVEQMQTLRATLR

SEQ ID NO: 89443 - DNA, 921 bp, Myxococcus xanthus DK 1622
  CDS (1)..(921): transl_table=11
atgccactccatatccagacgccctacatccgttcgcaagttgcatcccgccggctcggcaaagacgtcctgttcaagctcgaggcgatgcagccgtccggctcgttcaagctgcgcggcgtcggtgcggtatgtgacgcgcggcgggcggcaggcagccgtcgcttcgtgtcgtcgtcgggtggcaatgcgggcattgcggtcgcctatgcggggcgcgaactcggcgtgccggtactcgtcgttgttccggagagcacgtccgcgcgcgcacgcgacctgatccgcctcgaaggcgcggagttgatcgtccacggcgcgtcttgggcagaggcgaacatgtttgcgcaatccgtgctcagccctcatgacgcgttcgtgcatccattcgacgagccagagctgtggcaggggcattcaacgatgatcgacgagatggcggcagccggaccgaagcccgacgcagtcgtgctggcagttggcggcggcgggttgctgtgcggcgttctcgaagggctggctcgcaacggctggggcgatgtgccggttgtcgcggccgagacccaaggcgcagactgctatgcgcgctcgattgcgcaggggcggccagtcgaattgcctgcgattacgagtgtcgccacgtcgctcggcgcgaagcggccttgcgacgcggcggttgagtgggcgacacgccatacggtcgagaacatcgttgtgtccgatgcggcagcagtggccgcctcactgcggtttctcgacgaacaccggattctggtggagcccgcgtgcggggccgcactggccgcgctcgacgcggcatcgacggtgcttgccgccgcgtcacgcatcgcggtgatcgtctgcggtggcgtcacggcgacggttgagtatctgcaggcattgagcagccgggagcgatga

SEQ ID NO: 89444 - protein, 306 aa, Myxococcus xanthus DK 1622
MPLHIQTPYIRSQVASRRLGKDVLFKLEAMQPSGSFKLRGVGAVCDARRAAGSRRFVSSSGGNAGIAVAYAGRELGVPVLVVVPESTSARARDLIRLEGAELIVHGASWAEANMFAQSVLSPHDAFVHPFDEPELWQGHSTMIDEMAAAGPKPDAVVLAVGGGGLLCGVLEGLARNGWGDVPVVAAETQGADCYARSIAQGRPVELPAITSVATSLGAKRPCDAAVEWATRHTVENIVVSDAAAVAASLRFLDEHRILVEPACGAALAALDAASTVLAAASRIAVIVCGGVTATVEYLQALSSRER

SEQ ID NO: 89445 - DNA, 942 bp, Rhizobium leguminosarum bv. viciae 3841
  CDS (1)..(942): transl_table=11
atggttcccatgcctttcgcgcctctccacctcgacacgcccttgctccagacggcacctggctacagcgccagcggcaagccgctctggctgaagcttgatgcgctgcagccttccggcagcttcaagctgcgcggcgttggccggctttgccagcacgaggtggaaaatggggcgcgcgaaatcttctgcgcttccggcggcaatgccggcattgcggccgcttatgccggccgggcactcggggtgccggtcacgatcgtcgtgccggatacgacggcggccgacgtacgccagacgattgccgcaacgggcgcgaatgtcctcgttcatggttcggtttttgatgaggccaatgcccatgcggtcgagctcgcccggagccgcaaggcaacctatgtgcaccccttcgaccatccgcttctgtgggatggccatgccacgctgattgacgaggtggtggcgaaaggggcaaaattcgattgcgtggtcaccagcgtcggcggcggcgggctgcttgccggcatcgtcgaggggttgaagcgcaacgggctttccgatgtgcctgttatcgccgtcgaaacggaaggggcagcttcgctccatgccagcctcaaggcgaatgagcgtatcacccttcccgccattacctcgattgccaattcgctcggggcgcggcaggtggcgcagcatgtcttcgacctgccgcagcagcatccgatcgaaagtgttgtcgtcagcgacgccgatgccgttgccgcctgcctgaaatttgccgatgcgcagcgcattctggtcgagccggcttgcggcgcggcccttgcggttgccgatgtgcatgccggtctgcttcagcgcttcgacaatccgcttatcgaagtctgcggcggcatcggcgtgtcgctcgaaaaactcagggcctggaaagaaaagtttctttga

SEQ ID NO: 89446 - protein, 313 aa, Rhizobium leguminosarum bv. viciae 3841
MVPMPFAPLHLDTPLLQTAPGYSASGKPLWLKLDALQPSGSFKLRGVGRLCQHEVENGAREIFCASGGNAGIAAAYAGRALGVPVTIVVPDTTAADVRQTIAATGANVLVHGSVFDEANAHAVELARSRKATYVHPFDHPLLWDGHATLIDEVVAKGAKFDCVVTSVGGGGLLAGIVEGLKRNGLSDVPVIAVETEGAASLHASLKANERITLPAITSIANSLGARQVAQHVFDLPQQHPIESVVVSDADAVAACLKFADAQRILVEPACGAALAVADVHAGLLQRFDNPLIEVCGGIGVSLEKLRAWKEKFL

SEQ ID NO: 89447 - DNA, 1266 bp, Leuconostoc mesenteroides subsp. mesenteroides ATCC 8293
  CDS (1)..(1266): transl_table=11
atgacgactgagggaaagctaacggctgaagaaatagatgaggcgcatcgagtcttgtcaaaggtagtaacgcatacgccattggcatatgatgactatctatcaaaaaaatatagagctaatgtgtatcttaaacgagaagatatgcaacgggttcgttcgttcaaaattcgtggtgcctactacaatatcattaaggcagagaaagaaaaactcaataatggggttgttgctgcttcagctggaaaccacgcgcaaggcgtagccgatacatgtcataatttaaagatacaagcaactatttttatgccagtcattacaccaaatcaaaaagtagaagcggttaaacgttttggtggtcaatatgttacggtaatcctagtcggtgatacctttgacgaagcacaaagtgcagcgtttgaatacactgaaaaacataatatgttctttgtagcaccatttgatgatcggcgtaccatggctgggcaaggcacggtggcggttgaggtatttgaagatgctgtagagcaaaatattaatgttgattatttgattgcttctgttggtggtggcggtttaatcggtggtctgtcgacctattctaaaaaggtatcaccacaaaccacagtagtaggtgtcgaaccagaaacggcacagtcaatgaaagcggcttttcaagctcaaaaacctaccaccgtcgagaatatcgatcactttgttgatggtgctgccgttgcgcgtgtcagtcagtttacctataatcaagcacagcagtatgttgacaaactgctggctatccctgaaggaaaggttgctcaagcagtattagacttgtacacttatgaggcgatagttgccgaaccagctggagcgatgcctatcgctagtttggattttatggccagtgatatcgtagggaaaaacgtcgttctagttgtttctggtggaaacaatgatatcggccgtatgcaagaaatggaacaaaaggcattaatgtataagggtcgccaacagttttacttagttgagtttccgcaacgacccggggcattacggcaatttgtaaatgatgttttaggaccaaacgacgatattactcgttttgaatatactaaaaaaataaactctgaaacaggctctgtcatggttggtattctgctggatcctgttacgaaagtagatgacttaacagcccgtttagcagctttttttccaaaatatatcaatttgcaagaaaatactgtgcttttcaatatgttagtttag

SEQ ID NO: 89448 - protein, 421 aa, Leuconostoc mesenteroides subsp. mesenteroides ATCC 8293
MTTEGKLTAEEIDEAHRVLSKVVTHTPLAYDDYLSKKYRANVYLKREDMQRVRSFKIRGAYYNIIKAEKEKLNNGVVAASAGNHAQGVADTCHNLKIQATIFMPVITPNQKVEAVKRFGGQYVTVILVGDTFDEAQSAAFEYTEKHNMFFVAPFDDRRTMAGQGTVAVEVFEDAVEQNINVDYLIASVGGGGLIGGLSTYSKKVSPQTTVVGVEPETAQSMKAAFQAQKPTTVENIDHFVDGAAVARVSQFTYNQAQQYVDKLLAIPEGKVAQAVLDLYTYEAIVAEPAGAMPIASLDFMASDIVGKNVVLVVSGGNNDIGRMQEMEQKALMYKGRQQFYLVEFPQRPGALRQFVNDVLGPNDDITRFEYTKKINSETGSVMVGILLDPVTKVDDLTARLAAFFPKYINLQENTVLFNMLV

SEQ ID NO: 89449 - DNA, 921 bp, Burkholderia vietnamiensis G4
  CDS (1)..(921): transl_table=11
atgccgctccatattcagacgccgtacctccgctcgcacaccgcctcccgccggctcggcgccgacgtctggttgaagctcgatgcgcttcagccatccggttcgttcaaattgcgcgggatcggcgcggtgtgcgcggcgcgacaggcggccggcgcgcgtcgcttcgtgtcgtcgtcgggcggcaatgcgggcatcgcggtcgcgtattgcgggcgcgaactcggcgtgccggtgctggtggtggtgcccgagaccgcgtccgtgcgcgcacgcgaactgattcgcggcgaaggggccgaggtcatcgtgcatggcgcgagctgggtcgaggccaacgcgttcgcgctggcggccgtcggcgagcacgacgcgttcgtgcacccgttcgacgatccggtgttgtggggcggccacgcgacgatcgtcgacgagatcgcggtcgccggcccgaaacccgacgcgatcgtgctcgcggtcggtggcggcgggctgctgtgcggcgtgctggaggggctctcgcgcaacggctggcacgacgtgccggtcgtcgcggtggagacggcgggcgccgactgctatgcgcgctcggtcgcgcagcggcgtccggtggaactgccggcgatcgagagcatcgcgacgtcgctcggcgcgaagcggccgtgcgacgcggcgctcgagtgggcgagccggcatccgattcatccggtcgtcgtatcggatgcgcaggcggtggccgcctcgttgcggctggtggacgagcaccggctcgtcgtcgagcccgcgtgcggcgccgcgctggctgcgctcgaacggccggtgccggtgctggccgcggcgtcgaacatcgcggtgatcgtctgcggcggcgtgacggcgaccatcgagcaactgcagtcgtggagcgctacgttgcggtga

SEQ ID NO: 89450 - protein, 306 aa, Burkholderia vietnamiensis G4
MPLHIQTPYLRSHTASRRLGADVWLKLDALQPSGSFKLRGIGAVCAARQAAGARRFVSSSGGNAGIAVAYCGRELGVPVLVVVPETASVRARELIRGEGAEVIVHGASWVEANAFALAAVGEHDAFVHPFDDPVLWGGHATIVDEIAVAGPKPDAIVLAVGGGGLLCGVLEGLSRNGWHDVPVVAVETAGADCYARSVAQRRPVELPAIESIATSLGAKRPCDAALEWASRHPIHPVVVSDAQAVAASLRLVDEHRLVVEPACGAALAALERPVPVLAAASNIAVIVCGGVTATIEQLQSWSATLR

SEQ ID NO: 89451 - DNA, 918 bp, Pseudomonas putida GB-1
  CDS (1)..(918): transl_table=11
atgaccttgcatatccacaccccactgatcgaatcccgctcgctgtcgttggtcgcgggccgaaacgtctggctcaagctcgacgctctgcaaccttgcggctcgttcaagctgcgtggggtgggccacgcctgcgaagtgcatcaagcccgtggcgcccggcagttcatctcttcctcgggcggcaacgccggcctggcggtggcctatgcgggccgcaagctgggtgtgccggtgaccgtggtcgtccccgagaccactaccgagcgggccaaggagttgctgcgcctggaagacgccaacgtggtggtgcatggcagttcctggcaggaggcgaacgcactggcgcagaccttggtagggccgaatgatgcgtttatccacccgtttgacgacccgctgctgtgggccgggcatgccagcctgatcgatgaagtcgccgaagccggcgtgaaaccggacgccgtggtgctgtcggtaggcggtggcgggttgctcagcggcgtggtggaggggctgcagcgcaatggctggggtgatgtaccggtgctggcggtggaaaccaacggcgccgcgtcgctgcacgcggcccttcaggcggggcattcagttgagctggagcgcatcgcctcggtggcgacctcgctgggggcaaagcgggtcgccgatcgggcgctagcctgcgcacagcaacacccggtacacagccacctggtcaccgatcgtgcggcattggaggcctgtgagcgattcctgctggaccatcgcctgctggtggaacccgcctgtggcgcagcattggcattagcgtatgcgccgggcgccctggcgcaataccagaatgtgctggtggtggtgtgtggcggcgctacggcaacgcttgagcaaattcaggcgtggttgcagcaggcagattga

SEQ ID NO: 89452 - protein, 305 aa, Pseudomonas putida GB-1
MTLHIHTPLIESRSLSLVAGRNVWLKLDALQPCGSFKLRGVGHACEVHQARGARQFISSSGGNAGLAVAYAGRKLGVPVTVVVPETTTERAKELLRLEDANVVVHGSSWQEANALAQTLVGPNDAFIHPFDDPLLWAGHASLIDEVAEAGVKPDAVVLSVGGGGLLSGVVEGLQRNGWGDVPVLAVETNGAASLHAALQAGHSVELERIASVATSLGAKRVADRALACAQQHPVHSHLVTDRAALEACERFLLDHRLLVEPACGAALALAYAPGALAQYQNVLVVVCGGATATLEQIQAWLQQAD

SEQ ID NO: 89453 - DNA, 1821 bp, Solanum lycopersicum
  CDS (1)..(1821)
atggaggttcttcggtttaccgccgtgaaatcattgaattcatgcgtccgtccagaattcacggcgatgagttccgtcattgttcctattagcactgtgaaagtttctggaacgaggaaaagcaaaaagaaggcgcttatttgtgctaaggcgacggagatcttgtcatcgccagctacggtaacggaaccgttgaaggcggagccggcagaggcaccggttccgttgctacgagtttctccgagctcgttgcagtgtgagccgggatatttgttaccgaatagtccggttttaggtacgggtggtgtgaccgggtatgagtatctgacgaacatcttgtcatcgaaagtttatgatgtagcttatgagacgcctttgcagaaagctcctaagctgtcagaaagattgggagttaatgtatggctaaaaagagaggatcttcagccggtgttttcgttcaaaatcagaggagcttacaatatgatggcaaaactcccgaaagagcagttggaaaaaggggttatatgctcatcagcaggaaaccatgcacaaggtgttgcattatctgctcagagacttggctgcgatgctgtgattgttatgcctgttactacaccagacatcaaatggaaatcagttaagagattgggtgctactgttgttcttgttggggactcatatgatgaagctcaagcatatgccaaaaagcgggctgaatctgaaggccgcacattcatccctccttttgatcacccagatgtcattgtaggtcagggtacagtagggatggagataaatcgccaactcaaagataacattcatgcaatctttgtgcctgttggaggaggggggcttatagctggtattgctgcttatttgaaaagggttgccccagatataaagattattggagttgaaccacttgatgctaatgcattggcattatcattacatcatggtcagagagtaatgctggaccaagttgggggttttgcagatggtgtagctgttaaagtggttggtgaagagacttatcgtctgtgcgaggaattaatagatggcgttgtcctagttggtcgtgatgctatatgtgcatctataaaggacatgtttgaagagaaaaggagcatactagagccggcaggtgcacttgctcttgctggagccgaggcatactgcaagtattatggcctcaagggtgaaaacgtagtagcaataactagtggagccaacatgaactttgacaggcttagattggtaacagaactcgcagatgttggtagacagcgggaagctgttcttgctacttttatgccagaagacccaggaagcttcaaaaagttcgctgaaatggtaggaccaatgaatatcactgaattcaagtacagatacaactctgataaagaaagagctcttgtactttacagtgttggacttcacacaatattagaacttgaaggaatggtggagaggatggaatcagcagatctgcaaaccattaatcttacagacaatgacttggtcaaagatcatcttaggcatttgatgggtggtagaacaaatgttcataatgagcttttgtgtcgattcacttttcctgagaagcctggtgctttgatgaagtttttagatgctttcagcccacgttggaatataagtttgtttcattatcgtgcacagggagatactggtgcaaatgtgctagtcgggatccaagttccaccggatgaggtagttgagtttgagggacgggcagacagtcttggttatgaatatgcaatggagagtctcaatgaggcataccagctcataatgcattga

SEQ ID NO: 89454 - protein, 606 aa, Solanum lycopersicum; identical to SEQ ID NO: 12642

SEQ ID NO: 89455 - DNA, 999 bp, Aplysia californica
  CDS (1)..(999)
atggattccaaaccagattattgcgccactgacaacaaagagaaattgtacatggagactccagtgatgtacagctttcctttgtccaaacatgctggctttaaagtgtatctgaagctggataatttacagccctcaggctcatttaaaatcagaggcatttcaaacatgatacaaaaaggtatagatcgtggagacagtgagcatgtgtattgtgcatcaggtggcaatgcaggaatggctgctgcgcatgcgtctaagcagttgggtattccatgcaccattgttgtaccccagacaacgccagagtttgtaaatgagaggctgaggaatttgggagcggaggtaaaggttcatggcagtgtttatgatgaagcaaaaaaactggctgttgaactgggcagtcagccaagatgcatgctaattccagcctttgagcaccctgatatttgggaaggtcatgcatccttgataaatgagtcatcacgccagatgtccgaacgtccagaccttgtcatcacttgtgtcggtggaggtggactcctgaacggcatcgtgcagggcatgagagatgtgggctgggacgaggttcctgtgcttgcaatggaaactcatggagcaaactgctttaatgctgccattgctgctggtgaggcagtcttcattcctgccattacaagcatagccaagtctttaggcagtctgattgtgtctcctcaaactctagagtactacaaacaagcccgtccacggatcctgaatgaaatggtgtctgataatcaagtgattgatgcctgcgtccggttctcagatgaccaccgtttcctggtagaacccgcctgtggggctagcctggctgctgtctatagtaatgtagtgaaacagctccaagacagtggaaagttgggcacggtcaagtctgtcctggttgtcgtgtgcggagggagcattgtctcaacagctgttatggagaagtggaaggcagactttggcatatga

SEQ ID NO: 89456 - protein, 332 aa, Aplysia californica
MDSKPDYCATDNKEKLYMETPVMYSFPLSKHAGFKVYLKLDNLQPSGSFKIRGISNMIQKGIDRGDSEHVYCASGGNAGMAAAHASKQLGIPCTIVVPQTTPEFVNERLRNLGAEVKVHGSVYDEAKKLAVELGSQPRCMLIPAFEHPDIWEGHASLINESSRQMSERPDLVITCVGGGGLLNGIVQGMRDVGWDEVPVLAMETHGANCFNAAIAAGEAVFIPAITSIAKSLGSLIVSPQTLEYYKQARPRILNEMVSDNQVIDACVRFSDDHRFLVEPACGASLAAVYSNVVKQLQDSGKLGTVKSVLVVVCGGSIVSTAVMEKWKADFGI

SEQ ID NO: 89457 - DNA, 1335 bp, Aspergillus niger
  CDS (1)..(1335)
atgggcagcatcctccccccaaccaaccccccaacctacaaaaccccctggaccccaacccccctcatcgaatccacgaccctctcccgcgccgcaggatgtagaatcttcctgaaactcgagaacatccagcccagcggctccttcaagtcccgcgccatgggcaatcaaatcctctctcacctcctcaaacccgagaactaccaccgtcccgtgcacttttacgcctcctccggcggcaatgccggcttagctgccgtctgtgccgcccggagcctgggatacccctgcacagtggtggtgcctgtgtcgacgaagccgctgatggtgcagaagctgcgcaatgcgggtgcagcggatgtgattcagtacggggagacgttctcggaggcgggacagtatatgaaggatgttgtgatgaataataaggacaacaatgatgcagaaagtgatgatgatgttgtgaagattgccctacatccatttgacaatgagcctatctggcaagggaacagcactatcattgatgaattggtggaccaggtcccgccgcctgtcggggaggaagaggaaaaagttcatgccggtcgtgcgttgccggtcgatgctattgtttgtagtgtcggtggtggagggctgttgaatgggttggttatggggattgagaggcatagggctaaggctaaggttgccgatgatggtgcggcgaagcctgttcatcttgtggctgttgagaccaagggcacggattctctagctacagcgttggagagtaacgaactaatctcgttgccgaagatcacgtcgcaggctacgtcgttgggggctattaaggtctctgagagaacgtttcagtatgcggtgaagccgccgccgggcgtgaaggtgcacagtgcggtgttttcggatgcggaggccgcaaggggcgtgatgaggcttgtggatgatgagaggttgttggttgagttggcttgtggtgtttgtgtggaggctgcggttggggggtctagctgtgcttcttcatcatcttcttcttcgaagatggtggctgcgggtcagaagaggaagaggggcatggatgttgggtatgtgagtaaggatgaagggtatggagatgatcggctgtctgctggggagaatgaggatgatggtccggttccttcgctgtcgctgtcggcctctgctggggggatgcagtctaagttgaaggagttggtgccggacttgaatgcagacagtcgcgtcgttattattgtctgcggtggcagcaatgttactattgatatggcggcagaatggaggaagatgctggctgatgggtgggcatctgagtga

SEQ ID NO: 89458 - protein, 444 aa, Aspergillus niger
MGSILPPTNPPTYKTPWTPTPLIESTTLSRAAGCRIFLKLENIQPSGSFKSRAMGNQILSHLLKPENYHRPVHFYASSGGNAGLAAVCAARSLGYPCTVVVPVSTKPLMVQKLRNAGAADVIQYGETFSEAGQYMKDVVMNNKDNNDAESDDDVVKIALHPFDNEPIWQGNSTIIDELVDQVPPPVGEEEEKVHAGRALPVDAIVCSVGGGGLLNGLVMGIERHRAKAKVADDGAAKPVHLVAVETKGTDSLATALESNELISLPKITSQATSLGAIKVSERTFQYAVKPPPGVKVHSAVFSDAEAARGVMRLVDDERLLVELACGVCVEAAVGGSSCASSSSSSSKMVAAGQKRKRGMDVGYVSKDEGYGDDRLSAGENEDDGPVPSLSLSASAGGMQSKLKELVPDLNADSRVVIIVCGGSNVTIDMAAEWRKMLADGWASE

SEQ ID NO: 89459 - DNA, 1317 bp, Aspergillus oryzae
  CDS (1)..(1317)
atgggtagcatcgccttagaggaagcccaaccctccttcaagacaccatgggtgcaaacccctttggtggaatctgcctccctttctcgtgctgcaggatgtaggatattcctgaagctggagaacgtccagcccagcggttcattcaagtccagggccatgggcaatcagatcctgtcacacctcatcaagccagagaacgccaaccgacccgtccacttctttgcctcctcaggcgggaacgcaggcctagccgctgtctgcgcagcccgcagtctgggatatccctgcacagtggtcgtaccactatcaacgaagcccctgatggtgcagaagctacggatggcaggtgcagcggacgtaatccagcatggagacacgttccaagcagccggcgagtacatgcgagaagtgatcatgaagaacaaggacgagaacgagtgtgaaaacgtggcgaagattgctctacacccgtttgataacgagcccatctgggaaggaaacagcactctcattgacgaactggccacccagctccctcccccagccggtgaagatgaagaggccacccatcgtggccgcccgttacccgtggatgccatcatctgcagcgtgggcggcggcggcctcctgaacggtctagtcatgggcatcgaacgacaccgccagctccagaagatgagcctcagctatgcttccaaccctatctcccactcccagtcgaaccctatccacctcctcgccatcgaaaccttaggtaccgattcccttgctgccgctgtcgcgaagaaatccctcgtctccctccccaagatcacttcccaggctacttctctgggcgctatccgtgtctccgaacgtactttccaatatgctatctccccgccgcagggtattgctgtacacagtgcggtgctttcggacgcagatgcagcaaggggtgtgcttcgtcttgctgatgatcaccggacgcttgtcgaacttgcatgcggtgtatgcgttgaggctgcagttggtgacgcggcgagagctcggccatcgacatcctccgacgccctcacagctggaactaagaagcgcaagagagaagatgcggattacccttcccaccgggatgagggctacggcgatgatgggtcctcagcgaccgaaacggagtcggaagcaggcagtgaattccaatccaagctcaagcagcttgtgccagacctgaactccgatagtcgagtggtgatcattgtgtgtggtggaagtaatattacgattgatatggcggcagagtataaaaagctgcttaatgagggttggggaaactaa

SEQ ID NO: 89460 - protein, 438 aa, Aspergillus oryzae
MGSIALEEAQPSFKTPWVQTPLVESASLSRAAGCRIFLKLENVQPSGSFKSRAMGNQILSHLIKPENANRPVHFFASSGGNAGLAAVCAARSLGYPCTVVVPLSTKPLMVQKLRMAGAADVIQHGDTFQAAGEYMREVIMKNKDENECENVAKIALHPFDNEPIWEGNSTLIDELATQLPPPAGEDEEATHRGRPLPVDAIICSVGGGGLLNGLVMGIERHRQLQKMSLSYASNPISHSQSNPIHLLAIETLGTDSLAAAVAKKSLVSLPKITSQATSLGAIRVSERTFQYAISPPQGIAVHSAVLSDADAARGVLRLADDHRTLVELACGVCVEAAVGDAARARPSTSSDALTAGTKKRKREDADYPSHRDEGYGDDGSSATETESEAGSEFQSKLKQLVPDLNSDSRVVIIVCGGSNITIDMAAEYKKLLNEGWGN

SEQ ID NO: 89461 - DNA, 1278 bp, Cryptococcus neoformans
  CDS (1)..(1278)
atgtgcttgagagtatttagagcgatgcatattatacacattatacaacacgtagctttattttacccatcatccaacactatgacaattgccacacccgaattatacaaccataaggctatccctcaaccttggagggaaacaccacttgtccagagcgccgccctctctaggctcgctggatgccggatctttctcaagcttgataacctccagccaagcggctcattcaaatctcgaggtatcggcaacctcgtccgtcgatctatccagcgttccccccctaaagctcctctccacttttactcctcctctggcggcaacgccggtctcgcttgcgtcactgccgcctcctctctgggatatccctccaccgtcgtcgtacccatgaccaccacccctatgatgatctccaagctcttcactgccggcgcatccaaagtcatccaagaaggggcctccttgtaccaagccgacgcgtatctgaaagaacatatccttcctcaagatcagtggggggtgtacatcccgccctttgatcatgaagatatctggcaaggagcggagagtgtagcggaagaggtggttaggcaaatgggaggggagagaccggatggcattgtatgttctgttggtggaggagggttaatgatcgggatttgccaggggttggagaaagtgggcagcgctaaacgagagggggctgtgaacggaaaagggggtgaagaagtgtaccagacagaagtgatagcagtcgagacactaggcgcagactcgctcaaccaagcaatcaaagctcaacagctcatcacccttccttcaatcacttctatagccacctctcttggatgtgctcgcgtagcttcgcgggctcttgatatcgctctcggtttatccccatccctccctccgccaatttctctcccgccatctcctctgccctctccatcctcttccccagccgagacttcctcctcccttccagacccgaccataacctcggacaagtccaggatcccgatgaagaacagcaaagtcgttcccacccttgtgaccgacaaagaagccatccaagcttgcgtccaattcctagacgacgaacgtatcctcgtcgagcccgcttgtggcgctactctcgccctagtctacactggaagattacgagaggtgatgaaggggcgactcacagaggatagtaaggtggtcttagttgtttgtggagggtcgaatattagtttagaggtgctgcagaggtacaagatggagtatggattataa

SEQ ID NO: 89462 - protein, 425 aa, Cryptococcus neoformans
MCLRVFRAMHIIHIIQHVALFYPSSNTMTIATPELYNHKAIPQPWRETPLVQSAALSRLAGCRIFLKLDNLQPSGSFKSRGIGNLVRRSIQRSPPKAPLHFYSSSGGNAGLACVTAASSLGYPSTVVVPMTTTPMMISKLFTAGASKVIQEGASLYQADAYLKEHILPQDQWGVYIPPFDHEDIWQGAESVAEEVVRQMGGERPDGIVCSVGGGGLMIGICQGLEKVGSAKREGAVNGKGGEEVYQTEVIAVETLGADSLNQAIKAQQLITLPSITSIATSLGCARVASRALDIALGLSPSLPPPISLPPSPLPSPSSSPAETSSSLPDPTITSDKSRIPMKNSKVVPTLVTDKEAIQACVQFLDDERILVEPACGATLALVYTGRLREVMKGRLTEDSKVVLVVCGGSNISLEVLQRYKMEYGL

SEQ ID NO: 89463 - DNA, 996 bp, Cryptococcus neoformans
  CDS (1)..(996)
atggctgccgtcaactacacaatcgaagatccaaacactgtgccatggatcaagacccccctcgtgcgctcagctgcactttcaaagcttgccggctgtgaaatcttactcaagctggaaaatatccagccgagtgggtcgttcaaatctagagggataggtaatctggtccttcagtctgtcaactcagctccaccagacactccgcttcacttctactcttcctcaggaggcaatgctggtctcgcttgcgttaacgcagcatctactctgggctatccttcctctgttatcgtgcctctcagcaccaaaccttttatgattgataagcttcgtaccgctggcgctacagaagtcatccagactggccaaacatggtttgaggcagataagcaccttcaggaagagatacttgcaagagatccgaacggcatctacgtcccgccctttgatcactccgacatctggcaaggagcagctactatggtcgacgagattgtgcaagaattaacacacgtcccagatgcgatagtgtgctcagtaggaggaggaggactaatgattggtgtttgtaaaggactggagagactggataaggaaaagaaagcgaaagttgtggcggtcgaaactttaggggcagagtcactacacaagtcggtaaaggcgggacagttgatcactttgccgggtatcacatcacttgctacttcactaggtgcgacgaccgtcgctgccaaagcactagagtatgctctacagcctcaggttcgtagtacggtagtatcagataaggaagctttagaagcctgtatacggtttcttgatgacgaaagaatcttggttgagccagcctgcggcgcgactttggcaatggtgtattcaggaaagctcaaagatgtgctgaaactcgacgccaaaagcaaagtggtgctcgtggtttgtgggggatcaaatatctcattagaattgatagaaggctataaaaagatgttttga

SEQ ID NO: 89464 - protein, 331 aa, Cryptococcus neoformans
MAAVNYTIEDPNTVPWIKTPLVRSAALSKLAGCEILLKLENIQPSGSFKSRGIGNLVLQSVNSAPPDTPLHFYSSSGGNAGLACVNAASTLGYPSSVIVPLSTKPFMIDKLRTAGATEVIQTGQTWFEADKHLQEEILARDPNGIYVPPFDHSDIWQGAATMVDEIVQELTHVPDAIVCSVGGGGLMIGVCKGLERLDKEKKAKVVAVETLGAESLHKSVKAGQLITLPGITSLATSLGATTVAAKALEYALQPQVRSTVVSDKEALEACIRFLDDERILVEPACGATLAMVYSGKLKDVLKLDAKSKVVLVVCGGSNISLELIEGYKKMF

SEQ ID NO: 89465 - DNA, 1017 bp, Saccharomyces cerevisiae
  CDS (1)..(1017)
atggaaatgactcactatgaaaagacacctttgattcgtcaagtttttaacaatggtaagactaattcgtggttttacgttaagcatgagattttacaaccaggtggaagtttcaaatcgagaggaatcgggcatttgataaggaagagtaatcaacaaccactaagcgagggttctgggaagcttgctgtattttctagctctgggggaaatgctggtttagcagcagcaactgcctgcagatcgatggcacttaattgcagtgtagtggttcctaaaactacaaaacctagaatggtaaagaaaattcaaagtgcaggagccaaagtcattatccatggtgatcattggggggaagcagatgaatacttgaggcacaaattaatggcgcaagaaagccaacatggttcgaagacactatatgtgcacccgtttgataatgagacaatttgggaaggtcattctacgattgtggatgaaatcatagaacaattgaaggaaaatgatatatccttacctagggtgaaagctttagtttgtagtgttggtggtggtgggctatttagtggcataattaaaggcctagataggaatcaccttgctgaaaaaattccggtcgttgctgtagaaactgccggttgtgacgtattgaataagtctctcaaaaaaggtagtccagttactcttgaaaaattgacaagtgttgcaacttctttggcctccccatacatagcatcattcgcgtttgagagttttaacaagtatggatgtaagtctgtagttttatcagatcaagacgttctggcaacatgcttgagatatgccgatgactacaattttatagtggaaccagcctgtggagcatccttacatttatgttatcatccagagattcttgaagacattctggaacaaaaaatatatgaggatgatatcgttattataatcgcatgcggtggatcatgtatgacgtatgaagacttggtgaaagcgtcgagcacattaaacgtatcataa

SEQ ID NO: 89466 - protein, 338 aa, Saccharomyces cerevisiae
MEMTHYEKTPLIRQVFNNGKTNSWFYVKHEILQPGGSFKSRGIGHLIRKSNQQPLSEGSGKLAVFSSSGGNAGLAAATACRSMALNCSVVVPKTTKPRMVKKIQSAGAKVIIHGDHWGEADEYLRHKLMAQESQHGSKTLYVHPFDNETIWEGHSTIVDEIIEQLKENDISLPRVKALVCSVGGGGLFSGIIKGLDRNHLAEKIPVVAVETAGCDVLNKSLKKGSPVTLEKLTSVATSLASPYIASFAFESFNKYGCKSVVLSDQDVLATCLRYADDYNFIVEPACGASLHLCYHPEILEDILEQKIYEDDIVIIIACGGSCMTYEDLVKASSTLNVS

SEQ ID NO: 89467 - DNA, 999 bp, Brassica napus
  CDS (1)..(999)
atggaagcaaagaagaggcatgaatatgctgcggatttatcttccataaagaaagctcatgaacgtatcaagccgtacatacacaaaactccagtgctaacatctgaatccttgaattcaatctctggaagaagcttgttctttaagtgcgagtgctttcagaaaggtggagctttcaagtttcgtggagcatgcaatgctgtcttgtctcttgatgctgaacaagcagccaaaggggttgtaacacacagcagtggaaaccatgctgctgcgttgtctttggctgcgaagatgcaggggatccctgcgtatatcgttgtaccaaaaggtgctccgaagtgcaaagtagataatgtgatccggtatggtggtaaggttatatggagtgaagcaacaatgtcttctcgagaggaagtagcttccagagttttgcacgaaacaggttctgttctcatccacccatataatgatggacgcatcataagtggtcagggtactgttgcgttggaactgttggagcaaatccaagagattgacactataattgtgccgataagcggggggggtttgatctctggtgtggcgctggctgctaagtcaattaagccgagcatccggattatagcagctgaaccaaaaggagctgatgatgcggctcagtctaaggttgctggtagaatcatcactttacctgtggctaataccatagcggatggccttcgtgcttctctaggagacttaacatggcctgtagtgagagatatggtagatggtgttgtagttgtggaggatggggaaataattgaagccatgagaatgtgctatgagatgctgaaagtctctgtggaaccaagtggtgccattggcctagcagcagttttatcaactagtttccgtagcaatccttgttggaaagattgtaaaaacatagggattgtactcccaggaggtaatgtcgatttgggtgttctgtgggattcacttaagagttcagagtaa

SEQ ID NO: 89468 - protein, 332 aa, Brassica napus
MEAKKRHEYAADLSSIKKAHERIKPYIHKTPVLTSESLNSISGRSLFFKCECFQKGGAFKFRGACNAVLSLDAEQAAKGVVTHSSGNHAAALSLAAKMQGIPAYIVVPKGAPKCKVDNVIRYGGKVIWSEATMSSREEVASRVLHETGSVLIHPYNDGRIISGQGTVALELLEQIQEIDTIIVPISGGGLISGVALAAKSIKPSIRIIAAEPKGADDAAQSKVAGRIITLPVANTIADGLRASLGDLTWPVVRDMVDGVVVVEDGEIIEAMRMCYEMLKVSVEPSGAIGLAAVLSTSFRSNPCWKDCKNIGIVLPGGNVDLGVLWDSLKSSE

SEQ ID NO: 89469 - DNA, 1824 bp, Brassica napus; identical to SEQ ID NO: 12681
  CDS (1)..(1824)

SEQ ID NO: 89470 - protein, 607 aa, Brassica napus; identical to SEQ ID NO: 12682

SEQ ID NO: 89471 - DNA, 1812 bp, Zea mays; identical to SEQ ID NO: 12683
  CDS (1)..(1812)

SEQ ID NO: 89472 - protein, 603 aa, Zea mays; identical to SEQ ID NO: 12684

SEQ ID NO: 89473 - DNA, 1809 bp, Glycine max; identical to SEQ ID NO: 12685
  CDS (1)..(1809)

SEQ ID NO: 89474 - protein, 602 aa, Glycine max; identical to SEQ ID NO: 12686

SEQ ID NO: 89475 - DNA, 1815 bp, Zea mays; identical to SEQ ID NO: 12687
  CDS (1)..(1815)

SEQ ID NO: 89476 - protein, 604 aa, Zea mays; identical to SEQ ID NO: 12688

SEQ ID NO: 89477 - DNA, 26 bp, Artificial sequence
  primer
atgtcgatagtctacaataaaacacc

SEQ ID NO: 89478 - DNA, 28 bp, Artificial sequence
  primer
tcaagcactttttaaattcacaatattt

SEQ ID NO: 89479 - protein, 371 aa, Artificial sequence
  consensus sequence
  Variant (3)..(16): Xaa in position 3 to 16 is any amino acid
  Variant (17)..(24): Xaa in position 17 to 24 is any or no amino acid
  Variant (26)..(29): Xaa in position 26 to 29 is any amino acid
  Variant (31)..(33): Xaa in position 31 to 33 is any amino acid
  Variant (37)..(37): Xaa in position 37 is any amino acid
  Variant (40)..(58): Xaa in position 40 to 58 is any amino acid
  Variant (59)..(72): Xaa in position 59 to 72 is any or no amino acid
  Variant (74)..(74): Xaa in position 74 is any amino acid
  Variant (77)..(81): Xaa in position 77 to 81 is any amino acid
  Variant (83)..(96): Xaa in position 83 to 96 is any amino acid
  Variant (98)..(111): Xaa in position 98 to 111 is any amino acid
  Variant (113)..(113): Xaa in position 113 is any amino acid
  Variant (114)..(117): Xaa in position 114 to 117 is any or no amino acid
  Variant (119)..(121): Xaa in position 119 to 121 is any amino acid
  Variant (123)..(127): Xaa in position 123 to 127 is any amino acid
  Variant (129)..(144): Xaa in position 129 to 144 is any amino acid
  Variant (145)..(157): Xaa in position 145 to 157 is any or no amino acid
  Variant (161)..(166): Xaa in position 161 to 166 is any amino acid
  Variant (168)..(173): Xaa in position 168 to 173 is any amino acid
  Variant (175)..(188): Xaa in position 175 to 188 is any amino acid
  Variant (189)..(204): Xaa in position 189 to 204 is any or no amino acid
  Variant (211)..(212): Xaa in position 211 to 212 is any amino acid
  Variant (214)..(228): Xaa in position 214 to 228 is any amino acid
  Variant (229)..(249): Xaa in position 229 to 249 is any or no amino acid
  Variant (251)..(321): Xaa in position 251 to 321 is any amino acid
  Variant (322)..(368): Xaa in position 322 to 368 is any or no amino acid
  Variant (370)..(370): Xaa in position 370 is any amino acid
TPXXXXXXXXXXXXXXXXXXXXXXKXXXXQXXXSFKXRGXXXXXXXXXXXXXXXXXXXXXXXXXXXXXXXXXSXGNXXXXXAXXXXXXXXXXXXXXPXXXXXXXXXXXXXXGXXXXXVXXXGXXXXXAXXXXXXXXXXXXXXXXXXXXXXXXXXXXXPFDXXXXXXGXXXXXXEXXXXXXXXXXXXXXXXXXXXXXXXXXXXXXVGGGGLXXGXXXXXXXXXXXXXXXXXXXXXXXXXXXXXXXXXXXXEXXXXXXXXXXXXXXXXXXXXXXXXXXXXXXXXXXXXXXXXXXXXXXXXXXXXXXXXXXXXXXXXXXXXXXXXXXXXXXXXXXXXXXXXXXXXXXXXXXXXXXXXXXXXXXXXXXXXXXEXA

SEQ ID NO: 89480 - protein, 15 aa, Artificial sequence
  protein pattern
  Variant (2)..(2): Xaa in position 2 is any amino acid
  Variant (3)..(3): Xaa in position 3 is Asp or Glu
  Variant (4)..(5): Xaa in position 4 to 5 is any amino acid
  Variant (7)..(7): Xaa in position 7 is any amino acid
  Variant (8)..(8): Xaa in position 8 is Cys, Gly, Ser, Thr or Val
  Variant (9)..(9): Xaa in position 9 is any amino acid
  Variant (13)..(13): Xaa in position 13 is any amino acid
KXXXXQXXXSFKXRG

SEQ ID NO: 89481 - protein, 13 aa, Artificial sequence
  protein pattern
  Variant (6)..(6): Xaa in position 6 is any amino acid
  Variant (7)..(7): Xaa in position 7 is Ala, Cys, Asn or Ser
  Variant (9)..(9): Xaa in position 9 is Ile, Leu or Val
  Variant (10)..(12): Xaa in position 10 to 12 is any amino acid
  Variant (13)..(13): Xaa in position 13 is Phe, Ile, Leu, Met or Val
GGGGLXXGXXXXX

SEQ ID NO: 89482 - protein, 12 aa, Artificial sequence
  protein pattern
  Variant (2)..(2): Xaa in position 2 is Ala or Gly
  Variant (5)..(5): Xaa in position 5 is any or no amino acid
  Variant (7)..(7): Xaa in position 7 is any or no amino acid
  Variant (9)..(9): Xaa in position 9 is Phe, Ile, Leu or Val
  Variant (11)..(11): Xaa in position 11 is any amino acid
  Variant (12)..(12): Xaa in position 12 is Ala, Ser, Thr or Val
SXGNXAXGXAXX

SEQ ID NO: 89483 - DNA, 1134 bp, Saccharomyces cerevisiae
  CDS (1)..(1134)
atggatatggaaattgatgaccctatgcatggttcagatgaagatcaattatcaccgactctcgacgaagacatgaatagtgatgacggcaaaaataatacgaaggcgcgttctaatgacgaagacacagatgaagagttggaagattttaattttaaaccggggtcctcgggtatagcagatcataaatcctccaaaccactaaaactgaccaatacaaatataaatcagcttgaccaatggattgagcatttgagtaaatgcgagccactatcagaagacgatgtagcacgactatgtaaaatggcggtggacgtgttgcagttcgaggagaatgttaaaccaattaacgtgcctgttaccatttgtggtgacgtacacggtcaattccatgacttgttagaacttttcaagattggtggtccttgtcctgacaccaattaccttttcatgggtgattacgtggatagaggatattattctgttgagaccgtatcttacctagttgccatgaaagtcagatatccacatagaattactatacttaggggcaatcacgagtctaggcagattacccaagtatatgggttttatgacgaatgtttgagaaagtacggcagtgcgaacgtgtggaaaatgtttaccgatctattcgattatttccccgttactgccttggtggataataaaatcttctgtttgcatggaggtctctcacccatgatagagacaatagatcaagttagagatttaaatagaatacaggaagtgcctcacgaaggtccaatgtgtgaccttctatggtccgatcctgatgatagaggcggatggggaatcagtccgagaggtgcaggcttcacttttggtcaagacatcagtgagcaattcaatcacactaatgacctatcactaatagcaagagctcaccaattggtaatggaaggatattcttggtctcaccagcaaaatgttgtcaccattttcagtgctccaaattattgttatagatgtggtaaccaggccgctattatggaggtggatgaaaaccataataggcaattcttacaatacgatccatctgtgagacccggtgaaccaaccgtcaccaggaagacaccggattatttcttataa

SEQ ID NO: 89484 - protein, 377 aa, Saccharomyces cerevisiae
MDMEIDDPMHGSDEDQLSPTLDEDMNSDDGKNNTKARSNDEDTDEELEDFNFKPGSSGIADHKSSKPLKLTNTNINQLDQWIEHLSKCEPLSEDDVARLCKMAVDVLQFEENVKPINVPVTICGDVHGQFHDLLELFKIGGPCPDTNYLFMGDYVDRGYYSVETVSYLVAMKVRYPHRITILRGNHESRQITQVYGFYDECLRKYGSANVWKMFTDLFDYFPVTALVDNKIFCLHGGLSPMIETIDQVRDLNRIQEVPHEGPMCDLLWSDPDDRGGWGISPRGAGFTFGQDISEQFNHTNDLSLIARAHQLVMEGYSWSHQQNVVTIFSAPNYCYRCGNQAAIMEVDENHNRQFLQYDPSVRPGEPTVTRKTPDYFL

SEQ ID NO: 89485 - DNA, 1266 bp, Oryza sativa
  CDS (89)..(1051)
ggcttattacaacttaccaagagatttctttttcttttttctcattcgtaaaatgttcttttattaaacaatctaatctctactcccaatgactgtacaatcaagaatcggcgaagataataaatccggacaatattcatcgaaagaacttgatacctggattgaacaattgaaagaatgtaaaccattacaagaaaatcatatcaaatacttatgcgaacaagcaaaagatattttatcgaaggaatctaatgtacaagaagtcaaatgtccggtgactgtttgcggcgatgtacatggtcaatttcatgatctcatggaacttttcaagatcggaggcaacgcacccgatacaaactatctcttcatgggagactatgtcgatcgtggttaccattcggttgaaactgttacattactggttgcgctcaaagttcggtataaagatcgcatcaccatccttcgtggtaatcatgaatctcgacagatcactcaagtctacggattctatgacgaatgcttgagaaaatatggcaatgccaatgtttggaagtattttactgatttgtttgactatctgccgttgacagcaatagtcgataatcaaatcttctgtttacatggaggacttagtccatcgatcgacacgctggatcacattcgagcactagatcgaattcaagaagtgccacatgaaggacccatgtgcgatctcttatggtcggaccccgatgatcgtggtggctggggcatttcaccacgcggcgccggctatacatttggtcaagatatttccgaaacattcaatcacaccaacggtctccaattggtctctcgtgcccatcaattagttatggaaggatacaattggtcacatgacaaaaatgttgtaacaatcttttcagcacccaactactgttatcgttgcggtaaccaggcagcaattatggagctcgatgattcattaaaatattcctttcttcaattcgatccagctccgcgccgtggcgaaattcaagtaacacgcaaaatacctgactactttttatgatcgatatgaataggatttgttctctcttatatatagtacacgcgtgctgattaataaatgagtttgtgcgaaagagaaccagagagagagagtgtgtgtgtgtgagtgtctgtgcgagagtgagagagtgcaaaaaaaacacatttatgtcattgacacattttcttattatacattaaaaaatcaacataaatattacttccttgtcactcttc

SEQ ID NO: 89486 - protein, 320 aa, Oryza sativa
MTVQSRIGEDNKSGQYSSKELDTWIEQLKECKPLQENHIKYLCEQAKDILSKESNVQEVKCPVTVCGDVHGQFHDLMELFKIGGNAPDTNYLFMGDYVDRGYHSVETVTLLVALKVRYKDRITILRGNHESRQITQVYGFYDECLRKYGNANVWKYFTDLFDYLPLTAIVDNQIFCLHGGLSPSIDTLDHIRALDRIQEVPHEGPMCDLLWSDPDDRGGWGISPRGAGYTFGQDISETFNHTNGLQLVSRAHQLVMEGYNWSHDKNVVTIFSAPNYCYRCGNQAAIMELDDSLKYSFLQFDPAPRRGEIQVTRKIPDYFL

SEQ ID NO: 89487 - DNA, 1484 bp, Zea mays subsp. mays
  CDS (169)..(1110)
agtatccagactctctctcgggcctctcggctctcctctccccgatttccttccccacccgctgtcagtctcactccccccgcgcgcgctctctctttcctcgccttcgccgccggcgacgagcttgagctcgagctggttcctcgtatagaagacgacggccgcggtatggagcccatgaacgtagacaacggcggctgcggaggccttgacgcgcagatcgaacagctgatgcagtgccgcccgctcgccgagcaagaggttaaggcactgtgcgagaaggccaaggagatattgatggaggaaagcaacgttcagcctgtcaagagtccagtgacaatatgtggtgatatacatggacaattccatgatcttgtagagcttttccgaattggcgggaagtgtccagacaccaattacttatttatgggagattatgtagatcgtggctactattctgttgagactgtcacgatgctagtagcactaaaagtgaggtatccacatcgaattacaatccttcgtggaaaccacgagagtcggcagatcacacaggtgtatggattctacgacgaatgcctacgaaagtatggcaatgcaaatgtatggaagacatttacggatctttttgattattttcctctgacagctctggtggaatctgagattttctgccttcacggtggtctatctccatcaattgaaaatcttgatagtgtgcgcagcttagatcgagtccaagaggttccccatgagggacctatgtgcgatctcttatggtcagatccagacgaccgatgtggttggggcatctcccctcgcggtgctggctacactttcgggcaggacatatcagagcagtttaatcacacaaacaatctcaaactcgtagctcgggctcatcaattagttatggagggatataactgggctcatgagcaaaaggttgtcaccatattcagtgctccaaattactgctatcgatgcggcaatatggcatccattttggaagttgacgactgcaacagccacacattcatccagtttgaaccagcccctaggagaggtgagccagatgtgacgcgaagaacaccggattatttcctttgagctgtcgatgttaccgtttcccagcctgtgtcgtgataatcgatgccaacgtctgctggatcaagggccagacagaaataacaggggaatgccgaagcactatgcccagagtttcacccttttcaggcgacagagaagggcggccatccacctacaactctggccgccctctgttttatgcactttttacagagtcgtggaactggccaaaaagaccggagtaccatttgcacctgtgtagcgtaagcttgtactacaaataggcgtgtgctaatctgtatcaccattcatcaattgcaacgaactgttgaactccttccatcagtaaagtaaattttggtaaaagaacggcttacagtgtcggtaatgacact

SEQ ID NO: 89488 - protein, 313 aa, Zea mays subsp. mays
MEPMNVDNGGCGGLDAQIEQLMQCRPLAEQEVKALCEKAKEILMEESNVQPVKSPVTICGDIHGQFHDLVELFRIGGKCPDTNYLFMGDYVDRGYYSVETVTMLVALKVRYPHRITILRGNHESRQITQVYGFYDECLRKYGNANVWKTFTDLFDYFPLTALVESEIFCLHGGLSPSIENLDSVRSLDRVQEVPHEGPMCDLLWSDPDDRCGWGISPRGAGYTFGQDISEQFNHTNNLKLVARAHQLVMEGYNWAHEQKVVTIFSAPNYCYRCGNMASILEVDDCNSHTFIQFEPAPRRGEPDVTRRTPDYFL

SEQ ID NO: 89489 - DNA, 1484 bp, Zea mays subsp. mays; identical to SEQ ID NO: 89487
  CDS (178)..(1110)

SEQ ID NO: 89490 - protein, 310 aa, Zea mays subsp. mays
MNVDNGGCGGLDAQIEQLMQCRPLAEQEVKALCEKAKEILMEESNVQPVKSPVTICGDIHGQFHDLVELFRIGGKCPDTNYLFMGDYVDRGYYSVETVTMLVALKVRYPHRITILRGNHESRQITQVYGFYDECLRKYGNANVWKTFTDLFDYFPLTALVESEIFCLHGGLSPSIENLDSVRSLDRVQEVPHEGPMCDLLWSDPDDRCGWGISPRGAGYTFGQDISEQFNHTNNLKLVARAHQLVMEGYNWAHEQKVVTIFSAPNYCYRCGNMASILEVDDCNSHTFIQFEPAPRRGEPDVTRRTPDYFL

SEQ ID NO: 89491 - DNA, 1423 bp, Glycine max
  CDS (223)..(1164)
gattggagggagtgaagtctttccctccacaagaaaaaaaaatcagaaaaaggaaatgagagattgttggacaccgtgcaaatcaagcactttgcttgttatttcacgcgccctctctccattttgacctccctttcctcttcgttccccactcactgcaacggcgccggagatccgtcgctctcctcctcctcctcctcctcctcctcctcctccgccgcgatgggcgccaattccatgctctccgagtcctctcacgatctcgacgaccagatctcccagctcatgcagtgcaagccactctccgagcaacaggtcagaggtttatgtgagaaggctaaggagattttaatggatgaaagtaatgttcagcctgttaaaagccctgtgacaatttgtggcgatattcatgggcaatttcatgatcttgctgaactgtttcgaattggagggaagtgtccagatactaactacttgtttatgggtgattatgtggaccggggttattattcagttgagactgtatcgctccttgtggcactgaaagttcggtatccccagcgaattactattcttagaggaaaccatgaaagccgtcagattactcaagtatatggattttatgatgaatgccttagaaagtatggtaatgctaatgtttggaagacctttacagacctttttgatttttttccattgactgcattggttgaatctgaaatattctgtttgcatggtggactgtcaccttcaattgagacccttgataacataaggaactttgatcgtgttcaagaggttcctcatgaaggccccatgtgtgatctattgtggtctgacccagatgacagatgtggctggggaatttctcctcgtggtgctggatatacttttggccaggatatatctgaacaattcaatcacactaacagccttaaattgattgctagagctcatcagcttgttatggatggatttaactgggctcatgaacaaaaggtggttaccatttttagtgcacctaactactgttaccgatgtgggaacatggcttccatattggaggttgatgattgcaagggtcacacattcatccagtttgaacctgctcctaggagaggagaacctgatgtcactcgtagaacgcctgattacttcttataatgtagctgttgaatgtcatactgttatatcatggttacctctactgcactaatttcaggcaggtaacattccactgattacactcgaggaattgctggacaccttgtctggagaagtcgccaagatgatgtcataatacgtattgttccagcaaaatgtggtcttttttttttttttttcgtgtttattttttgtatcttatgttcagtaactcccttttatggctttacaagctatatgactggattttgttggtcgc

SEQ ID NO: 89492 - protein, 313 aa, Glycine max
MGANSMLSESSHDLDDQISQLMQCKPLSEQQVRGLCEKAKEILMDESNVQPVKSPVTICGDIHGQFHDLAELFRIGGKCPDTNYLFMGDYVDRGYYSVETVSLLVALKVRYPQRITILRGNHESRQITQVYGFYDECLRKYGNANVWKTFTDLFDFFPLTALVESEIFCLHGGLSPSIETLDNIRNFDRVQEVPHEGPMCDLLWSDPDDRCGWGISPRGAGYTFGQDISEQFNHTNSLKLIARAHQLVMDGFNWAHEQKVVTIFSAPNYCYRCGNMASILEVDDCKGHTFIQFEPAPRRGEPDVTRRTPDYFL

SEQ ID NO: 89493 - DNA, 1449 bp, Zea mays subsp. mays
  CDS (116)..(1063)
ttttttttctactcccgcgcccctccgcgagctccctacccctcgcgctcacgccggcgacaagtttccgccagagttaggtagatcaggtgctgcgccggcagccgtggaagggatggaggacctcgcgagttcgcgtggcggcgggggatgcggtggtcttgatgcgcagatcgaacagctcatggagtgccgcccgctcccagagacggaggttaaaacactgtgtgagaaggccaaggagatattaatggaggaaagcaatgttcagccagttaaaagccctgtgacgatttgtggtgatattcatggccaattccatgatcttttagaacttttccggattggtgggaagtgtccagatacaaattatttgtttatgggtgattatgtggatcgtggctattactctgttgagacagtaacgcttttagttgcacttaaggtgcggtacccgcaacgcattacaattcttcgtggaaaccatgaaagtaggcagatcacacaggtgtatggcttctatgatgaatgcctacgaaaatatggcagtgcaaatgtctggaagatcttcactgatctttttgattattttccgttgacagcattggtggaatcagaaattttctgcctccatggtggtttatctccatccattgagaatcttgataacgttcgcagtttagaccgtgtccaagaggtccctcatgagggacctatgtgcgaccttctgtggtctgatccagacgatagatgtggctggggcatatctccacgtggtgctggatacacttttggccaagacatatcggagcagtttaatcacaccaacaatcttaaactcgtagctcgggctcaccagttggttatggagggatacaactgggcacatgaacaaaaggtggtgaccatattcagcgcacctaactactgttaccggtgcggcaacatggcgtccatcctcgaggtcgatgactgcaggaatcacacatttattcagtttgagccagctcctaggagaggtgaaccagacgtgacgcggaggacacctgattatttcctttgagttatctgccagaccatttttggaatttgcccaatgttggaatagtgatgctagccagtaacaatttttgttggatctatatgataacttaaccgaccagcaacagtaagaaaatgtggaagctgcatctgtcattgcaagaggtgctcgctaacagtaacaggtcgacgacctatacaccccaagctgtcaaaagatccgcttgtctacccaacccaccaagtggtgcctcccttgggctttgggacgtcgagtttacgctttcagcgtagagttgcctcagttctgtcttgtgtgtcagctagttttgtgtttgtgtcttgtgtggttgctcgttgtagcttctgtgattaaatgacaacagacaagctggtctcgagtgttgc

SEQ ID NO: 89494 - protein, 315 aa, Zea mays subsp. mays
MEDLASSRGGGGCGGLDAQIEQLMECRPLPETEVKTLCEKAKEILMEESNVQPVKSPVTICGDIHGQFHDLLELFRIGGKCPDTNYLFMGDYVDRGYYSVETVTLLVALKVRYPQRITILRGNHESRQITQVYGFYDECLRKYGSANVWKIFTDLFDYFPLTALVESEIFCLHGGLSPSIENLDNVRSLDRVQEVPHEGPMCDLLWSDPDDRCGWGISPRGAGYTFGQDISEQFNHTNNLKLVARAHQLVMEGYNWAHEQKVVTIFSAPNYCYRCGNMASILEVDDCRNHTFIQFEPAPRRGEPDVTRRTPDYFL

SEQ ID NO: 89495 - DNA, 1365 bp, Physcomitrella patens
  CDS (71)..(991)
ggcgttaacgcgcggaggagagcggatcggttagggtttggtgccaggggggagggcagaggttgggacaatgccgtcatatgcagatgtagaccggcagatagagcagctgtcggagtgcaagccgttgtcggagttggaggtgaagaacctatgtgatcaagctcggacgatcttggtggaggagtggaacgtgcagcccgtgaagtgtcctgtcacggtttgcggtgacatccatggccagtttcatgatctcatcgagcttttccgcataggaggcaaggcgcccgacacgaactacttgttcatgggcgactatgtggatcgtggatattattctgtcgagactgtgtcgctcttagtggccctgaaggtgcggtatagggataggatcacaatcttgcgagggaaccacgagagcaggcagattacgcaagtatatggtttctatgatgaatgcctgcggaagtatggaaatgcgaatgtttggaagtacttcacggatctgttcgactacctgcctctgacagctctcattgagcacgagattttttgtcttcatggtggtctgtctccatcgctcgacacattagatcacatccgagccctagatcgtattcaagaagtgccgcacgagggcccgatgtgtgatctactctggtctgatccagatgatcgttgtggatggggcatttcaccacgaggtgccggttatacttttggtcaagatattgcagagcagttcaatcataccaatggtctaagtttggttgcacgtgctcaccagcttgtgatggaaggatacaattggtgccaggataaaaatgttgtcacagttttcagtgcccccaattactgttaccgctgtgggaacatggccgccataatggagatagatgaaacaatgaatcggtcttttcttcagttcgaaccagcaccgcggcaaagtgaaccagatgtgacgcggaagactcctgattactttctgtaaacatggcctatacatggtaccttttacttactgaattgttctgtatagtcaccttccatggaagcagtttgcccctgaatgaagatactccctcatgatctagtagtatgaagttatcttctttgaagtgtttgttcccttttttagtacttgctcctctgttcattcataaagttgccttcagaacaactgagatgttgtgaatgtaactgcgacaagaggagcagtgtcaatggttgcaagggttatagtgattagggaaagaaggtagcacatgttacttcaaatcgatcagagacttctatggaaaagatgacgatggtggaaacaacgttcatctccacacctactgtatatggcatgctcgagctcgc

SEQ ID NO: 89496 - protein, 306 aa, Physcomitrella patens
MPSYADVDRQIEQLSECKPLSELEVKNLCDQARTILVEEWNVQPVKCPVTVCGDIHGQFHDLIELFRIGGKAPDTNYLFMGDYVDRGYYSVETVSLLVALKVRYRDRITILRGNHESRQITQVYGFYDECLRKYGNANVWKYFTDLFDYLPLTALIEHEIFCLHGGLSPSLDTLDHIRALDRIQEVPHEGPMCDLLWSDPDDRCGWGISPRGAGYTFGQDIAEQFNHTNGLSLVARAHQLVMEGYNWCQDKNVVTVFSAPNYCYRCGNMAAIMEIDETMNRSFLQFEPAPRQSEPDVTRKTPDYFL

SEQ ID NO: 89497 - DNA, 1279 bp, Physcomitrella patens
  CDS (122)..(1057)
cttgttctagggttgcgattgcgtttcgagagtgtcggagttggtttttgaggcggagatcagcggaaacggagggtagggcgatagcgtggagaaggggaagcgcaacaggagggacgacatgagtgtgcctccgatatcctctaatgggcagctggacacacagattgctcagctcatacaatgcaaaccgttatccgaggtcgaggtcagaggactatgtgagaaggcgaaggagatattgatgcgggaaaataatgttcagccagtgaagtgtccagtcacaatttgtggtgatattcatggccagtttcatgatcttgctgaactcttccgaattggaggaatgtgtccagacaccaattacttatttatgggagattatgtggatcgtggttattattcagttgaaactgctacactgctagtggctttaaaagtacgatatcctgatcgtattaccattctgcgtggcaatcatgagagtcggcagatcacccaagtgtatggtttctatgacgagtgtcttcgaaagtacggaaatgccaacgtatggaagatcttcactgacctgtttgattattttcctttaacagcactcgtagagtcggagattttttgtttacatggagggctttcgccaagcatcgattccttggaccacattcgggacctggatcgagttcaagaggttcctcatgaaggtccgatgtgtgatctactttggtctgaccccgatgaccgttgtggttggggcatttctccccgtggtgctggctacacatttggccaggatatatctgagcagttcaatcacaacaacaatctgaagttggtcgcaagggcacatcaattagttatggagggctacaattggggacatgaacacaaggtggtcactattttcagcgcacctaattattgctatcgctgtggaaacatggcttctatattggaagtggatgacaatatgggccacactttcattcagtttgaaccagccccgagacgaggtgaaccagatgtgacaaggcgcacgccagactacttcttatagtgggactttctgatagtagtttttaaagtatgctttgagctattttggatcgtctgtagtccatgcattcaatgatgtagattttcctcaggttagcatggtgttaccaagcgatagcagcctgaatgctgtcataaccgccacaccatcatatgatatgtatttcattgagcgggcatgctactctgcgcttgagatgtaagcgagtctctatttggagtg

SEQ ID NO: 89498 - protein, 311 aa, Physcomitrella patens
MSVPPISSNGQLDTQIAQLIQCKPLSEVEVRGLCEKAKEILMRENNVQPVKCPVTICGDIHGQFHDLAELFRIGGMCPDTNYLFMGDYVDRGYYSVETATLLVALKVRYPDRITILRGNHESRQITQVYGFYDECLRKYGNANVWKIFTDLFDYFPLTALVESEIFCLHGGLSPSIDSLDHIRDLDRVQEVPHEGPMCDLLWSDPDDRCGWGISPRGAGYTFGQDISEQFNHNNNLKLVARAHQLVMEGYNWGHEHKVVTIFSAPNYCYRCGNMASILEVDDNMGHTFIQFEPAPRRGEPDVTRRTPDYFL

SEQ ID NO: 89499 - DNA, 1243 bp, Brassica napus
  CDS (150)..(1070)
ttgaaattgaaattcgcatttttgctatggggaactgagtgatggtagataattcgaatccaaatccgcatccggatccaatactatccgaatccggattttgagtttttggtcagatcggggatcggatctgagggaaggagaagacgatgccggagacgggagacatcgatcgtcagatcgagcagctgatggagtgtaaagcgttgtccgaggcggaggtgaagacgctgtgcgagcaagcgagggcgattctggtggaggagtggaatgttcagccggttaagtgtccggtcaccgtctgcggcgacatccacggccagttttacgatctgattgagctttttaagatcggtggttcttcgcctgacaccaattatctcttcatgggcgattacgtagatcgagggtattattctgtggagacagtctcgctcttggtagcactcaaagttcgctacagagataggcttaccatcttaagagggaatcacgaaagccgccaaattactcaagtgtatggattttatgatgagtgcttgagaaaatatggaaatgctaatgtctggaaacacttcactgacctttttgattatcttcctcttacagctctcatcgagagtcaggttttctgtttacatggagggctctcaccttctttagatacacttgacaacatccgttctctagatcgaatccaagaggttccacatgaaggacctatgtgtgatctgttatggtccgatccagatgatcgatgcggttggggaatatctcctcgtggcgcaggctacacgttcggacaagatatcgctactcagtttaaccacaccaatggactcagtctgatctcaagagcacaccaacttgtcatggaaggttataattggtgccaagaaaagaacgttgtgactgtgtttagcgccccaaactattgctaccgatgcggcaacatggctgctattctagagatagacgagaacatggaccagaacttccttcagttcgatccagccccacgtcaagtagaacccgaaactacacgcaaaactccagattactttttgtaagtacccaaaaagaaaaaaacatccttaaccttgttctgtaatttcatttcctgttcgttaaactcgtagttgtctttttggtttttagttaagaatgtgtaaccttttaactgatacaaagcgttacaaaagattctggtccatatgaataaggcaattgttgttgagagcta

SEQ ID NO: 89500 - protein, 306 aa, Brassica napus
MPETGDIDRQIEQLMECKALSEAEVKTLCEQARAILVEEWNVQPVKCPVTVCGDIHGQFYDLIELFKIGGSSPDTNYLFMGDYVDRGYYSVETVSLLVALKVRYRDRLTILRGNHESRQITQVYGFYDECLRKYGNANVWKHFTDLFDYLPLTALIESQVFCLHGGLSPSLDTLDNIRSLDRIQEVPHEGPMCDLLWSDPDDRCGWGISPRGAGYTFGQDIATQFNHTNGLSLISRAHQLVMEGYNWCQEKNVVTVFSAPNYCYRCGNMAAILEIDENMDQNFLQFDPAPRQVEPETTRKTPDYFL

SEQ ID NO: 89501 - DNA, 1184 bp, Glycine max
  CDS (97)..(1008)
cctaacccatcgttcgcacggagccgtggtggttctggctctgtccttttttcctttctctcgttaccagaaccagaagaaccatttgtggccaacatggatttggaccagtggatctccaaggtcaaagagggccagcatcttcttgaagacgagcttcaacttctctgcgaatatgtaaaagagatccttatcgaggagtccaatgtgcagcctgtcaatagtccagtgactgtttgtggtgatattcatggtcaattccatgatctaatgaaacttttccagactgggggtcatgtgcctgagacaaattatatttttatgggagactttgttgatcgaggttacaatagtcttgaagtttttaccatccttttacttctaaaagctagatacccagctaatattactcttttacgtggaaatcatgaaagtagacaattaacccaggtctatggattttatgatgaatgccagaggaagtatggcaatgccaatgcttggcggtattgtacagatgtgtttgactatttaacactttctgcaattattgatggaactgtgctttgtgttcatgggggcctttctcctgacattcgaacaattgatcagataagggtcattgaccggaactgtgaaattcctcatgagggtcctttctgtgatctaatgtggagtgatcctgaagatattgaaacatgggcagtcagtccccgtggagcaggttggctttttggatccagggtcacttcggagttcaatcacataaataaccttgatcttgtttgtcgagcgcaccaactcgttcaggaaggccttaagtatatgttccaagataaaggccttgtaactgtatggtctgcacctaattactgttaccgatgtggaaatgtagcttctattctgagtttcaatgaaaatatggaaagagaagttaaatttttcaccgaaacagaggagaacaatcagatgagagggcccaggacaggcgttccatatttcttataagttggtgcaaattttgttttgaatttattgtaaaattagacactcatgtatttatgctttgccttttaaaggtggattttattggtcacaagattaccaatcaaactatatcttagctctgggtcgcacagataattttatgtttaaatttttattgaaaaaaaaaaaaaaaaaaa

SEQ ID NO: 89502 - protein, 303 aa, Glycine max
MDLDQWISKVKEGQHLLEDELQLLCEYVKEILIEESNVQPVNSPVTVCGDIHGQFHDLMKLFQTGGHVPETNYIFMGDFVDRGYNSLEVFTILLLLKARYPANITLLRGNHESRQLTQVYGFYDECQRKYGNANAWRYCTDVFDYLTLSAIIDGTVLCVHGGLSPDIRTIDQIRVIDRNCEIPHEGPFCDLMWSDPEDIETWAVSPRGAGWLFGSRVTSEFNHINNLDLVCRAHQLVQEGLKYMFQDKGLVTVWSAPNYCYRCGNVASILSFNENMEREVKFFTETEENNQMRGPRTGVPYFL

SEQ ID NO: 89503 - DNA, 1417 bp, Glycine max
  CDS (28)..(978)
aagaagaagaggttttgatcggatgcgatgagcacacaggggcaagtgattattgatgaggcggttctggatgacataatccggcgcttaacggaggtccgactggcccgacccggcaagcaggttcagctctccgagtctgagatcaagcaactctgcgtcgcttccagagacatcttcattaaccagcccaatttgcttgaactcgaagcccccatcaagatttgtggtgacattcatgggcagtacagtgatttgttaaggctatttgagtatgggggtttgcctcctactgcgaattatctctttttgggggaatacgtggaccgtgggaagcagagcttagaaaccatatgtcttttgcttgcgtataaaatcaaatatccagaaaactttttcctgttaagggggaatcatgagtgtgcttccattaataggatttatgggttttatgatgaatgtaagcgaaggtttaacgtgaggctttggaaagcctttaccgactgttttaacttccttcctgtggcagcccttatagatgataaaatattgtgcatgcatggtggtctttcccctgaactcacaaacttggatgaaatcaggaatctacctcgtcctactgcgattcccgacaccggcttgctttgtgatttgctttggtctgatcctggtagggatgtgaagggttggggtatgaatgacagaggagtgtcctacacctttggccctgataaggtcgctgagttcttgacaaagcatgacttggacctcatttgtcgtgctcatcaggttgtagaggatgggtatgaattctttgctgataggcaacttgttacgatattttcagctccaaactattgtggtgaatttgacaatgctggtgcgatgatgagtgtggacgaaaacttgatgtgctcatttcagattcttaagcctgcagagaaaaaatcaaagtttgtgatgtcaaacaagatgtgatggttggcacatcactgtcaagtaattaaccaagatgtattcgtggagctaaattaaatcctgaagatttagattgcatggtcttaagttctatctattctgaggtgatgatgatgaacaaacaagtttactgctataacatccagtcaggcagtgagcatgaggtactacaagagatattaagcactgttggatggccataaaagcaaaggcttttatctttttttttcttttcttgttttataattattctgcaacacaatatgtacatatatgtgttgtagatgctctggaaatgaccttctttgctctgaaaggtcctcttagactatcgatttacactgatagagcagtttgtgttgatgattgtggccaattttatccagttagtaaaggtgcaattgatggattttatggtttaaaaaaaaaaaaaaaaaaa

SEQ ID NO: 89504 - protein, 316 aa, Glycine max
MSTQGQVIIDEAVLDDIIRRLTEVRLARPGKQVQLSESEIKQLCVASRDIFINQPNLLELEAPIKICGDIHGQYSDLLRLFEYGGLPPTANYLFLGEYVDRGKQSLETICLLLAYKIKYPENFFLLRGNHECASINRIYGFYDECKRRFNVRLWKAFTDCFNFLPVAALIDDKILCMHGGLSPELTNLDEIRNLPRPTAIPDTGLLCDLLWSDPGRDVKGWGMNDRGVSYTFGPDKVAEFLTKHDLDLICRAHQVVEDGYEFFADRQLVTIFSAPNYCGEFDNAGAMMSVDENLMCSFQILKPAEKKSKFVMSNKM

SEQ ID NO: 89505 - DNA, 1480 bp, Glycine max
  CDS (114)..(1085)
gctcactcttccaactactactgttgttcttcttcgtcgtcttggccttcgcatcttcacaatcacatccaatagagacacgttgactttgctggaagaagaagaagaagagaatggaacaatcgcttttggatgacataatcaatcgcctcctcgaagttcctaccctaccggctaagcaggttcagctatccgagtccgagatccgtcaactctgcgtagtttccagagaaattttcttgcaacaacctaatttattggagctcgaagcacctattaagatttgtggtgatgtacatgggcaatattctgatcttttaaggctttttgagtacggtggattacctcctgaagccaactatttgtttttgggggattatgttgatcgagggaagcagagtttagaaacaatttgcctcctccttgcttataaaataaaatatcctgagaactttttcttgttaaggggaaaccatgaatgtgcttctataaaccggatatatggattttatgatgagtgcaagagaaggttcaatgtaaggttatggaagacatttacagactgcttcaattgcctgcctgtggcagcccttgtcgatgaaaagattttgtgtatgcatgggggactttctcccgacttaaataatttggaccaaattagaaatttacagcggcccacagatgttcctgatacaggtttgctttgtgatctgctttggtctgacccgagcaaagatgttcaaggatggggaatgaatgacagaggagtttcatacacatttggtgctgataaggtctcacaatttcttcagaaacatgatcttgatcttgtttgtcgtgctcatcaggttgtggaagatggatacgagttctttgctaatcgacaacttgtaacaatattttcagcacctaattattgtggggagtttgacaatgctggtgctatgatgagtgttgatgagacgctaatgtgctctttccaaatattaaagccagctgataaaaaagcaaagctcaattttggaagtacaaccactgctaagcctggaaactctccagcaggtgtaaaggttggaagatattagtccttcctggatgcgaaagtgtgaaattaaatttggctaaaagattgctactactacggatcagcttgggcttgaactcctaatggttgcaagaaggggaaaatcaagttccatttcgcctactatgatattttggaattgtaaaatcaaagagaacaccattatgaagtttgtaaaccattgtttattattggtacaaatttgcatttcaagatggagagccataatctccttgtcttccttgtacactaataactggtatattttcttaactgtaagcttcacaagcgtagatggatacatccgaatctgttgctgagaaccatttaaaaatgcttatacgatttggcatatatggatggcagttgaggctggtgaaaaaaaaaaaaaaaaaa

SEQ ID NO: 89506 - protein, 323 aa, Glycine max
MEQSLLDDIINRLLEVPTLPAKQVQLSESEIRQLCVVSREIFLQQPNLLELEAPIKICGDVHGQYSDLLRLFEYGGLPPEANYLFLGDYVDRGKQSLETICLLLAYKIKYPENFFLLRGNHECASINRIYGFYDECKRRFNVRLWKTFTDCFNCLPVAALVDEKILCMHGGLSPDLNNLDQIRNLQRPTDVPDTGLLCDLLWSDPSKDVQGWGMNDRGVSYTFGADKVSQFLQKHDLDLVCRAHQVVEDGYEFFANRQLVTIFSAPNYCGEFDNAGAMMSVDETLMCSFQILKPADKKAKLNFGSTTTAKPGNSPAGVKVGRY

SEQ ID NO: 89507 - DNA, 1386 bp, Glycine max
  CDS (92)..(1012)
accgtcccggtcgcgccaaccgccgcaacccgaagaaaccgaatcgatctgagagaaggtgcgatctcggaggtgggagccaaacgaaacgatgccgtctcacgcggatctggagcgacagatcgagcagctgatggactgcaagcctctgtcggagtcggaggtgaaggcgctgtgcgatcaagcgaggacgattcttgtggaggagtggaacgtgcaaccggttaagtgccccgtcaccgtctgcggcgatattcacggccagttctacgatctcatcgagctgtttcggattggagggaacgctcccgataccaattatctcttcatgggtgattatgtagatcgtggatactattcagtggagactgttacacttttggtggctttgaaagtccgttatagagatagaatcacaattctcaggggaaatcatgaaagccgtcaaattactcaagtgtatggcttctatgatgaatgcttgagaaaatatggaaatgcgaatgtctggaaatactttacagacttgtttgattatttgcctctgactgccctcattgagagtcagattttctgcttgcatggaggtctctcaccttctttggatacactggataacatcagagcattggatcgtattcaagaggttccacatgaaggaccaatgtgtgatctcttgtggtctgaccctgatgatcgctgtggatggggaatatctccacgtggtgcaggatacacatttgggcaggatatagctgctcagtttaatcataccaatggcctctccctgatatcgagagcacatcagcttgttatggaaggattcaattggtgccaggacaagaatgtggtgactgtatttagtgctccaaattactgttatcgatgtgggaatatggctgccatactagaaataggagagaatatggatcagaattttcttcagtttgatccagctcccaggcaaattgagcctgacaccacacgcaagactccagattattttttgtaacttcatttatctgcctgtttgtagttactgctttctgccattactgtagatgtgtctttaaggaaaggagttttactgtgtaagtggagggtggtcatcaacataattctttcttttggagtttacctgttgctgctgccgctgccttatctgtacaagaaaccaatagaactgacacatgacaccaattggggttgttgtatatttttgggaggaagcagcataacatggtatatcttttctgtaatcctttttcttttctttaaattaaatctcaagttaaagagcagatttttgagtcctgacaatgatgtccttttgagacttttgatgatgccaaatgaaattgcaggttttcaaaaaaaaaaaaaaaa

SEQ ID NO: 89508 - protein, 306 aa, Glycine max
MPSHADLERQIEQLMDCKPLSESEVKALCDQARTILVEEWNVQPVKCPVTVCGDIHGQFYDLIELFRIGGNAPDTNYLFMGDYVDRGYYSVETVTLLVALKVRYRDRITILRGNHESRQITQVYGFYDECLRKYGNANVWKYFTDLFDYLPLTALIESQIFCLHGGLSPSLDTLDNIRALDRIQEVPHEGPMCDLLWSDPDDRCGWGISPRGAGYTFGQDIAAQFNHTNGLSLISRAHQLVMEGFNWCQDKNVVTVFSAPNYCYRCGNMAAILEIGENMDQNFLQFDPAPRQIEPDTTRKTPDYFL

SEQ ID NO: 89509 - DNA, 1330 bp, Oryza sativa
  CDS (104)..(1024)
gccgtcaccgtcgcgccaactgccgcaaaccgaataaaccgaatcgatctgagagaagaagaagaagaagacgcgatctcggaggtgggagcgaaacgaaacgatgccgtctcacgcggatctggaacgacagatcgagcagctgatggagtgcaagcctctgtcggagtcggaggtgaaggcgctgtgtgatcaagcgagggcgattctcgtggaggaatggaacgtgcaaccggtgaagtgccccgtcaccgtctgcggcgatattcacggccagttttacgatctcatcgagctgtttcggattggagggaacgcacccgataccaattatctcttcatgggtgattatgtagatcgtggatactattcagtggagactgttacacttttggtggctttgaaagtccgttacagagatagaatcacaattctcaggggaaatcatgaaagtcgtcaaattactcaagtgtatggcttctatgatgaatgcttgagaaaatatggaaatgccaatgtctggaaatactttacagacttgtttgattatttacctctgactgccctcattgagagtcagattttctgcttgcatggaggtctctcaccttctttggatacactggataacatcagagcattggatcgtatacaagaggttccacatgaaggaccaatgtgtgatctcttgtggtctgaccctgatgatcgctgtggatggggaatatctccacgtggtgcaggatacacatttggacaggatatagctgctcagtttaatcataccaatggtctctccctgatatcgagagctcatcagcttgttatggaaggattcaattggtgccaggacaaaaatgtggtgactgtatttagtgcaccaaattactgttaccgatgtgggaatatggctgctatactagaaataggagagaatatggatcagaatttccttcagtttgatccagcgcccaggcaaattgagcctgacaccacacgcaagactccagattattttttataatttcatttatctgcctgtttgtagttactgctctctgccattactgtagatgtgtctttaaggaaaggagttttgctgtttaagtggagggtggtcatcaacataattctttcttttggagtttacctcctgctgctgccgctgccgctgccttatttgtacaagaaaccaatagaactgacacaagccaccaattggggttgtatatttttgggaggaagcggtaataacatggtatatcttgttctgtaatcctttttctttaaattgaatctcaagttagagagcaaaaaaaaaaaaaaaaaa

SEQ ID NO: 89510 - protein, 306 aa, Oryza sativa
MPSHADLERQIEQLMECKPLSESEVKALCDQARAILVEEWNVQPVKCPVTVCGDIHGQFYDLIELFRIGGNAPDTNYLFMGDYVDRGYYSVETVTLLVALKVRYRDRITILRGNHESRQITQVYGFYDECLRKYGNANVWKYFTDLFDYLPLTALIESQIFCLHGGLSPSLDTLDNIRALDRIQEVPHEGPMCDLLWSDPDDRCGWGISPRGAGYTFGQDIAAQFNHTNGLSLISRAHQLVMEGFNWCQDKNVVTVFSAPNYCYRCGNMAAILEIGENMDQNFLQFDPAPRQIEPDTTRKTPDYFL

SEQ ID NO: 89511 - DNA, 954 bp, Drosophila melanogaster
  CDS (1)..(954)
atgatgtctgccttgtgccccgaggcaatgaatgatgcggatcgtctggtggaaaatctgcgccatgtgccggtccgcctgcccagggagttggaggttcgccagctgtgccgctcgttgagtgacttgctcgtcggcgagtcgaatctactgagcctgcagagtccgcagatcgtatgcggtgacattcacggtcagttcgaggatctgctccacctgctggaattgggcggttcggtgcaggagcatcgctacttgttcctgggtgacctggtggatcggggcaagaacagcgtggagacctttcttctgctagctgctctcaaggtgcgacatccggcacaagttagcctgctacggggcaatcatgagtgccgcagtgccactcgatcctatggattctacgaggagtgcctttcgcggtacggctctgcgaatgtctggaggatgtgctgccgtgtcttcgatctcttgccgctggcggctatcattgatggcaatatattgtgtgttcatggcggcctgtcgccggatatgcaacgattggatgacttacgtagcctggatcgctgccacgagatacccgaaagtggaattatagctgatcttctctggagcgatccacaggaagcgcctggatgggcggcatcgccacgaggacatggaaaactcttcggtggcgatgttgttgaggagtttacgcgcgcaaatggaatctctctcatatgccgcgctcatcagttggcccaggatggcttccgttggcattttggccaacttcttgttaccatatggtcagcacccaactattgctatcgctgcggcaacaaagcggctattctgcgcttaaatgctgctggcgattatgattttaaagtgttcgaagcgcaggcgctgcactccaaaccgcagccaaggaaaccgaaaaagcgttgtcgtcaattttttcaatga

SEQ ID NO: 89512 - protein, 317 aa, Drosophila melanogaster
MMSALCPEAMNDADRLVENLRHVPVRLPRELEVRQLCRSLSDLLVGESNLLSLQSPQIVCGDIHGQFEDLLHLLELGGSVQEHRYLFLGDLVDRGKNSVETFLLLAALKVRHPAQVSLLRGNHECRSATRSYGFYEECLSRYGSANVWRMCCRVFDLLPLAAIIDGNILCVHGGLSPDMQRLDDLRSLDRCHEIPESGIIADLLWSDPQEAPGWAASPRGHGKLFGGDVVEEFTRANGISLICRAHQLAQDGFRWHFGQLLVTIWSAPNYCYRCGNKAAILRLNAAGDYDFKVFEAQALHSKPQPRKPKKRCRQFFQ

SEQ ID NO: 89513 - DNA, 1488 bp, Bombyx mori
  CDS (1)..(1488)
atgtccgggagcaatgataaagtgtcgactacgcagcgtatgattcaaagtgtcgctttccctcccagccacaagctcacagtatcggaagtgttcgatgaaaaaactggaaagccactaccagatgtattgaagcaacattttatcctagaaggtcggatcgaagaaaatgcggccttacggattattcaagatggtgccaccttattacgatcagaaaaaactatgatcgagatcgattcaccggtgactgtgtgtggagacgtccatgggcaattttatgatttgatgaaattgttcgaggttggaggttctccctcttgtactaagtatttattcttaggtgattatgtcgaccgaggttatttcagtatagaatgtgttctctatctttgggctttaaaattatgctatccgaagacattattcctattacgcggcaaccacgaatgcagacacttgacagaatatttcactttcaaacaagaatgtaaaatcaaatattcagagaaggtgtatgatgcgtgcatggacgcattcgattgcttgcccctggctgctcttatgaaccaacagttcctctgcgttcatggaggtctttctcctgaaatcaacagcttagatgatatccgtaaactagatagattcaaagagccacctgcatttggagccatgtgtgacctgctgtggtctgatcctcttgaagattttggcaatgaaaaaaatgcagaacatttctcgcataactccgttaggggttgctcatatttctatagctatgcagcctgctgtgattttctccaaagaaacaatttactttctatcatccgtgctcatgaagctcaagatgctggctaccgaatgtatcgtaaaagccaaacaactggctttcccagtctgataactatcttctcagcaccaaactatttggatgtctataacaataaggctgctgtattaaaatatgaaaacaatgtgatgaacatacgccaattcaactgttctccacatccatattggctacccaacttcatggatgtttttacttggtctcttccatttgtaggtgaaaaagttacagagatgctggtcaatgttctgaacatttgttctgatgatgaattgatgtcagaaggagatgatgcattggaggaagctaatctcagaaaagaagtcattcgcaataaaatccgtgcaattggaaagatggctcatgtattctctgttcttcgtgaggaaagtgaatctgttttgcaattgaagggcttaactcctactggtgctttacccctgggagcactttctggtggcaagacatctttaaaaaatgctttgcaaggtttctcacctaaccataagataacctcttttgctgaagccaaggggttagatgccatcaatgagcgcatgccaccaaggcgggatggtcaacgcactcctgatacccaagaaaagaaaccgcatgtgaacagcaatgctcattcgtga

SEQ ID NO: 89514 - protein, 495 aa, Bombyx mori
MSGSNDKVSTTQRMIQSVAFPPSHKLTVSEVFDEKTGKPLPDVLKQHFILEGRIEENAALRIIQDGATLLRSEKTMIEIDSPVTVCGDVHGQFYDLMKLFEVGGSPSCTKYLFLGDYVDRGYFSIECVLYLWALKLCYPKTLFLLRGNHECRHLTEYFTFKQECKIKYSEKVYDACMDAFDCLPLAALMNQQFLCVHGGLSPEINSLDDIRKLDRFKEPPAFGAMCDLLWSDPLEDFGNEKNAEHFSHNSVRGCSYFYSYAACCDFLQRNNLLSIIRAHEAQDAGYRMYRKSQTTGFPSLITIFSAPNYLDVYNNKAAVLKYENNVMNIRQFNCSPHPYWLPNFMDVFTWSLPFVGEKVTEMLVNVLNICSDDELMSEGDDALEEANLRKEVIRNKIRAIGKMAHVFSVLREESESVLQLKGLTPTGALPLGALSGGKTSLKNALQGFSPNHKITSFAEAKGLDAINERMPPRRDGQRTPDTQEKKPHVNSNAHS

SEQ ID NO: 89515 - DNA, 912 bp, Bombyx mori
  CDS (1)..(912)
atgacggatatagataaatggatagaagttgcaaagagatgcaaatacctcccggaagatgacctacgggaactgtgcaatatagtttgtgatttgttacttgaagaacctaatgttcagccggtacagacacctgtgacggtttgtggtgatattcatggacagttctatgatttagaggagctttttcacataggtggtcaagtgccatatacaaaatacatatttatgggagattatgtggatcgaggatattatagtttagaaacactaaccttgctcatggccttgaaagctagatatccagataggataatcttattaaggggtaatcatgaaacatgtcaaataactaaggtttatggattttatgatgaatgtctcaataaatatggaaatgcaaatgcatggaaagactgttgcagagtttttgatttgctcactgttgctgcattaattgatgaaaccgtcctatgtgtgcacggtggtctatcaccagaaatatctatgattgatcaaataagatgcattgatagaaatcaacaaattccacacaaaggtgcattctgtgatttgttgtggtcagatcctgctgatgtgaaaatgtggtcagtaagtcctcgtggagctggatggttgtttggctgtcaggttacagaactcttcatgaattacaatgatttaactcttatatgcagggcacatcaattagtgaatgatggttataaatacatgtttgacaaaagattagtaacagtctggtcggcgcctaactactgttaccgatgtggtaatgttgcctcaatcttggaattcaacactgttcatgatagaacagcaaggttattccaagcagtgcctgacaccgaacgagaagttcctccacagcatactactccatatttcctttga

SEQ ID NO: 89516 - protein, 303 aa, Bombyx mori
MTDIDKWIEVAKRCKYLPEDDLRELCNIVCDLLLEEPNVQPVQTPVTVCGDIHGQFYDLEELFHIGGQVPYTKYIFMGDYVDRGYYSLETLTLLMALKARYPDRIILLRGNHETCQITKVYGFYDECLNKYGNANAWKDCCRVFDLLTVAALIDETVLCVHGGLSPEISMIDQIRCIDRNQQIPHKGAFCDLLWSDPADVKMWSVSPRGAGWLFGCQVTELFMNYNDLTLICRAHQLVNDGYKYMFDKRLVTVWSAPNYCYRCGNVASILEFNTVHDRTARLFQAVPDTEREVPPQHTTPYFL

SEQ ID NO: 89517 - DNA, 987 bp, Bombyx mori
  CDS (1)..(987)
atggcagacagagacacagatgagttaaacatcgataacgtaataaaaaaattactaaaagtacgaggtgagaagcctggtatgaatgttcagttgacggaaatagaaattaaagggctatgtttgaaatcaagagaaatattcttgtcacagcctatactacttgaacttgaagctcctttgaaaatttgcggtgacatacatggacaatactatgacctcttaaggttgtttgagtatggtggcttccctccggagtccaactatctcttcctcggagactatgtggaccgtggcaagcagtcgttggaaacaatatgcctgctcctcgcctacaagattaaatatcccgagaatttctttcttttacgcggaaaccacgagtgtgccagcatcaataggatttatgggttttacgatgagtgcaaaaggaggtataacattaaactatggaagacgttcacagactgcttcaactgtcttcccgttgcggcgatagttgacgagaaaatcttctgttgtcacggcggtctgtcgcctgacctgcaagctatggaacagatccggcggatcatgaggccgacagacgtgcccgaccagggcctgctctgcgacctgctctggtccgaccccgacaaggacacggccggctggggcgagaacgatcgcggagtcagcttcacttttggaaccgaagtcgtgggcaagttcttgtccaaacacgagttcgacttgatatgtcgcgcgcaccaggtcgtcgaggatggatacgagttctttgcgaagaggcaactcgtcacactcttctcggcaccaaactactgcggggagtttgataatgcaggcgccctgatgtccgtggacgagacgctgatgtgctcgttccagatcctgaagccggccgacaagcgcaagctgtactcgggcctcaacatgggccgccccaacacgccgccgcgcgcacagcccaagaacaagaagaattaa

SEQ ID NO: 89518 - protein, 328 aa, Bombyx mori
MADRDTDELNIDNVIKKLLKVRGEKPGMNVQLTEIEIKGLCLKSREIFLSQPILLELEAPLKICGDIHGQYYDLLRLFEYGGFPPESNYLFLGDYVDRGKQSLETICLLLAYKIKYPENFFLLRGNHECASINRIYGFYDECKRRYNIKLWKTFTDCFNCLPVAAIVDEKIFCCHGGLSPDLQAMEQIRRIMRPTDVPDQGLLCDLLWSDPDKDTAGWGENDRGVSFTFGTEVVGKFLSKHEFDLICRAHQVVEDGYEFFAKRQLVTLFSAPNYCGEFDNAGALMSVDETLMCSFQILKPADKRKLYSGLNMGRPNTPPRAQPKNKKN

SEQ ID NO: 89519 - DNA, 945 bp, Oryza sativa (japonica cultivar-group)
  CDS (1)..(945)
atggagcccatgagcgtggacggcggcgggggatgcggcggcctggacacgcagatcgagcagctgatgcagtgtcgcccgctcgccgagcaggaggttaaagcactgtgcgagaaggccaaggagatattgatggaggaaagcaatgttcagcctgtcaaaagcccagtaacgatttgtggtgatattcacggacaattccatgatcttgtagaactttttcggatcggtgggaagtgcccagatactaattatttatttatgggggattatgtggatcgtggctattactctgttgagactgttactcttttggtagcgctgaaggtgcgtcacccacatcggattacaatccttcgcggaaatcacgagagccggcagatcacacaggtttatggattctacgacgaatgtttacgaaagtatggcaatgcaaatgtatggaagatattcacggatttatttgactattttccactgacagcactggtggaatctgaaattttctgcctgcatggtggtttatctccatcaattgagaaccttgatagtgtgcgtagcttagatcgtgtccaagaggttccgcatgagggaccaatgtgtgatcttctatggtctgatccagatgaccgctgtggttggggcatatctcctcgtggtgctggctacacttttgggcaggatatatccgagcaattcaatcacaccaacaatctcaaacttgtagctcgggctcatcaactagttatggaaggatataattgggctcatgaacaaaaagttgttactatattcagtgctccaaattattgttaccgatgtgggaatatggcatccattttggaagttgatgactgcaacagccatacttttattcagttcgaaccagctcctaggagaggtgagcctgacgtgacacggaggacgcccgattatttcctttga

SEQ ID NO: 89520 - protein, 314 aa, Oryza sativa (japonica cultivar-group)
MEPMSVDGGGGCGGLDTQIEQLMQCRPLAEQEVKALCEKAKEILMEESNVQPVKSPVTICGDIHGQFHDLVELFRIGGKCPDTNYLFMGDYVDRGYYSVETVTLLVALKVRHPHRITILRGNHESRQITQVYGFYDECLRKYGNANVWKIFTDLFDYFPLTALVESEIFCLHGGLSPSIENLDSVRSLDRVQEVPHEGPMCDLLWSDPDDRCGWGISPRGAGYTFGQDISEQFNHTNNLKLVARAHQLVMEGYNWAHEQKVVTIFSAPNYCYRCGNMASILEVDDCNSHTFIQFEPAPRRGEPDVTRRTPDYFL

SEQ ID NO: 89521 - DNA, 1041 bp, Drosophila melanogaster
  CDS (1)..(1041)
atgtctcgtcgttcgaccgttttatcaactggtaaggagagctccaaggaggaaaagaatcgaatgtcccaattggacgttattatcggtcaactgaagacgatggcggttggaaaccggagggccggaaatctatccgaggccaccatcacatatatatgccaggcgagccgagagctgtttctatcccagccgatgctcctcgaactgagtgctccggtaaagatctgcggggatctgcacggtcagttcaaggatctattgaggatattccagcagtgcggtgtgccaccgctttcaaactacctattccttggggattacgtggatcggggtcactgctccatcgagactttatcgctgctgttgacctataagcttcgctatccggagactttcttcctgctgcgcggcaatcatgaatcggcggatttgaatcgggtatatgggtttttcgacgagtgcaagcgacgatatagcatcaagttgtggcgctcctttgtcgattgctatgactgcatgccagtggccgccatcatagccgatcgcatcttttgcgtccacggcggactgagtccggatctgaataacctggatgacatccggcggctgaatcgccccaccgatgtgcccagcgatgggctgctgtgcgatttgctttggtcggatccggatgagaccaccggaacgtgggcgtccaacgatcgaggtgtcagcttcacctttggagccaacatagtggagggcttcctcatgcagcacaagtttaacctgattgtccgcgcccaccaagtggtcgaggatggctacgagttcttcgccgaccgccagttggtcaccattttctcggccccgaactactgcgacatctttgataactgcggagctgttctggtggtggacgccaaactggtctgccactttgtcatcatccgtccgagaccgttttcgcgacccacgggctttgagtcggatagtggatctacagctacggcgaccaatggaccaccgccgtccatgagggagaagaggctttattag

SEQ ID NO: 89522 - protein, 346 aa, Drosophila melanogaster
MSRRSTVLSTGKESSKEEKNRMSQLDVIIGQLKTMAVGNRRAGNLSEATITYICQASRELFLSQPMLLELSAPVKICGDLHGQFKDLLRIFQQCGVPPLSNYLFLGDYVDRGHCSIETLSLLLTYKLRYPETFFLLRGNHESADLNRVYGFFDECKRRYSIKLWRSFVDCYDCMPVAAIIADRIFCVHGGLSPDLNNLDDIRRLNRPTDVPSDGLLCDLLWSDPDETTGTWASNDRGVSFTFGANIVEGFLMQHKFNLIVRAHQVVEDGYEFFADRQLVTIFSAPNYCDIFDNCGAVLVVDAKLVCHFVIIRPRPFSRPTGFESDSGSTATATNGPPPSMREKRLY

SEQ ID NO: 89523 - DNA, 1011 bp, Drosophila melanogaster
  CDS (1)..(1011)
atggccgtggatacactgcacagtttacatttcgcggggcagttgtcgaatagcgaagcgaatgctgactaccgtctgcctggtgccctgaatctgaacgatttgctcaataaactgatgagctttcgacgctcaaagatgcaaagacttccattgttggagtcagaagtgaacttactgtgcaccctggcacgtgaacttttcctggacgagcccatgttgctcaatgttccggcacccattcgagttgtgggcgacatacacgggcagttttatgatctgctgaagatcctcgatcaatgcggatatccgccgcagacacggtatctatttctcggggattacgtggacaggggcaagaattcggtggaaacgatcaccctgctcttggcactgcgcgtcaagttcccaaagcatatttacctactgcgcggaaatcacgaatcgcagtcggtgaatcgagtctatggattctttgacgagtgcaagcggcgctacacggtgaagctgtggaaaacctttgtcgattgctacaactgcatgcccgtggcagccatcatttcccatcgcatcttctgttgccacggcggactgagtccgcagctgaaggagctgagcaacatcgaatcgattgcccgtcccactgaagtgcccgaaacgggtctgctatgcgatctgttgtggagcgatccggatcgctatggattcggctggacatcgagtgatcgaggtgttagctatctctatggtcgcgatgtcctcgagaagtttctgcaaaagaacgacttcgatctggtgtgtcgtgcccaccaggtggtggaggatggatacgagttctttgccaaacgccaattggtcaccgtcttctcggcacccaactattgtggattgtacgacaatgcaggagcttcaatgggcgtggacaaggacctagttatctctttcgatatacagcggggtgacattcgaagaatcgtggttagaaatgagagcgtttctcccataagttga

SEQ ID NO: 89524 - protein, 336 aa, Drosophila melanogaster
MAVDTLHSLHFAGQLSNSEANADYRLPGALNLNDLLNKLMSFRRSKMQRLPLLESEVNLLCTLARELFLDEPMLLNVPAPIRVVGDIHGQFYDLLKILDQCGYPPQTRYLFLGDYVDRGKNSVETITLLLALRVKFPKHIYLLRGNHESQSVNRVYGFFDECKRRYTVKLWKTFVDCYNCMPVAAIISHRIFCCHGGLSPQLKELSNIESIARPTEVPETGLLCDLLWSDPDRYGFGWTSSDRGVSYLYGRDVLEKFLQKNDFDLVCRAHQVVEDGYEFFAKRQLVTVFSAPNYCGLYDNAGASMGVDKDLVISFDIQRGDIRRIVVRNESVSPIS

SEQ ID NO: 89525 - DNA, 906 bp, Encephalitozoon cuniculi GB-M1
  CDS (1)..(906)
atgatagaaggctatcttgagaggctgttcaaatgcaatttgcttgcagaggcagaggtaaaacacctgtgcgagacggcgaccgaaatactgatgagggaggaaaatgttgtcaatgtcaaggcgcctgtgacgatatgtggggatgtgcatgggcagttctacgacctgatggagttgttcaaagttggaggccttcccccgtatacaaactacctgtttatgggagactatgtggatagggggtaccattcagtcgagacgatctctatcctgctgtgcttgaaagtgaagtatcccagcagagtatggctgctcagagggaaccacgagagcaggcagataacccaggtgtatgggttctatgacgaatgtgttaggaagtacggaacatctcttgtatggaggtacttcactgatctcttcgactatctgcctgttgcagccattgtcggagacgacacgttctgctgccacgggggactaagcccgtcgttcgacacgcttgaccagctgaaggccattgaccggaaggttgagattccccatgagggtcccatgtgcgatctgctctggtctgaccccgacgagaaggctggatgggggccctctcccagaggtgctggatttacgttcggtaaggacataacagatgccttcaacgagagaaacgggctgaagatgatatgcagggcccaccagcttgtgatgaatggatacaactggagccacgaaaagggatgtgtcacgatattcagtgcgccaaactactgctatagatgtgggaacctggcgacgctcatggagatggacgagcatggggcatacagcttcacgcagttcgaaccttcccccacaaagatcgagactcttgtctcgaccaaaatcccagactatttcttgtag

SEQ ID NO: 89526 - protein, 301 aa, Encephalitozoon cuniculi GB-M1
MIEGYLERLFKCNLLAEAEVKHLCETATEILMREENVVNVKAPVTICGDVHGQFYDLMELFKVGGLPPYTNYLFMGDYVDRGYHSVETISILLCLKVKYPSRVWLLRGNHESRQITQVYGFYDECVRKYGTSLVWRYFTDLFDYLPVAAIVGDDTFCCHGGLSPSFDTLDQLKAIDRKVEIPHEGPMCDLLWSDPDEKAGWGPSPRGAGFTFGKDITDAFNERNGLKMICRAHQLVMNGYNWSHEKGCVTIFSAPNYCYRCGNLATLMEMDEHGAYSFTQFEPSPTKIETLVSTKIPDYFL

SEQ ID NO: 89527 - DNA, 1386 bp, Drosophila melanogaster
  CDS (1)..(1386)
atgggcgacttcgatctgaatgtggacagcttgatacagcggctgctggagaactttaaaaaacaaaaagaggccgaagagcacgcccagaagctgctaatcgctcaacaattggccgccgccggcggagcatccggcgcatctgccacatcgcccacatccagcagcaattactcgtcgatggcggcggtggcctcctttggatccggatacggatcgggatctggtgctggtgctcctggtgccggcgctggcccaggatccagccatgatccgctcgacgatctcaccgaacagcagcgccgtctgctccagcaatactcgatatcgccgcccagcgagacgatgatatcggccgatggcgaccagatcaccgtccatcatccgcgcgaggagcccaagaaatccagattgaaactgcgcgattttttcgtcgccgagtttgtgcgcagctgccgaacgggcaaacaggtccagatgacggaggcggaggtgcgtggcctctgtctcaagtcgcgcgagatcttcttgcaacagcccatcctgctggaactggaggcaccgctgatcatctgcggcgacatccacggccagtacacagacctgttgcgcctgttcgagtacggcggattccctccggctgccaactacttgttcctcggcgactacgtcgatcggggcaagcagtccctggagaccatctgtctgctgctggcctacaagatcaaatatccggagaacttcttcttgttgcgcggcaaccacgagtgcgccagtattaataggatttacggcttctacgatgagtgcaagcgccgatacaatgtcaaactgtggaagactttcacagattgcttcaactgtctgccggtagccgccattattgacgaaaagatcttctgctgccacggcggcctcagtcccgatcttcagggcatggagcagatccgtcgcctaatgcgacccacagatgtgccggataccgggttactgtgcgatcttctgtggagtgatcccgacaaggatgttcagggttggggcgagaatgatcgcggtgtgagcttcaccttcggtgtggatgtggtctccaagtttttgaaccgccacgagctggacttgatctgccgtgcacatcaggttgtggaggatggctatgagttctttgcgcgtcggcaactggtcacgttgttctcggcgcccaattactgtggagagttcgacaatgccggcggaatgatgaccgtggacgacacgctgatgtgctcattccagatcctgaaaccatccgagaagaaggccaagtatctgtacagcggaatgaactcgtcgcgacccacaacaccgcagcgcagcgccccaatgcttgcgaccaacaagaagaaataa

SEQ ID NO: 89528 - protein, 461 aa, Drosophila melanogaster
MGDFDLNVDSLIQRLLENFKKQKEAEEHAQKLLIAQQLAAAGGASGASATSPTSSSNYSSMAAVASFGSGYGSGSGAGAPGAGAGPGSSHDPLDDLTEQQRRLLQQYSISPPSETMISADGDQITVHHPREEPKKSRLKLRDFFVAEFVRSCRTGKQVQMTEAEVRGLCLKSREIFLQQPILLELEAPLIICGDIHGQYTDLLRLFEYGGFPPAANYLFLGDYVDRGKQSLETICLLLAYKIKYPENFFLLRGNHECASINRIYGFYDECKRRYNVKLWKTFTDCFNCLPVAAIIDEKIFCCHGGLSPDLQGMEQIRRLMRPTDVPDTGLLCDLLWSDPDKDVQGWGENDRGVSFTFGVDVVSKFLNRHELDLICRAHQVVEDGYEFFARRQLVTLFSAPNYCGEFDNAGGMMTVDDTLMCSFQILKPSEKKAKYLYSGMNSSRPTTPQRSAPMLATNKKK

SEQ ID NO: 89529 - DNA, 924 bp, Drosophila melanogaster
  CDS (1)..(924)
atgtccgactacagcgacctggaccgacagatcgagcaactgaagcgctgcgagatcatcaaggagaacgaggtgaaggccctgtgcgccaaagcccgcgagatcctggtggaggagggcaacgtgcagcgtgtggactcgccagtgaccgtgtgcggcgacatccacggtcagttctacgacctgaaggagctgttcaaggttggcggcgatgtgcccgagaagaactacctgtttatgggcgatttcgtggaccgcggctactatagtgtggagacgtttctgctgctgttggcgctgaaggtgcgctatccggaccgaatcacgctgatccggggcaaccatgagtcgcgccaaatcacacaggtctacggcttttacgatgagtgcctgcgcaagtacggatcgacggccgtgtggcggtactgcacggagatctttgactacctcagcctttcggcgatcatcgacggcaaaatattctgcgtgcacggcgggctgtcgccgtccatccagtacctcgaccagattcgcagcatcgaccggaagcaggaggtgccgcacgacgggcccatgtgcgacctgctttggagcgatccggaggaccagactggctggggcgtgtcgccgcgcggcgctggctatctctttggctcggacgtggtctcccagttcaaccgcacgaacgatatcgacatgatttgccgtgcacaccagttggtaatggagggcttcaagtggcacttcaacgaaaccgtcctgaccgtctggtcggcacccaattactgctatcgctgcggcaatgtagctgccatcctggagctgaatgagtacctgcaccgcgacttcgtcatctttgaggcagctccgcaagagagtcgcggcattccctcgaagaagcctcaggcggactactttctctaa

SEQ ID NO: 89530 - protein, 307 aa, Drosophila melanogaster
MSDYSDLDRQIEQLKRCEIIKENEVKALCAKAREILVEEGNVQRVDSPVTVCGDIHGQFYDLKELFKVGGDVPEKNYLFMGDFVDRGYYSVETFLLLLALKVRYPDRITLIRGNHESRQITQVYGFYDECLRKYGSTAVWRYCTEIFDYLSLSAIIDGKIFCVHGGLSPSIQYLDQIRSIDRKQEVPHDGPMCDLLWSDPEDQTGWGVSPRGAGYLFGSDVVSQFNRTNDIDMICRAHQLVMEGFKWHFNETVLTVWSAPNYCYRCGNVAAILELNEYLHRDFVIFEAAPQESRGIPSKKPQADYFL

SEQ ID NO: 89531 - DNA, 975 bp, Strongylocentrotus purpuratus
  CDS (1)..(975)
atggcggatttggaattagatatcgacagcatactcactcgtctcctcgaagcaagaggtagaccgtacaaatcagtaaatctaacagaagcagaagtaagaggcctatgtgtcaaatcaagagaaatattccttagccaaccaatcttattagaattagaagctcctctcaaaatatgcggtgacattcacggtcagtacacagatctacttaggttattcgagtacggcggtttcccacccgattccaactaccttttcctgggtgactacgtggacagaggcaagcagtccctggagacggtctgccttctcctctcctacaagatcaagtacccagagaacttcttcctcctcagaggcaaccatgaatgtgccagcatcaaccgaatctacggcttctacgacgaatgtaagaggcggtacaacatcaaaatctggaaaacatttacagattgtttcaactgcttgcctgtggctgccatcgttgatgagaaaatcttctgctgtcatggaggcctttcacctgaccttcagtgtatggagcagatcaggagaataatgagaccaaccgatgtcccagaaacaggtcttttgtgtgacctgctgtggtcagatcctgacaaggacgtatcagggtggggcgagaatgaccgtggcgtctcgttcacatttggcaacgacatcgtgggcaagttcctcaacagacatgatctagacttgatctgcagggctcaccaggtcgttgaagacgggtacgagttctttgccaagcgtcagctggtgacgctgttctcggcccccaactactgtggagagtttgacaatgcaggaggaatgatgagtgtggatgaaacgctcatgtgctcatttcagatcctgaaaccatcagagaagaaggccaagtaccagtatgccggcatcaactccggcagacctggcacccctcctaaaggacaggcaaagaagaagtag

SEQ ID NO: 89532 - protein, 324 aa, Strongylocentrotus purpuratus
MADLELDIDSILTRLLEARGRPYKSVNLTEAEVRGLCVKSREIFLSQPILLELEAPLKICGDIHGQYTDLLRLFEYGGFPPDSNYLFLGDYVDRGKQSLETVCLLLSYKIKYPENFFLLRGNHECASINRIYGFYDECKRRYNIKIWKTFTDCFNCLPVAAIVDEKIFCCHGGLSPDLQCMEQIRRIMRPTDVPETGLLCDLLWSDPDKDVSGWGENDRGVSFTFGNDIVGKFLNRHDLDLICRAHQVVEDGYEFFAKRQLVTLFSAPNYCGEFDNAGGMMSVDETLMCSFQILKPSEKKAKYQYAGINSGRPGTPPKGQAKKK

SEQ ID NO: 89533 - DNA, 987 bp, Nasonia vitripennis
  CDS (1)..(987)
atgtctgaactcgagaagctcaacatcgacaacataatcgcgcgactcttggaagtgagaggagcgcgaccaggcaaaaatgttcagttaacagagggagagattcgaggactgtgcctcaagtcccgtgaaatttttctatcgcagcccattcttctggaactcgaggcacccctcaagatatgcggtgacattcatggacaatactatgacctgctccgactctttgagtatggaagctttcctccagagagcaattacctcttcctaggtgattacgtagacagaggaaagcagtcgttagaaaccatttgcctcctcctcgcctacaagatcaagtacccagagaatttcttcctgctcagaggaaatcatgagtgtgcatccatcaacaggatatacggtttctacgatgaatgcaaacgtcgttacaacatcaaattgtggaaaaccttcacagactgcttcaactgcttgccagttgcggcgatcgtggacgagaaaattttctgctgtcatggcggcttgagtcccgatctccagagtatggaacagatcaggcgcattatgcgacccaccgacgttcccgatcagggccttctttgcgatctgctctggtcggatccagacaaagacacgatgggctggggcgaaaacgatcgtggtgtctccttcacgtttggtgccgaagtcgtggccaaattccttcacaaacatgattttgaccttatttgtcgtgcgcatcaggttgtcgaggatggctacgagttctttgctaagcgacagttggtgacgttgttctcggcgcctaactactgtggcgagttcgacaacgcaggcgccatgatgtccgtggacgatacgctcatgtgcagtttccagatcctgaagcccgctgacaagaggaaattcacgtatggtggcctgaacgctgggcggccagtcacgccgccacgcggcgccaacaacaagaacaaaaagaagtga

SEQ ID NO: 89534 - protein, 328 aa, Nasonia vitripennis
MSELEKLNIDNIIARLLEVRGARPGKNVQLTEGEIRGLCLKSREIFLSQPILLELEAPLKICGDIHGQYYDLLRLFEYGSFPPESNYLFLGDYVDRGKQSLETICLLLAYKIKYPENFFLLRGNHECASINRIYGFYDECKRRYNIKLWKTFTDCFNCLPVAAIVDEKIFCCHGGLSPDLQSMEQIRRIMRPTDVPDQGLLCDLLWSDPDKDTMGWGENDRGVSFTFGAEVVAKFLHKHDFDLICRAHQVVEDGYEFFAKRQLVTLFSAPNYCGEFDNAGAMMSVDDTLMCSFQILKPADKRKFTYGGLNAGRPVTPPRGANNKNKKK

SEQ ID NO: 89535 - DNA, 987 bp, Nasonia vitripennis
  CDS (1)..(987)
atggctgcattttggttattagcagcagcttcatcatcatcatcatcatcatcatcatcatcatcatcgtccaaaatgtcagacgtcgaccagtggatcgagatcgccaaggattgcaaatacctgccggaaaacgatctgaagaaactctgcgacctggtctgcgacatcctcctcgaggagtcgaatatccagcctgtctcgaccccggtgaccgtctgcggtgatatccacggtcagttctatgatttagaagagctttttcgtaatggaggacctgtgcctgaaacaaattacatatttatgggagattttgtcgaccgaggttattatagcttagaaacacttacccgtctattaactttaaaagccaaatggtcagacaggataacattacttcgtggaaaccatgaatcaagacaaatcacacatgtatatggtttctatgatgagtgtttaaacaaatatggaaatgtgaatgcatggaaatattgctgcagggtatttgatctgctcacaatcgctgccttaatcgatgaacaagtcctctgtgtacatggcggtttatcaccagctattaggaccttagatcaaattagaacaatcgataggaaacaagaaatcccacacaaaggagcattctgtgatttggtttggtcggatccagaagatgttaagacgtggacagttagtcctcggggagctggctggctttttggagcaagcattacacacttgttcatggagataaacgacctcaaacttatttgcagagctcatcaactagtaaatgaaggctttaggtacatgtttgatgacaagttggtaacggtgtggtcggctcccaactattgttatcgctgtggaaatgtggccagcattctgaaattcacaacggctgacgagaagaacccggtgctatttgacgcggtgccaaattccgagcgagtgatccctccctcgatcaccactccctacttcttgtga

SEQ ID NO: 89536 - protein, 328 aa, Nasonia vitripennis
MAAFWLLAAASSSSSSSSSSSSSSKMSDVDQWIEIAKDCKYLPENDLKKLCDLVCDILLEESNIQPVSTPVTVCGDIHGQFYDLEELFRNGGPVPETNYIFMGDFVDRGYYSLETLTRLLTLKAKWSDRITLLRGNHESRQITHVYGFYDECLNKYGNVNAWKYCCRVFDLLTIAALIDEQVLCVHGGLSPAIRTLDQIRTIDRKQEIPHKGAFCDLVWSDPEDVKTWTVSPRGAGWLFGASITHLFMEINDLKLICRAHQLVNEGFRYMFDDKLVTVWSAPNYCYRCGNVASILKFTTADEKNPVLFDAVPNSERVIPPSITTPYFL

SEQ ID NO: 89537 - DNA, 990 bp, Nasonia vitripennis
  CDS (1)..(990)
atggcggacgtcgagctgaacatcgacaacctgatacagaggctgctcgaagtgcgaggatgtcgaccaggcaagtctgttattatgacagaggctgaagtaagaggcctctgcctaaagtcacgagaaatcttcctccaacaaccaatacttttggaacttgaggcacccctgaagatttgtggagacattcatggccaatacactgacttactgcggctctttgagtacggcggctttccacctgaagcaaattacctattcctaggtgactacgttgacagaggcaaacagtcgctggagacaatatgtttattacttgcatacaagattaagtacccagaaaactttttcttattgagaggaaatcacgaatgtgcaagcataaacaggatatatggtttttatgatgagtgcaagcgcaggtataacatcaaattatggaaaactttcacagactgtttcaattgcttaccaattgctgctatcatagacgagaaaatattctgttgtcatggtggacttagtcctgatctgcagggcatggaacagattagacgaatcatgcgcccgacagacgtacccgacactggtctcctctgcgacttgctgtggtcggatccagataaggatgttcagggctggggtgagaacgatagaggggtgtccttcacgttcggaccggacgtggtgtcaaagttcctgaaccgtcacgacatggacctgatctgccgagcgcaccaggtcgtcgaggacggctacgaattcttcgcaaaacgacagctcgtcaccctcttctccgcgcccaactactgtggcgaattcgacaatgccggcggcatgatgagcgttgacgaaaccctcatgtgcagcttccagattttgaaaccgtcagaaaagaaggccaagtatcagtacggtggaatgaacgccggccaaacaggcagccgaccatcaactccacaaagaaatccagcgaagaaaaaatga

SEQ ID NO: 89538 - protein, 329 aa, Nasonia vitripennis
MADVELNIDNLIQRLLEVRGCRPGKSVIMTEAEVRGLCLKSREIFLQQPILLELEAPLKICGDIHGQYTDLLRLFEYGGFPPEANYLFLGDYVDRGKQSLETICLLLAYKIKYPENFFLLRGNHECASINRIYGFYDECKRRYNIKLWKTFTDCFNCLPIAAIIDEKIFCCHGGLSPDLQGMEQIRRIMRPTDVPDTGLLCDLLWSDPDKDVQGWGENDRGVSFTFGPDVVSKFLNRHDMDLICRAHQVVEDGYEFFAKRQLVTLFSAPNYCGEFDNAGGMMSVDETLMCSFQILKPSEKKAKYQYGGMNAGQTGSRPSTPQRNPAKKK

SEQ ID NO: 89539 - DNA, 924 bp, Nasonia vitripennis
  CDS (1)..(924)
atggccgattccagtgatttggatcggcagatagaacagctcaagaaatgtgagatcataaatgaggctgaggtcaaagcactgtgtgctaaagctcgtgagattcttattgaagagagcaatgtacagcgagtagattcaccagtcactgtctgtggagatatacatggacagttttatgatcttaaggaactcttcaaagttggtggtgatgttccagaaacaaattacctgttcatgggagactttgtagacagaggatttttcagtgtagaaacgtttcttcttttactagcacttaaagtccgttatccagatagaattacattaattagaggtaaccacgaatcaagacagattactcaagtttatggtttttatgatgaatgtcttcgcaaatacggtagcaacacagtgtggcgtcactgcacagaaatctttgattacctttctctgtctgcaatcattgatggaaaaatcttctgtgtgcatggtggtctttcccccagtatacaaactcttgatcaaattcgtataatagatagaaagcaagaagttcctcacgacggtcctatgtgtgatcttttgtggtcggatcccgaggagacccaaggctggggcgtttcaccacgtggagccggatatctgttcggtagtgatgtcgtcgctcagttcaattcagcaaacgacattgatatgatatgtcgagcacatcaactggtaatggaaggatacaaatggcatttcaacgaaactgtacttaccgtatggtcggcaccgaactactgttacagatgtggtaacgtggcagctatattagaactgaacgaacatttgcaaagggatttcacgatattcgaggcagccccccaggagagcagaggaacccctagcaaaaagccccaagccgattattttctgtga

SEQ ID NO: 89540 - protein, 307 aa, Nasonia vitripennis
MADSSDLDRQIEQLKKCEIINEAEVKALCAKAREILIEESNVQRVDSPVTVCGDIHGQFYDLKELFKVGGDVPETNYLFMGDFVDRGFFSVETFLLLLALKVRYPDRITLIRGNHESRQITQVYGFYDECLRKYGSNTVWRHCTEIFDYLSLSAIIDGKIFCVHGGLSPSIQTLDQIRIIDRKQEVPHDGPMCDLLWSDPEETQGWGVSPRGAGYLFGSDVVAQFNSANDIDMICRAHQLVMEGYKWHFNETVLTVWSAPNYCYRCGNVAAILELNEHLQRDFTIFEAAPQESRGTPSKKPQADYFL

SEQ ID NO: 89541 - DNA, 915 bp, Anopheles gambiae str. PEST
  CDS (1)..(915)
atgccagactacagtgacctggaccgacagatcgagcagctgaagcgatgcgaaatcatcaaggagcacgaggtgaaggccctgtgcgcgaaggcgcgcgaaattctggtcgaggagggcaacgtgcagcgggtcgactcgccggtaacggtgtgcggtgacattcacggccagttctacgaccttaaggagctgttcaaggtcgggggcgacgtgccggagacgaactacctcttcatgggcgactttgtcgaccggggatactacagtgtggaaacattcctgctactgctcgcgctgaaggtacgctacccggaccggatcacgttgatccgcggtaatcacgaatcgcgccagatcacacaggtgtacgggttctacgacgagtgcatacgcaagtacggctcggtcacggtgtggcgctactgcaccgaaatcttcgactacctttccctgtccgccatcatcgatgggaaaattttctgcgtccacggcgggctgtccccctcgatacagtatttggatcagatccgctcgatcgaccgcaagcaggaggtgccccacgacggtccgatgtgcgatctgctgtggagcgacccggaagacacacacggctggggcgtatcgccccggggggccggctatctgttcggctccgacgtcgtgtcacagtttaatgccgccaacgatatcgacatgatatgccgggcgcatcagctcgtgatggagggttacaagtggcactttaacgaaaccgtactcaccgtctggtcggcacccaactattgctatcggacgcattatagcagggaactgaacgaaaaccttcagcgcgactttaccatcttcgaagcagcaccacaggaaagccgcggaataccgtcgaaaaaacctcaggcagactacttcctttaa

SEQ ID NO: 89542 - protein, 304 aa, Anopheles gambiae str. PEST
MPDYSDLDRQIEQLKRCEIIKEHEVKALCAKAREILVEEGNVQRVDSPVTVCGDIHGQFYDLKELFKVGGDVPETNYLFMGDFVDRGYYSVETFLLLLALKVRYPDRITLIRGNHESRQITQVYGFYDECIRKYGSVTVWRYCTEIFDYLSLSAIIDGKIFCVHGGLSPSIQYLDQIRSIDRKQEVPHDGPMCDLLWSDPEDTHGWGVSPRGAGYLFGSDVVSQFNAANDIDMICRAHQLVMEGYKWHFNETVLTVWSAPNYCYRTHYSRELNENLQRDFTIFEAAPQESRGIPSKKPQADYFL

SEQ ID NO: 89543 - DNA, 870 bp, Anopheles gambiae str. PEST
  CDS (1)..(870)
ctgccggaaaatgatctcaagaagctgtgcgacatcgtctgcgagctgctgatcgaggaatcgaacgtacagcccgtcagcacacccgtcaccgtttgcggcgatatccatggacagttttacgatttggaagagttgttccgcaccggtggccaagtgccggacacgaactacatctttatgggagactttgtggatcggggatactacagtctggaaacgttcacgcgcttgcttacgctaaaggcacggtacccaaacaaaatcacgctgctgcgaggaaaccacgagtcgcgccaaatcaccaaagtgtacggattttacgatgaatgttacacgaagtacggtaacgctagtccgtggaagtattgctgtagagtgtttgaccttctaacaattgccgcgattattgaagagcaggtgctttgcgttcacggtggccttagtccggaaatcaaaacgctcgatcaaattcgaactattaaccgtgaccaggagataccgcacaagggcgcattttgtgatctggtttggtcggatccggacgacatcgatacgtgggcggagagtccgcgcggtgccggctggctgttcgggtcggcggtgacgcgcgactttatggagatcaacatgctgaagatgatctgccgggcgcatcagctagtacatgagggtattaactaccagttcgaccgaaagctggtgacggtctggtcggcaccgaactactgctaccgctgtggcaatgtcgcctcgatactagagtttaaagaaaatgacattgatgatccaaaggtgaaaatattcaaagccgtcccgaacgaagaacgcgtcataccaagccagcgcattacgccttatttcctgtga

SEQ ID NO: 89544 - protein, 289 aa, Anopheles gambiae str. PEST
LPENDLKKLCDIVCELLIEESNVQPVSTPVTVCGDIHGQFYDLEELFRTGGQVPDTNYIFMGDFVDRGYYSLETFTRLLTLKARYPNKITLLRGNHESRQITKVYGFYDECYTKYGNASPWKYCCRVFDLLTIAAIIEEQVLCVHGGLSPEIKTLDQIRTINRDQEIPHKGAFCDLVWSDPDDIDTWAESPRGAGWLFGSAVTRDFMEINMLKMICRAHQLVHEGINYQFDRKLVTVWSAPNYCYRCGNVASILEFKENDIDDPKVKIFKAVPNEERVIPSQRITPYFL

SEQ ID NO: 89545 - DNA, 915 bp, Anopheles gambiae str. PEST
  CDS (1)..(915)
atgcttaaagatttagaccaatggatcgagcaactgaacgagtgcaaacaattgaccgaatcgcaagtgaaaattctgtgtgataaggcgaaggaaattctatcgaaggagtccaacgtacaagaggtaaaatgcccggttacagtatgcggagacgttcatggacagttccacgacctgatggagctgtttcggataggtggacgatcgccggacactaactatctgttcatgggcgattacgtcgatcgtggctattattcggtagaaaccgtaactctgttggtagcactgaaggtacgatatcgcgaaagaattacgatccttcgcggtaatcacgagtctcggcaaattacgcaagtttacggtttctacgacgaatgtctgcggaagtacggcaatccgaatgtatggaagttttttacggatttgttcgactacttgccgctgacggctctggtagatggacagatattctgcctgcacggagggcttagtccatcgatcgatacgcttgatcacattcgagcactggacagacttcaggaggtgccacacgaaggtcccatgtgcgatctgctctggtccgatccggatgaccgaggcggttggggcatttctccacgaggtgcaggctacacatttggacaggacatttcggaactgttcaatcacacaaatgggctgacattagtgtcccgagcgcatcagttagtaatggaaggatacaattggtgccacgatcgtaacgtggtcacaattttctctgcaccgaactactgctaccgttgtggaaatcaggcagcattgatggaactggacgatgcactcaagttttcattcctacaatttgatccagctccgcgtcgtggtgaaccacacgtaaccagaagaacgccggattatttcctttaa

SEQ ID NO: 89546 - protein, 304 aa, Anopheles gambiae str. PEST
MLKDLDQWIEQLNECKQLTESQVKILCDKAKEILSKESNVQEVKCPVTVCGDVHGQFHDLMELFRIGGRSPDTNYLFMGDYVDRGYYSVETVTLLVALKVRYRERITILRGNHESRQITQVYGFYDECLRKYGNPNVWKFFTDLFDYLPLTALVDGQIFCLHGGLSPSIDTLDHIRALDRLQEVPHEGPMCDLLWSDPDDRGGWGISPRGAGYTFGQDISELFNHTNGLTLVSRAHQLVMEGYNWCHDRNVVTIFSAPNYCYRCGNQAALMELDDALKFSFLQFDPAPRRGEPHVTRRTPDYFL

SEQ ID NO: 89547 - DNA, 939 bp, Magnaporthe grisea 70-15
  CDS (1)..(939)
atggacaccaacatggaggacgtcgggcgcgtgccctcagagcttgccccgcaaccctcctctgagcccactacgattccaacattggatggatggattgagagcttgatggcatgcaagcagctggtcgaggccgatgtccagaggttgtgcgagaaggcgcgcgaagtcttgcaggatgagtccaacgtccagccagttaaatgccctgtcacagtctgcggtgacatacatgggcagttccacgacctcatggagcttttcaagattggtggaccaaaccccgacacaaactatcttttcatgggcgactatgtagacagaggttactactcggtagagacggtcactcttcttgtcgcgctcaagatccgttacccgcaacgtatcaccatcctccgtggaaaccacgagtctcgccagatcacacaggtgtacggcttctacgacgagtgccttcgcaaatacggcaacgccaatgtttggaagtactttaccgacttgttcgactacctgcctcttacagcgcttatcgacaaccagatcttttgtctgcatggaggtctgtcgcccagcatcgacacactcgacaacattcgtgctctcgacaggatccaggaggttccccacgagggacccatgtgcgatctgctctggtcggaccccgacgatcgctgcggttggggaatctcgccccgtggtgccggctacacgtttggccaggacatctctgaggcgttcaaccacaacaatggcctgacgctgattgccagggctcatcagctggtaatggagggatacaactggtcgcaggaccgtaacgtggtaacgatcttttcagccccgaattactgctaccgctgtggtaaccaagctgccatcatggagattgacgagcacctcaaatacacctttctctaccaacgttatcctttgtag

SEQ ID NO: 89548 - protein, 312 aa, Magnaporthe grisea 70-15
MDTNMEDVGRVPSELAPQPSSEPTTIPTLDGWIESLMACKQLVEADVQRLCEKAREVLQDESNVQPVKCPVTVCGDIHGQFHDLMELFKIGGPNPDTNYLFMGDYVDRGYYSVETVTLLVALKIRYPQRITILRGNHESRQITQVYGFYDECLRKYGNANVWKYFTDLFDYLPLTALIDNQIFCLHGGLSPSIDTLDNIRALDRIQEVPHEGPMCDLLWSDPDDRCGWGISPRGAGYTFGQDISEAFNHNNGLTLIARAHQLVMEGYNWSQDRNVVTIFSAPNYCYRCGNQAAIMEIDEHLKYTFLYQRYPL

SEQ ID NO: 89549 - DNA, 990 bp, Apis mellifera
  CDS (1)..(990)
atggctgaatctgataaacttaatattgacaacatcatagctcggctcttggaagtgcgtggagccaggccaggaaaaaatgttcaattgacagaaggagaaataaaaggactctgcttgaagtcacgtgaaatttttctatcgcaacctattctgttagaacttgaagcaccacttaaaatatgtggtgatattcatggtcaatattatgatttattacgactatttgaatatggtggatttccaccagaaagcaactatctatttctaggagattatgttgatagaggaaaacagtctttagagacaatttgtctccttcttgcctataaaatcaaatatcctgaaaactttttcttacttcgtggaaatcatgaatgtgcatccattaataggatatatggattttatgatgaatgtaaacgacgttataacattaaattatggaaaacatttacggattgtttcaattgtttacctgtcgcagcaatagttgatgaaaaaatattttgttgccatggtggccttagtccagatctacaaaatatggaacagatcagacgtatcatgcgaccaacagatgtacctgatcaaggcttattgtgtgatttattatggtctgatccagacaaagatacaatgggttggggagaaaatgatcgtggcgtatcgtttacatttggagctgaagtcgttgccaaatttttacataaacatgattttgacctcatatgtcgcgcccatcaggtagtagaagatggctatgaatttttcgcaaagagacagttagttaccttgttttcggcaccaaattattgtggcgagttcgataatgctggagctatgatgtccgtagatgaaactctaatgtgtagtttccaaattctaaaaccagccgacaagaaaaaattaacgtatggaggcttgaacgcaaatagaccagtgacacccccgcgaggtggtggaaataacaaaagcaagaagaagtga

SEQ ID NO: 89550 - protein, 329 aa, Apis mellifera
MAESDKLNIDNIIARLLEVRGARPGKNVQLTEGEIKGLCLKSREIFLSQPILLELEAPLKICGDIHGQYYDLLRLFEYGGFPPESNYLFLGDYVDRGKQSLETICLLLAYKIKYPENFFLLRGNHECASINRIYGFYDECKRRYNIKLWKTFTDCFNCLPVAAIVDEKIFCCHGGLSPDLQNMEQIRRIMRPTDVPDQGLLCDLLWSDPDKDTMGWGENDRGVSFTFGAEVVAKFLHKHDFDLICRAHQVVEDGYEFFAKRQLVTLFSAPNYCGEFDNAGAMMSVDETLMCSFQILKPADKKKLTYGGLNANRPVTPPRGGGNNKSKKK

SEQ ID NO: 89551 - DNA, 987 bp, Apis mellifera
  CDS (1)..(987)
atggcggatgtcgagttgaacgtcgacaacctgatacaaagattgttggaagtccgaggatgccgaccaggaaagaccgtcttaatgtcagagggagaggtgcgtggcctttgtctcaagtcacgggaaattttcctacaacaaccgatcctgctcgaattggaggcgccacttaagatctgcggtgatattcacggccaatacactgacttgttacgactatttgaatatggcggtttcccgccagaggcgaactacttatttcttggtgattacgtagacaggggcaaacaatcgttagagacgatatgcttgttgcttgcctacaaaatcaaatacccggagaatttcttcctattgcgaggcaatcacgaatgcgcaagcataaataggatatacgggttctacgacgagtgcaagaggcggtacaacattaaattatggaaaacgttcaccgattgcttcaattgtcttccaatcgcggcgatcatcgacgagaagatattttgctgtcatggaggtctcagtccagatcttcagaatatggaacaaatcaaaagaattatgcgtccgacagatgtacctgatactggccttctctgtgatttgttatggtcagatccagataaagaagttcagggatggggtgaaaatgatagaggtgtatctttcacatttggtccagatgtagtatcgaagtttttaaatcgtcatgatatggacttaatatgtagagcacatcaagtagtcgaagatgggtatgaattttttgcaaaaagacagttagttactttattttccgcaccaaattattgcggagaattcgacaatgccggaggaatgatgagtgttgacgaaactctaatgtgcagttttcagattttgaaaccatcagagaagaaagctaaataccagtacttaagtttgaacacgggtcaagccaccagaccatctacaccacaaaggaatccagccaaaaagaaatga

SEQ ID NO: 89552 - protein, 328 aa, Apis mellifera
MADVELNVDNLIQRLLEVRGCRPGKTVLMSEGEVRGLCLKSREIFLQQPILLELEAPLKICGDIHGQYTDLLRLFEYGGFPPEANYLFLGDYVDRGKQSLETICLLLAYKIKYPENFFLLRGNHECASINRIYGFYDECKRRYNIKLWKTFTDCFNCLPIAAIIDEKIFCCHGGLSPDLQNMEQIKRIMRPTDVPDTGLLCDLLWSDPDKEVQGWGENDRGVSFTFGPDVVSKFLNRHDMDLICRAHQVVEDGYEFFAKRQLVTLFSAPNYCGEFDNAGGMMSVDETLMCSFQILKPSEKKAKYQYLSLNTGQATRPSTPQRNPAKKK

SEQ ID NO: 89553 - DNA, 912 bp, Apis mellifera
  CDS (1)..(912)
atgtcagacatcgataaatggatggaacttgcaaaagaatgcaaatatcttcccgaaaatgatcttaagaaactttgtgacttggtatgtgacatattattagaagaatctaatattcaaccagtatctacaccggtaacagtgtgtggagatattcatggtcagttttacgatttagaagaattattccgtaatggaggcgctgtgcctgagacaaattatatatttatgggagattttgtagatagagggtattatagtgtagaaacatttacccgcctactcacacttaaagctaaatggtctgatagaataacattacttcgtggaaatcatgaatccagacaaattacccatgtttatggtttttatgatgagtgtcaaaacaaatatggcaatgctaatgcatggaaatactgttgtaaggtgttcgacttactcgcagttgctgccttaattgatgatcaagtactttgtgtgcatggtggattatctccagccattagaacgttagatcaaattaggacaattgaaagaaatcgagaaattccacataaaggtgctttttgtgatttagtttggtccgatccagaagatgtagaatcatggactattagtccgcgtggagcaggttggttatttggaagtaaagtaacatatgaatttatggaaatcaacgatcttaaacttatttgtagagctcatcaattggttcatgaaggttatagatatatgtttaatgataaacttgtaacagtatggtcagctccaaattattgttatcgctgtggtaatgtagctagtattttacagttcacaactgttgatcaaagaaatccagtgctattccaggcagtgcctgattccgaaagagtaattccacctttaaatattacaccatactttttgtga

SEQ ID NO: 89554 - protein, 303 aa, Apis mellifera
MSDIDKWMELAKECKYLPENDLKKLCDLVCDILLEESNIQPVSTPVTVCGDIHGQFYDLEELFRNGGAVPETNYIFMGDFVDRGYYSVETFTRLLTLKAKWSDRITLLRGNHESRQITHVYGFYDECQNKYGNANAWKYCCKVFDLLAVAALIDDQVLCVHGGLSPAIRTLDQIRTIERNREIPHKGAFCDLVWSDPEDVESWTISPRGAGWLFGSKVTYEFMEINDLKLICRAHQLVHEGYRYMFNDKLVTVWSAPNYCYRCGNVASILQFTTVDQRNPVLFQAVPDSERVIPPLNITPYFL

SEQ ID NO: 89555 - DNA, 1107 bp, Candida glabrata CBS 138
  CDS (1)..(1107)
atggatatggatatggatgttcctatgcatgatgcggttgatcaattgacgccgactgaaggtaatgcggaggctgccaatgacagcataggtgatgaggttgacgaggccttcaaggatgcgcatccttcgcaaggtgctgtgttggactctggcaaaggtggtaacaaagggtttgagctgaactccagcaacatcaatcagctggaccagtggatagaacacctgggcaagtgtgaaatactatcggaggacgatgtttccaagctttgtaagatggctgtggaggtcctgcagttcgaagagaacgttcaacctatcaacgttccagttaccatatgtggtgacgtgcatgggcagttccacgatttgatagaactattcaagatcggtggtccttgtccggacacaaactacttatttatgggtgattacgtagatagaggttactactctgtggaaaccgtgtcatatctagttgctatgaaggtaaggtatccacatagaattacgattctaagaggtaatcacgaatcaagacaaattacacaggtgtacgggttttacgatgaatgtctcaggaagtacggtagtgcaaacgtctggaagatgttcacagacctgttcgactacttcccaataacagcgctagtcgacaataagatcttctgtcttcacggtggtttgtctccaatgatagaaactgtcgaccaagtaagagaattgaacagaatacaagaagttccacacgagggtcccatgtgtgatctgctgtggtcagacccagatgatagaggcgggtggggtatcagtcctagaggtgctggtttcacctttggccaggacattagtgaacaattcaaccatacaaatgatctatctttagttgcaagagcacaccagctggtcatggaaggttacgcctggtcccatcaacaaaacgtcgttaccatattcagtgcaccaaactactgttatagatgtggtaaccaagccgcaataatggaggtcgacgaaaatcataatagacaatttttgcagtacgatccatctgtcagaccaggtgagcctacagttagtagaaagaccccagattacttcttatga

SEQ ID NO: 89556 - protein, 368 aa, Candida glabrata CBS 138
MDMDMDVPMHDAVDQLTPTEGNAEAANDSIGDEVDEAFKDAHPSQGAVLDSGKGGNKGFELNSSNINQLDQWIEHLGKCEILSEDDVSKLCKMAVEVLQFEENVQPINVPVTICGDVHGQFHDLIELFKIGGPCPDTNYLFMGDYVDRGYYSVETVSYLVAMKVRYPHRITILRGNHESRQITQVYGFYDECLRKYGSANVWKMFTDLFDYFPITALVDNKIFCLHGGLSPMIETVDQVRELNRIQEVPHEGPMCDLLWSDPDDRGGWGISPRGAGFTFGQDISEQFNHTNDLSLVARAHQLVMEGYAWSHQQNVVTIFSAPNYCYRCGNQAAIMEVDENHNRQFLQYDPSVRPGEPTVSRKTPDYFL

SEQ ID NO: 89557 - DNA, 978 bp, Candida glabrata CBS 138
  CDS (1)..(978)
atggacacggctagtaacaggaggggccctgatgagtggcttgagacggtgaagaagtgccaggcgctgacggagaacgagatgaagcagctgtgtgagatggtgaaggagctgctgatggaggagagcaacatccagccggtgatgacgcctgtgacggtgtgtggggatatccacgggcagttccacgatttgctggagcttttccggacctctggcgggtttccggacgacgatgtgaactatatattcctgggggactatgtggatcgtgggtactacagtttggagacgttcacgctgctgatgtgtttgaaagtgaagtacccggcgaagatcacgctggtgaggggcaaccacgagtcccgccagattacgcaagtgtacggtttttatgaggagtgtctgaacaagtacggctcgaccacggtgtggaagtactgctgccaagtgttcgacttcttgacactggcagccatcatagacggtaagatactgtgtgtgcacggtggtctgtctcccgagataaggatgctggaccagattagagtgctgtccagagcacaagaggtgccacacgagggtgggttttcggacttgctgtggagtgacccagacaacgtcgaggcatggcaagtatcacccagaggtgccgggtggctatttggcagcaaagtagctagagagttcaaccacgttaacggcctgaacctgatagccagagcgcaccagttggtcatggaaggtttcaagtatcatttccctgagaaagacgtagtaacagtatggtctgctccaaactactgctacagatgcggtaacgtagccagtgtaatgaaggtagacgaggacctggagcccactttcaagatattctctgcggtaccggatgactacataaaccaggacgcatcttccccgactactaacaacggaaactcaggttccaactcacagagagctggatacttcttgtaa

SEQ ID NO: 89558 - protein, 325 aa, Candida glabrata CBS 138
MDTASNRRGPDEWLETVKKCQALTENEMKQLCEMVKELLMEESNIQPVMTPVTVCGDIHGQFHDLLELFRTSGGFPDDDVNYIFLGDYVDRGYYSLETFTLLMCLKVKYPAKITLVRGNHESRQITQVYGFYEECLNKYGSTTVWKYCCQVFDFLTLAAIIDGKILCVHGGLSPEIRMLDQIRVLSRAQEVPHEGGFSDLLWSDPDNVEAWQVSPRGAGWLFGSKVAREFNHVNGLNLIARAHQLVMEGFKYHFPEKDVVTVWSAPNYCYRCGNVASVMKVDEDLEPTFKIFSAVPDDYINQDASSPTTNNGNSGSNSQRAGYFL

SEQ ID NO: 89559 - DNA, 930 bp, Kluyveromyces lactis NRRL Y-1140
  CDS (1)..(930)
atgtcagataatgggccagatttgtggcttgagaagatcaagaaatgtcaggctttgacggagtctgagatgaaacagctatgcgagatgatgaaggaactcttaatggaagaatcgaatattcagccggttcaatcgccggtgactgtttgtggtgatattcacggacaatttcatgaccttttagaactattcagaactgctggtgggtttcctgatcaagtaaactatatttttcttggtgactatgtagatcgtggttattacagtttggagacgttcacacttcttatgtgtttgaaagtgaaatatccttccagaattactttggttagaggaaatcatgagtcgaggcaaattacacaagtttatgggttttatgaggaatgtttaaataagtatggttccacaacggtttggaagtattgttgtcaagtgtttgatttcttaactttggcagctattattgacgggaaaattttatgtgtgcatggtggtttgtctcccgagattagaatgcttgatcagatcagagttctatcgagagcccaagaagttcctcatgaaggtggcttctccgatttgttatggagtgaccccgacaacgtggaagcatggcaagtctcacctcgtggtgccggatggttgttcggtagcaaagtctcacgagaatttaatcatgtgaatggcctaagcctaatcgcaagagctcaccagctagttatggaaggattcaaataccattttccggagaaggatgttgtaacggtatggtctgcacctaattattgttatcgatgtggtaatgtggcgagtgtcatgaaagtcgaagatgatttagatccaacattcaaaattttttccgctgtacctgacgattacatccaagaaacaaacaataataaccaaagaggtggatatttcttatag

SEQ ID NO: 89560 - protein, 309 aa, Kluyveromyces lactis NRRL Y-1140
MSDNGPDLWLEKIKKCQALTESEMKQLCEMMKELLMEESNIQPVQSPVTVCGDIHGQFHDLLELFRTAGGFPDQVNYIFLGDYVDRGYYSLETFTLLMCLKVKYPSRITLVRGNHESRQITQVYGFYEECLNKYGSTTVWKYCCQVFDFLTLAAIIDGKILCVHGGLSPEIRMLDQIRVLSRAQEVPHEGGFSDLLWSDPDNVEAWQVSPRGAGWLFGSKVSREFNHVNGLSLIARAHQLVMEGFKYHFPEKDVVTVWSAPNYCYRCGNVASVMKVEDDLDPTFKIFSAVPDDYIQETNNNNQRGGYFL

SEQ ID NO: 89561 - DNA, 1083 bp, Kluyveromyces lactis NRRL Y-1140
  CDS (1)..(1083)
atggatgttgatactgatgtgcctatgcatgacgcagtagaagatcaactggattcaactttagacgaagaagctccaggttttgataacggattggcgagttcgtctccaggtacgtcaggaatagctgacaataaggctacgaaacccgtggaactgactgggtctagtatcggtcaattggatgcatggttagaaaagttgagtcaatgtcaatgtttgtcggaggaagatgttgccaagttgtgtaagatggcggttgatgtgcttcaatttgaggacaacgttcaacctgtgtccgtccccgtgacgatatgtggtgacgttcatggacaattccacgatttgatagaattattcaagatcggtggaccttgtcccgatacaaattacttgttcatgggtgattatgtcgatagaggttattattctgtagagactgtttcatatttggttgcactaaaagtccgttacccaagcagaattacaattctaagaggtaatcatgagtctaggcagattacacaagtgtacgggttttatgatgagtgtctaaggaaatacggtagcgctaacgtttggaaaatgtttactgatttgtttgattatttcccaattaccgcactagtggataacaagatcttctgtctacatggtggcctttcaccaatgatcgaaacggttgatcaagtcagagaactaaatagaatacaagaggttcctcatgaaggtccaatgtgtgatctattatggtcagacccggatgatagaggtggctggggtataagtccaagaggtgcaggtttcacgtttggtcaagacattagtgagcaattcaatcatacaaacgatctctcattgattgcgagagcacatcaattggttatggaaggatatgcttggtctcatcaacaaagtgttgttaccatattcagcgctccaaactactgttatagatgtggtaatcaagcagcaatcatggaagttgacgatacgatgaatagacagttcttacagtataatccatccgtaagacccggtgaaccaaccgtaagtagaaagactccggattatttcttgtaa

SEQ ID NO: 89562 - protein, 360 aa, Kluyveromyces lactis NRRL Y-1140
MDVDTDVPMHDAVEDQLDSTLDEEAPGFDNGLASSSPGTSGIADNKATKPVELTGSSIGQLDAWLEKLSQCQCLSEEDVAKLCKMAVDVLQFEDNVQPVSVPVTICGDVHGQFHDLIELFKIGGPCPDTNYLFMGDYVDRGYYSVETVSYLVALKVRYPSRITILRGNHESRQITQVYGFYDECLRKYGSANVWKMFTDLFDYFPITALVDNKIFCLHGGLSPMIETVDQVRELNRIQEVPHEGPMCDLLWSDPDDRGGWGISPRGAGFTFGQDISEQFNHTNDLSLIARAHQLVMEGYAWSHQQSVVTIFSAPNYCYRCGNQAAIMEVDDTMNRQFLQYNPSVRPGEPTVSRKTPDYFL

SEQ ID NO: 89563 - DNA, 945 bp, Debaryomyces hansenii CBS767
  CDS (1)..(945)
atgagtgaaagaggaccagatcaatggttggagcagatcaagaaatgtattgcattatctgagtcggacatgaaacaattatgcgaattggtgaaggaattgctcatggaagagtccaatattcaaccagtccaaagtcctgtgacggtctgtggggacatccacgggcagtttcacgatttactagagttatttcgtatatcaggagggttacctagggatgataacaatgtcagctatatatttttaggtgattacgttgatagaggatatttttccttggaaacattcacattattaatggttttaaaggtgaagtatccacacagaataacattggttcgtggtaaccacgaatcaagacaaattacacaggtttacggtttctacgaagaatgtttaaccaagtatggctctacgacagtgtggaaatactgctgccaagtatttgactttttaacattggctgcaattgtggacggtaaaatattgtgtgtccacggtggtttatcacccgagatcagaatgcttgaccagatcagagttttaagtagggcacaagaggttccgcacgaaggggggttctgtgacttagtctggtctgaccctgataatgtggacacatgggctgtatcacctagaggtgctggatggttgttcggttctaaagtcagtcgtgaatttaatcatataaacaatttaggtttgattgctagagcgcatcaattagtaatggaagggtttcgatatcatttcaaagataaagatgtggttacagtttggtcggctccaaattattgttatagatgtggtaacgtagctagtgtgatgcaagttgatgaagatttggaaccgaactttaaaatcttcagcgccgttcaagatggtgatttaacggcaaagaataatcctaataaacaacaaagaagtgattatttcttatga

SEQ ID NO: 89564 - protein, 314 aa, Debaryomyces hansenii CBS767
MSERGPDQWLEQIKKCIALSESDMKQLCELVKELLMEESNIQPVQSPVTVCGDIHGQFHDLLELFRISGGLPRDDNNVSYIFLGDYVDRGYFSLETFTLLMVLKVKYPHRITLVRGNHESRQITQVYGFYEECLTKYGSTTVWKYCCQVFDFLTLAAIVDGKILCVHGGLSPEIRMLDQIRVLSRAQEVPHEGGFCDLVWSDPDNVDTWAVSPRGAGWLFGSKVSREFNHINNLGLIARAHQLVMEGFRYHFKDKDVVTVWSAPNYCYRCGNVASVMQVDEDLEPNFKIFSAVQDGDLTAKNNPNKQQRSDYFL

SEQ ID NO: 89565 - DNA, 1050 bp, Debaryomyces hansenii CBS767
  CDS (1)..(1050)
atggatttagacactgatgttccaatggaggacgttagcaatgaccaacaattgaaccaaagattcgatgaatctacgtctggtccaggccagcaacaatcacagccatctaacagcaaagatttgaacacatcgtccattaatcaattagatcaatggattgaaaaactatctgcgtgcgagccattatcagagggggatgtaaaaaacttgtgcgatatggccatggatgttttacagtttgaagagaatgtgcaaccggtccaagtcccggtaactatatgtggggatgttcacggacaatttcacgatttgatggagttgtttaagatcgggggaccatgtccagacacgaactatttattcatgggtgattatgttgatagaggatactattcagtggaaactgtttcatacttagtttgtatgaaggtgaggtaccctaatagaattactatattgagaggtaatcacgagtccagacaaatcacacaagtgtacggattctatgatgaatgtctaaggaaatacggttctgcggccgtttggaaattgttcaccgacttattcgactatttccctattactgcattggttgataataaggtattctgcttgcacggaggattatcaccaatgatcgaaacgattgatcaagtaagagaattgaatagaatccaggaagttccacatgaaggtcctatgtgtgacttgttatggtctgatcctgacgatcgaggtggatgggggatttctccaagaggtgcaggattcacttttggtcaagatatttcagaacaattcaaccacactaatgacttaagtttaattgcaagagctcaccagttggtaatggaaggttactcatggtcccatcaagagtctgtggtgaccatcttctctgcaccaaactattgttatagatgtggtaaccaggcagccatcatggaagtggatgaacagcataacagacaattcttacaatatgacccatcagtcagaccaggcgaaccaactgtgacaagaaaaactcccgactacttcttatga

SEQ ID NO: 89566 - protein, 349 aa, Debaryomyces hansenii CBS767
MDLDTDVPMEDVSNDQQLNQRFDESTSGPGQQQSQPSNSKDLNTSSINQLDQWIEKLSACEPLSEGDVKNLCDMAMDVLQFEENVQPVQVPVTICGDVHGQFHDLMELFKIGGPCPDTNYLFMGDYVDRGYYSVETVSYLVCMKVRYPNRITILRGNHESRQITQVYGFYDECLRKYGSAAVWKLFTDLFDYFPITALVDNKVFCLHGGLSPMIETIDQVRELNRIQEVPHEGPMCDLLWSDPDDRGGWGISPRGAGFTFGQDISEQFNHTNDLSLIARAHQLVMEGYSWSHQESVVTIFSAPNYCYRCGNQAAIMEVDEQHNRQFLQYDPSVRPGEPTVTRKTPDYFL

SEQ ID NO: 89567 - DNA, 1392 bp, Yarrowia lipolytica CLIB122
  CDS (1)..(1392)
atgggggggaacggccaaaacggggaaatcaaggtatcggggcggggaaaagggcgaatttggttatttggggtcaaggaaaaacgctggcgggctcgtattcccgataaaaccgctccgggactcgcttttcaggtagcccgcaccggcgaaaaagccagggattgggtgaaaacattaaggttcggccctcaaagttcacagtggtcagcgcagtgtaaacacgtcgacccacacacaccactccgccataaccacatctctcgagctcgctgtagacacaagagcttccgtcacccgcatccatctcacagacacagacacacacccacacattcacgcatcaccagacccacaagaaccgccacaatggaagattcagacgtgctgatgagagatatcaacgacgacggactcaagcccatggacgccatgggagccgggggcgaagggacgttcacagaactgacacccacaacccgcggccagctggacgcctggatcgcacgactgaccgaatgccagcctctcagcgaagacgacgtcaacgagctgtgcaacatggccaagggggtgttgcagaaggaggaaaacgtgcagcccgtgcacgcgccggtgaccatctgtggagacgtgcacggccagttccacgacctgatggagctgttcaaaatcggcgggccgtgtccagacacaaactacctgtttatgggagactacgtggaccgaggctactactcggtcgaaacggtgtcctatctggtggccatgaaggtgcgataccccaaccgactgaccattctgcgaggaaaccacgagtcgcgacaaatcacccaggtctacggcttctacgacgagtgtctgcgaaagtacggaaacgccaacgtgtggcgagccttcacgtcgctgttcgactacttccccgtcaccgccctggtggagaaccaaatcttctgtctgcacggaggcctgtctcccatgatcgagtccatcgacaacatccgagaactcaaccgattccaggaggtgccccacgacggccccatgtgcgacctgctgtggtccgaccccgatgaccgaggaggatggggaatgagcccccgaggagccggcttcaccttcggtgccgacatttccgaacagtttaaccacacaaacaacctgagtctcatttcaagagcacaccagctggtcatggaaggcttcagctgggcacacgagcagcaggtggtcaccatcttctccgcccccaactactgctaccgatgcggaaaccaggccgccatcatggaggtggacgaaaacctctcaaactcctttttgcagtacgatccttgtccccgtcccggagagccctccgtgtctcgacgaacccccgactacttcttgtag

SEQ ID NO: 89568 - protein, 463 aa, Yarrowia lipolytica CLIB122
MGGNGQNGEIKVSGRGKGRIWLFGVKEKRWRARIPDKTAPGLAFQVARTGEKARDWVKTLRFGPQSSQWSAQCKHVDPHTPLRHNHISRARCRHKSFRHPHPSHRHRHTPTHSRITRPTRTATMEDSDVLMRDINDDGLKPMDAMGAGGEGTFTELTPTTRGQLDAWIARLTECQPLSEDDVNELCNMAKGVLQKEENVQPVHAPVTICGDVHGQFHDLMELFKIGGPCPDTNYLFMGDYVDRGYYSVETVSYLVAMKVRYPNRLTILRGNHESRQITQVYGFYDECLRKYGNANVWRAFTSLFDYFPVTALVENQIFCLHGGLSPMIESIDNIRELNRFQEVPHDGPMCDLLWSDPDDRGGWGMSPRGAGFTFGADISEQFNHTNNLSLISRAHQLVMEGFSWAHEQQVVTIFSAPNYCYRCGNQAAIMEVDENLSNSFLQYDPCPRPGEPSVSRRTPDYFL

SEQ ID NO: 89569 - DNA, 969 bp, Yarrowia lipolytica CLIB122
  CDS (1)..(969)
atgacctcgatcgaagaggcgatagagctgctgcacgagtgcaaacacgtacctgagccgctggtgcgacaaatctgtgccaaggcgcaggagattctcgtggaggagtccaacgtgcagctggtggacactccggtggtcatttgtggagacattcacgggcagtttcacgatctgctgacgctgtttgcgattgggggtggagagcctccgaatgcagcttatctgtttctgggcgatttcgtcgatcggggcttttattctctggaatgctttctgctgctcatttgtctcaaggtacgatatcccgacaagatcacgttgatcagaggcaaccacgagagtcggcagatcaccacggtctacggcttctacgacgagtgtctgcgcaagtacggctcggcctctgtgtggagactatgttgtggagtgtttgactatctgtctctcagtgcccttgtgggcggtcctggaggagtgttttgtgtgcatggaggtctgagtccgacagtcaagcagctggatcacgtgcgactgatcgatagaaagcaggaggtgcctcacgacgggcctatgtgtgatttgttatggagcgatccagatgacagtgtggaggatgcagatgatgaggccatggagctcgctacatcctggggagtgtcgccaagaggtgcaggatacctgtttggacccaaccccgtgcacgagttcaaccagatcaacaatacgactcttattgcccgggctcatcaactggtcatggagggatacaaggagatgtttgaccagtcgctggtcacggtctggagtgcaccaaattactgctatcggtgcggaaacgtggcggcggtgctggaaatcacagattccatggaacgccagtacaaggtcttccatgccaaggatgcagatgtgggtggaaatgaaggtatgcccatgaaaaagcctgttgcggagtactttttatga

SEQ ID NO: 89570 - protein, 322 aa, Yarrowia lipolytica CLIB122
MTSIEEAIELLHECKHVPEPLVRQICAKAQEILVEESNVQLVDTPVVICGDIHGQFHDLLTLFAIGGGEPPNAAYLFLGDFVDRGFYSLECFLLLICLKVRYPDKITLIRGNHESRQITTVYGFYDECLRKYGSASVWRLCCGVFDYLSLSALVGGPGGVFCVHGGLSPTVKQLDHVRLIDRKQEVPHDGPMCDLLWSDPDDSVEDADDEAMELATSWGVSPRGAGYLFGPNPVHEFNQINNTTLIARAHQLVMEGYKEMFDQSLVTVWSAPNYCYRCGNVAAVLEITDSMERQYKVFHAKDADVGGNEGMPMKKPVAEYFL

SEQ ID NO: 89571 - DNA, 960 bp, Yarrowia lipolytica CLIB122
  CDS (1)..(960)
atggacgtggaaatgacagacgtcaaggagcctgcgtctaccttgtacactggcactctcgaccaatggattgaacagctgaaggaatgcaaaccgctgaccgaagccgaagttgccaccatgtgtgacatggctcaagaaattcttcagcaagaatctaacgtccagggtgtgcacacccctgtcacagtgtgcggtgatgtacacgggcagttccatgaccttatggagctattctgtattggaggaccctgtccagatacgaattacctgttcatgggagactatgttgaccgaggatactactcggtcgagactatctccttgctggttgccatgaagatccggtatcccaacagaatcaccatcttgcgaggaaaccacgaatctcgacaaatcacacaagtctatggcttctacgacgagtgcctgcggaaatacggccatgccaacgtttggaagcgattcacagacctcttcgactacttgcctctcacagctctcatagaaaacaaaatattctgtctgcacggaggactctcgcctacaattgacaccctcgacaacattcgaacgctcgaccgtattcaggaggtgccccatgagggtcccatgtgtgacttgctttggtctgatcccgacgagcgatgtgggtggggtatttcccctcgaggagcgggatacacatttggtcatgacatttctgaagctttcaaccatgcaaacggtctcgaattgattgcacgagctcaccaattggtcatggagggcttttcttggggccaggacaaacaagtggtgactatattctcagcaccaaactattgctacagatgtggcaaccaagcagccatcatggagctggatgagcagctcaacaaaaagttcattcagattgaccccagcccaagggagggtgagccaaccatcagccgacgaacgccagactacttcctgtag

SEQ ID NO: 89572 - protein, 319 aa, Yarrowia lipolytica CLIB122
MDVEMTDVKEPASTLYTGTLDQWIEQLKECKPLTEAEVATMCDMAQEILQQESNVQGVHTPVTVCGDVHGQFHDLMELFCIGGPCPDTNYLFMGDYVDRGYYSVETISLLVAMKIRYPNRITILRGNHESRQITQVYGFYDECLRKYGHANVWKRFTDLFDYLPLTALIENKIFCLHGGLSPTIDTLDNIRTLDRIQEVPHEGPMCDLLWSDPDERCGWGISPRGAGYTFGHDISEAFNHANGLELIARAHQLVMEGFSWGQDKQVVTIFSAPNYCYRCGNQAAIMELDEQLNKKFIQIDPSPREGEPTISRRTPDYFL

SEQ ID NO: 89573 - DNA, 930 bp, Apis mellifera
  CDS (1)..(930)
atggaggaaaaggcgtcgttgaaagaactcgaccaatggatagaacaattaaataactgccaacaactaacagaaagccaagtaaaatcactgtgcgagaaggcaaaagaaatcttagctaaagaatctaatgtacaagaagtaaaatgtcctgtaacagtatgtggagatgtacatggacagtttcatgatttaatggaactgtttagaataggaggcaaatctccagatacaaattatctttttatgggtgactatgtagaccgtggctattattctgttgaaactgttaccttgcttgttgcactcaaggtcagatatagagaaagaataactattttaagaggtaatcatgaatcaagacaaattacacaggtatatggattttatgatgaatgtttgcgtaaatatggcaatgctaatgtatggaagttcttcacggacttatttgattatttaccattgactgcattagtagatggtcaaatattttgtttacatggtggtttatcaccttcgattgatactttagatcatatacgtgctctagatcgtctccaagaagtaccacatgagggtcctatgtgtgatcttttgtggtcagatccagatgatagaggagggtggggtatttctcctcgtggagcaggatatacttttggacaggatatttcagaaacttttaatcattctaatggcttaacattagtatcacgagcacatcaattagttatggagggttataattggtgtcatgaccgcaatgttgtaaccatcttctcagcacctaattattgctatcgttgtggaaatcaagctgcaatcatggaattagatgatgctttaaaatattcattccttcaatttgacccagctccaagacgcggcgaaccacatgttactaggcggacaccagactatttcttgtaa

SEQ ID NO: 89574 - protein, 309 aa, Apis mellifera
MEEKASLKELDQWIEQLNNCQQLTESQVKSLCEKAKEILAKESNVQEVKCPVTVCGDVHGQFHDLMELFRIGGKSPDTNYLFMGDYVDRGYYSVETVTLLVALKVRYRERITILRGNHESRQITQVYGFYDECLRKYGNANVWKFFTDLFDYLPLTALVDGQIFCLHGGLSPSIDTLDHIRALDRLQEVPHEGPMCDLLWSDPDDRGGWGISPRGAGYTFGQDISETFNHSNGLTLVSRAHQLVMEGYNWCHDRNVVTIFSAPNYCYRCGNQAAIMELDDALKYSFLQFDPAPRRGEPHVTRRTPDYFL

SEQ ID NO: 89575 - DNA, 1059 bp, Apis mellifera
  CDS (1)..(1059)
atggcggatgtcgagttgaacgtcgacaacctgatacaaagattgttggaagtataccacacgcagaaagaccaggttcagaagaaagccaagctaaaagatattttctcgtcggattttgtcgtccgaggatgccgaccaggaaagaccgtcttaatgtcagagggagaggtgcgtggcctttgtctcaagtcacgggaaattttcctacaacaaccgatcctgctcgaattggaggcgccacttaagatctgcggtgatattcacggccaatacactgacttgttacgactatttgaatatggcggtttcccgccagaggcgaactacttatttcttggtgattacgtagacaggggcaaacaatcgttagagacgatatgcttgttgcttgcctacaaaatcaaatacccggagaatttcttcctattgcgaggcaatcacgaatgcgcaagcataaataggatatacgggttctacgacgagtgcaagaggcggtacaacattaaattatggaaaacgttcaccgattgcttcaattgtcttccaatcgcggcgatcatcgacgagaagatattttgctgtcatggaggtctcagtccagatcttcagaatatggaacaaatcaaaagaattatgcgtccgacagatgtacctgatactggccttctctgtgatttgttatggtcagatccagataaagaagttcagggatggggtgaaaatgatagaggtgtatctttcacatttggtccagatgtagtatcgaagtttttaaatcgtcatgatatggacttaatatgtagagcacatcaagtagtcgaagatgggtatgaattttttgcaaaaagacagttagttactttattttccgcaccaaattattgcggagaattcgacaatgccggaggaatgatgagtgttgacgaaactctaatgtgcagttttcagattttgaaaccatcagagaagaaagctaaataccagtacttaagtttgaacacgggtcaagccaccagaccatctacaccacaaaggaatccagccaaaaagaaatga

SEQ ID NO: 89576 - protein, 352 aa, Apis mellifera
MADVELNVDNLIQRLLEVYHTQKDQVQKKAKLKDIFSSDFVVRGCRPGKTVLMSEGEVRGLCLKSREIFLQQPILLELEAPLKICGDIHGQYTDLLRLFEYGGFPPEANYLFLGDYVDRGKQSLETICLLLAYKIKYPENFFLLRGNHECASINRIYGFYDECKRRYNIKLWKTFTDCFNCLPIAAIIDEKIFCCHGGLSPDLQNMEQIKRIMRPTDVPDTGLLCDLLWSDPDKEVQGWGENDRGVSFTFGPDVVSKFLNRHDMDLICRAHQVVEDGYEFFAKRQLVTLFSAPNYCGEFDNAGGMMSVDETLMCSFQILKPSEKKAKYQYLSLNTGQATRPSTPQRNPAKKK

SEQ ID NO: 89577 - DNA, 990 bp, Aspergillus nidulans FGSC A4
  CDS (1)..(990)
atggataacaatatggagatcgatgcggcgcgttcgccagagccacaccacctttccccgacaaccgaccctgggtcgatccccacgctcgatggctggatcgagagtttgatgacgtgcaaacaactcgcagaggaggatgtgcggaggttgtgtgatcgggcgcgagaggtcttgcaggaggagtcaaacgtccaacctgtgaaatgcccggtaaccgtctgcggtgatattcacggtcaatttcacgatctaatggagctcttccgtattggcgggccaaacccagacacaaattacctcttcatgggtgattatgtcgaccgtggctactactctgtcgagactgttacactccttgtttgcctgaaaatccgctatccccagcgtatcaccatcctccgcggaaaccacgagtcccgccagatcacacaggtgtacggtttctacgacgaatgcctgcgaaaatacggcaatgccaatgtctggaaatacttcaccgacctcttcgactaccttccccttaccgccctcatcgagaaccagatcttctgtctgcacggtggtctgagtccgtccattgacactctggataacatccgatctctagaccgaatccaggaggttccccacgaaggtcccatgtgcgatctgctctggagtgacccagatgatcgttgcggctggggaatatctccccgtggtgctggatacacatttggacaagatatctcagaggctttcaatcataataacggcctgacacttgttgcacgagcacaccagttggttatggagggatataactggtcacaggaccggaatgtcgttacgatcttctctgcccctaattactgctaccgctgcggtaaccaagccgccattatggaaatcgatgaacacctgaagtatacgttcttacaattcgacccttgcccgcgcgcaggagagcctatggtctcgagacgtaccccagactacttcctgtga

SEQ ID NO: 89578 - protein, 329 aa, Aspergillus nidulans FGSC A4
MDNNMEIDAARSPEPHHLSPTTDPGSIPTLDGWIESLMTCKQLAEEDVRRLCDRAREVLQEESNVQPVKCPVTVCGDIHGQFHDLMELFRIGGPNPDTNYLFMGDYVDRGYYSVETVTLLVCLKIRYPQRITILRGNHESRQITQVYGFYDECLRKYGNANVWKYFTDLFDYLPLTALIENQIFCLHGGLSPSIDTLDNIRSLDRIQEVPHEGPMCDLLWSDPDDRCGWGISPRGAGYTFGQDISEAFNHNNGLTLVARAHQLVMEGYNWSQDRNVVTIFSAPNYCYRCGNQAAIMEIDEHLKYTFLQFDPCPRAGEPMVSRRTPDYFL

SEQ ID NO: 89579 - DNA, 945 bp, Candida albicans SC5314
  CDS (1)..(945): transl_table=12
atgggagaaagaggtccagatcagtggttggaacagataaaaaattgcatttcattatcagaatctgatatgaaacagttatgtgaattggtcaaagaattactaatggaagaatccaatattcaacctgtacagtcccctgtgacggtttgtggtgacatacatggacaattccacgatttattggaattattcagaactgcaggaggtttaccttcagatgacaatcaaaccaactttattttcttgggagactatgtcgatcgtggttatttttccttggaaacattcactttattaatggttttaaaagtaaaatatcctcacagaattactttggtaagaggaaatcacgaatcgagacaaatcacacaagtatatgggttttatgaagaatgtttaacaaaatacggctcaaccactgtttggaaatattgttgtcaagtttttgatttcttaactttagcagcaataatagatggcaaaattttatgtgtacatggtgggttatctccagaaatcagaatgttggaccagattagagtgttgtctagagctcaagaagttcctcacgaaggtggtttctgtgacttggtgtggtcagacccagataacattgacacttgggcagtatcgcctagaggggctggatggttgtttggctcaaaagtgtcgcgagaattcaatcacatcaacaatttgcaattaattgccagagcacaccagttggtaatggaagggtttcgttaccattttaaggaaaaagatgttgtcacagtatggtctgctccaaattactgttatagatgtgggaatgttgccagtgttatgcaagtcgatgaagatttagaacctaatttcaagatattcagtgccgttcaagatggtgacttatcagtcaagaacaatgccaacaaacaacaaagaagtgattattttttgtaa

SEQ ID NO: 89580 - protein, 314 aa, Candida albicans SC5314
MGERGPDQWLEQIKNCISLSESDMKQLCELVKELLMEESNIQPVQSPVTVCGDIHGQFHDLLELFRTAGGLPSDDNQTNFIFLGDYVDRGYFSLETFTLLMVLKVKYPHRITLVRGNHESRQITQVYGFYEECLTKYGSTTVWKYCCQVFDFLTLAAIIDGKILCVHGGLSPEIRMLDQIRVLSRAQEVPHEGGFCDLVWSDPDNIDTWAVSPRGAGWLFGSKVSREFNHINNLQLIARAHQLVMEGFRYHFKEKDVVTVWSAPNYCYRCGNVASVMQVDEDLEPNFKIFSAVQDGDLSVKNNANKQQRSDYFL

SEQ ID NO: 89581 - DNA, 1083 bp, Candida albicans SC5314
  CDS (1)..(1083): transl_table=12
atggatttagatacagacgtgccaatggaagacgttgaggaacagcaacagcaacaagaacaatctctttcgaaacaatcggctacaaaatcattgaccaatcctcaaggcactggtgccactgcaacttcatcagcacaacaacaaagaaaagatctagacggatcatcaatcaatcaattagatgtgtggattgaaaaattgtcaaagtgtgagccactttccgaaaccgacgtcaagaaattatgtgatatggcagttgaagtgttacaatttgaagaaaatgttcaaccagtacaagtgccagtgacaatatgtggtgatgttcatggtcaatttcatgatttgatggagttgttcaaaatcggtggaccttgtccggacaccaactatttgtttatgggagattacgttgatcgtggatattattcagttgaaactgtatcatacttggtttgtatgaaagtaagattccctaacagaatcactattttgagagggaaccacgaatctagacagatcacacaagtttacgggttttacgacgaatgtttaagaaaatacggatcagccactgtttggaagttgtttactgatttatttgattacttcccaataactgcattagttgataataaagtgttttgtttgcatggtgggttatccccaatgattgaaactattgatcaagtgagagaattgaacagaattcaagaagttccccacgaagggccaatgtgtgatttgttgtggtctgatccagatgatagaggtggctggggtatttctccaagaggagctggttttacttttggtcaagacatttccgagcaattcaaccatactaatgatttaagtcttattgctagagcccatcaattggtgatggaagggttcagttggtctcatcatgaaaatgttgtcacgatattttcagctccaaactattgttatagatgtggtaatcaagctgcaatcatggaagttgatgaacaacataatagacaatttttacaatatgacccaagcgttagaccaggagaacctacagtaacaaggaagactcctgattatttcttatga

SEQ ID NO: 89582 - protein, 360 aa, Candida albicans SC5314
MDLDTDVPMEDVEEQQQQQEQSLSKQSATKSLTNPQGTGATATSSAQQQRKDLDGSSINQLDVWIEKLSKCEPLSETDVKKLCDMAVEVLQFEENVQPVQVPVTICGDVHGQFHDLMELFKIGGPCPDTNYLFMGDYVDRGYYSVETVSYLVCMKVRFPNRITILRGNHESRQITQVYGFYDECLRKYGSATVWKLFTDLFDYFPITALVDNKVFCLHGGLSPMIETIDQVRELNRIQEVPHEGPMCDLLWSDPDDRGGWGISPRGAGFTFGQDISEQFNHTNDLSLIARAHQLVMEGFSWSHHENVVTIFSAPNYCYRCGNQAAIMEVDEQHNRQFLQYDPSVRPGEPTVTRKTPDYFL

SEQ ID NO: 89583 - DNA, 1083 bp, Candida albicans SC5314
  CDS (1)..(1083): transl_table=12
atggatttagatacagacgtgccaatggaagacgttgaggaacagcaacagcaacaagaacaatctctttcgaaacaatcggctacaaaatcattgaccaatcctcaaggcactggtgccactgcaacttcatcagcacaacaacaaagaaaagatctagacggatcatcaatcaatcaattagatgtgtggattgaaaaattgtcaaagtgtgagccactttccgaaaccgacgtcaagaaattatgtgatatggcagttgaagtgttacaatttgaagaaaatgttcaaccagtacaagtgccagtgacaatatgtggtgatgttcatggtcaatttcatgatttgatggagttgttcaaaatcggtggaccttgtccggacaccaactatttgtttatgggagattacgttgatcgtggatattattcagttgaaactgtatcatacttggtttgtatgaaagtaagattccctaacagaatcactattttgagagggaaccacgaatctagacagatcacacaagtttacgggttttacgacgaatgtttaagaaaatacggatcagccactgtttggaagttgtttactgatttatttgattacttcccaataactgcattagttgataataaagtgttttgtttgcatggcgggttatccccaatgattgaaactattgatcaagtgagagaattgaacagaattcaagaagttccccacgaagggccaatgtgtgatttgttgtggtctgatccagatgatagaggtggctggggtatttctccaagaggagctggttttacttttggtcaagacatttccgagcaattcaaccatactaatgatttaagtcttattgctagagcccatcaattggtgatggaagggttcagttggtctcatcaagaaaatgttgtcacgatattttcagctccaaactattgttatagatgtggtaatcaagctgcaatcatggaagttgatgaacaacataatagacaatttttacaatatgacccaagcgttagaccaggagaacctacagtaacaaggaagactcctgattatttcttatga

SEQ ID NO: 89584 - protein, 360 aa, Candida albicans SC5314
MDLDTDVPMEDVEEQQQQQEQSLSKQSATKSLTNPQGTGATATSSAQQQRKDLDGSSINQLDVWIEKLSKCEPLSETDVKKLCDMAVEVLQFEENVQPVQVPVTICGDVHGQFHDLMELFKIGGPCPDTNYLFMGDYVDRGYYSVETVSYLVCMKVRFPNRITILRGNHESRQITQVYGFYDECLRKYGSATVWKLFTDLFDYFPITALVDNKVFCLHGGLSPMIETIDQVRELNRIQEVPHEGPMCDLLWSDPDDRGGWGISPRGAGFTFGQDISEQFNHTNDLSLIARAHQLVMEGFSWSHQENVVTIFSAPNYCYRCGNQAAIMEVDEQHNRQFLQYDPSVRPGEPTVTRKTPDYFL

SEQ ID NO: 89585 - DNA, 1056 bp, Ustilago maydis 521
  CDS (1)..(1056)
atgactgttggcaatccagacacgtggatagagcagctccgacaatgcaagtacctaccagaaccagacatcaaggcactctgcgagatggtcagaggcatcctcatggaagagagcaatatccaacccgtttccagccccgttacggtctgcggtgatattcacggccagttttgggacttgctcgagctgttcagagttggcggagagccgccggatacgtcgtatgtgtttatgggtgactttgtcgaccgtggctatttcagcctggaaacattctcgctactcatggcgctcaaagcacgacacccatcccggatcacgcttcttcggggcaaccacgagtcacgccagatcacccaagtttacggtttctacgatgagtgtcaacgcaagtacggcaacgccaatgtctggaaatcgtgttgtcaagttttcgactatctcaacctagcagccatcattgatggacgcgttctctgtgttcacggtggtctcagtccagacgttcgaacactggatcagattcgaatcattgctcgcgcgcaagaagtgccacacgaaggagcattttgcgatctcatgtggagtgatccggacgacattgatacctggcgagtttcaccgcgtggtgcaggatggctgttcggtagcgctgtgaccaaagagtttaaccacgtcaatggcttgtcgctgatagcaagggctcatcagttggtacaggaaggatacaagctgatgcacgacaataacatcgtcactgtttggtcagcacccaattattgttaccgatgtggcaatgttgcgagcatttttgccgtggacgatttgatcgcgtacgaaagcaaaaattcgtcttctgctcttgtggattctgcgctcagcgatacggagcaagatgatgccacaaatacagagctagatgcaggagcgaaaacagcagcctcaggcgagagcatgaaaccatgggaagcaacgcagtccaacttcaagatctttgacgctgtaccggatcaaaccagaacggtcacattgaatagccagtacttcctctaa

SEQ ID NO: 89586 - protein, 351 aa, Ustilago maydis 521
MTVGNPDTWIEQLRQCKYLPEPDIKALCEMVRGILMEESNIQPVSSPVTVCGDIHGQFWDLLELFRVGGEPPDTSYVFMGDFVDRGYFSLETFSLLMALKARHPSRITLLRGNHESRQITQVYGFYDECQRKYGNANVWKSCCQVFDYLNLAAIIDGRVLCVHGGLSPDVRTLDQIRIIARAQEVPHEGAFCDLMWSDPDDIDTWRVSPRGAGWLFGSAVTKEFNHVNGLSLIARAHQLVQEGYKLMHDNNIVTVWSAPNYCYRCGNVASIFAVDDLIAYESKNSSSALVDSALSDTEQDDATNTELDAGAKTAASGESMKPWEATQSNFKIFDAVPDQTRTVTLNSQYFL

SEQ ID NO: 89587 - DNA, 999 bp, Ustilago maydis 521
  CDS (1)..(999)
ctgagtgactggctggctgtgcctcgtgcacgactggctgagcgtgttaacttgggttatcctgaggcttggcctgcgtcagctccatgttggctgctcgatgcgtggatcgcgcatctcagcgagtgcaaacagctctcggaaaacgatatcaagcgtctctgcgacaaggctcgcgaaatcttgctcggcgagtccaacgtccaacctgttcgctgccccgttactgtatgcggtgacattcacggccaatttcacgacttgtcagagctcttccgcatcggtggcaactcacctgataccaactacctgtttatgggcgattacgttgaccgtggttactactcggtcgagaccgtcacgttgctcgtggcactcaaggtgcgctaccgtgaccgcgtcaccatcttgcgtggtaaccacgaatcgcgacaaattacccaggtctacggtttctacgacgaatgcctaaggaaatatggcaatgcgaatgtgtggaagtactttaccgatcttttcgattatcttccattgaccgccttgattgacgaccagatcttctgtctgcacggcggtctttcaccgtctatcgacactctggaccacattcgatccatcgaccgtatccaagaagtgccgcacgaaggtcctatgtgtgacttgctgtggtctgacccagatgaccgatgtggatggggcatctcgccacgaggtgcgggctacacgtttggccaagacatttcggaagcgttcaaccacaacaatggcctgacactggtggcacgagcacatcaattggtcatggacggattcaactggtcgcaagagcgtaacgttgttaccatcttttcggcacccaactactgctaccgatgcggcaaccaggcagccatcatggaaatcgacgagaacctcaagtatacctttttgcagtttgacccagctccgcgtgccggcgagccgttggtctcgagacgcgtgccggattactttttgtaa

SEQ ID NO: 89588 - protein, 332 aa, Ustilago maydis 521
MSDWLAVPRARLAERVNLGYPEAWPASAPCWLLDAWIAHLSECKQLSENDIKRLCDKAREILLGESNVQPVRCPVTVCGDIHGQFHDLSELFRIGGNSPDTNYLFMGDYVDRGYYSVETVTLLVALKVRYRDRVTILRGNHESRQITQVYGFYDECLRKYGNANVWKYFTDLFDYLPLTALIDDQIFCLHGGLSPSIDTLDHIRSIDRIQEVPHEGPMCDLLWSDPDDRCGWGISPRGAGYTFGQDISEAFNHNNGLTLVARAHQLVMDGFNWSQERNVVTIFSAPNYCYRCGNQAAIMEIDENLKYTFLQFDPAPRAGEPLVSRRVPDYFL

SEQ ID NO: 89589 - DNA, 927 bp, Strongylocentrotus purpuratus
  CDS (1)..(927)
atgacggacgtgtcaacgaaggatttagacattgaaattgagcagctcaatgactgcaaacagctccaggaaaatcaagtgaaacatctttgcgagatggccaaagaaatcctgaccaaggaatccaatgtacaagaggtcaaatgcccggtcacagtgtgcggtgatgtccacggccagttccacgacctcatggaactcttccgtataggaggacgctccccaaacacaaattaccttttcatgggcgactacgtagacaggggttactattcggtggaaactgtaacgcttctggtttgtttgaaggttaggtaccgggaacgaataaccatcctgagagggaaccatgaaagcaggcaaatcacacaagtctatggcttctacgatgaatgtctacgaaagtatggtaatgctaatgtttggaagtacttcacagatctgtttgactatctaccattaacagcactggtagatggacagattttctgtctccatggtggactatcaccttctatcgacacactagatcacattcgtgctcttgaccgtatccaagaagtaccacatgaaggacctatgtgtgacctcctgtggtccgaccccgacgacaggggcggctggggcatctccccccgcggggctggctacaccttcggtcaggacatctccgagacattcaaccacagcaacggactcactctcatctctcgggctcatcagcttgtcatggaaggctacaactggtgtcatgataggaacgtagtgaccattttcagtgcccctaactactgctaccgatgtggtaatcaagcagccattatggaattggacgatgctttgaagtattccttcttgcaatttgatcctgctccgagaaggggagagccccacgtcacgcggcgcactccagactacttcttgtag

SEQ ID NO: 89590 - protein, 308 aa, Strongylocentrotus purpuratus
MTDVSTKDLDIEIEQLNDCKQLQENQVKHLCEMAKEILTKESNVQEVKCPVTVCGDVHGQFHDLMELFRIGGRSPNTNYLFMGDYVDRGYYSVETVTLLVCLKVRYRERITILRGNHESRQITQVYGFYDECLRKYGNANVWKYFTDLFDYLPLTALVDGQIFCLHGGLSPSIDTLDHIRALDRIQEVPHEGPMCDLLWSDPDDRGGWGISPRGAGYTFGQDISETFNHSNGLTLISRAHQLVMEGYNWCHDRNVVTIFSAPNYCYRCGNQAAIMELDDALKYSFLQFDPAPRRGEPHVTRRTPDYFL

SEQ ID NO: 89591 - DNA, 924 bp, Strongylocentrotus purpuratus
  CDS (1)..(924)
atggcagactgtagcgatttagatagacaaatagagcagctgagaaattgtgaaatcatcaaagaaagtgaagtcaaagcattatgtgccaaagcaagggaaattctagtagaagaaagcaatgtacagagagttgatgctccagtcacagtatgtggggatatccatggtcagttctatgacctcaaagaattatttaaggttggcggtgatgttcctgacacaaattatctcttcatgggtgactttgtggacagaggcttttacagtgtagaaacttttcttcttcttttagctcttaaagttaggtacccagacagaatcacattaattcgagggaatcacgaaagcaggcaaatcacccaggtctatggtttctacgacgaatgtctaagaaagtatggttccatcacggtgtggagatactgtacagagatctttgattaccttagtctgtctgccatcatcgatggaaagatcttctgtgtccatggaggcctctcaccgtccatcacaacgctagatcagattagaatgattgaccgaaagcaggaggtacctcacgatggtcccatgtgtgatctattgtggtcggatccagaagatacacaaggatggggagtgagccccaggggtgctggctatctctttggtagcgatgtcgtcagtcagttcaacgcagccaataacattgacatgatctgcagggcgcatcagctggtgatagaaggttacaagtggcatttcaatgaaacggtgctaacggtctggtctgcccccaactactgctacagatgcggaaatgtggctgccatcttggaattagacgagcatctgcagagggactttacgatatttgaagctgctcctcaggaggttcgagggatacccgccaaaaagcctcagccagactacttcctgtga

SEQ ID NO: 89592 - protein, 307 aa, Strongylocentrotus purpuratus
MADCSDLDRQIEQLRNCEIIKESEVKALCAKAREILVEESNVQRVDAPVTVCGDIHGQFYDLKELFKVGGDVPDTNYLFMGDFVDRGFYSVETFLLLLALKVRYPDRITLIRGNHESRQITQVYGFYDECLRKYGSITVWRYCTEIFDYLSLSAIIDGKIFCVHGGLSPSITTLDQIRMIDRKQEVPHDGPMCDLLWSDPEDTQGWGVSPRGAGYLFGSDVVSQFNAANNIDMICRAHQLVIEGYKWHFNETVLTVWSAPNYCYRCGNVAAILELDEHLQRDFTIFEAAPQEVRGIPAKKPQPDYFL

SEQ ID NO: 89593 - DNA, 981 bp, Tribolium castaneum
  CDS (1)..(981)
atggcggagcctgatctaaacgtcgacaatttaattcaaagattattagaagtacgaggatgtcgtcccggaaagtctgtacaaatgtccgaggcggaagtccgcggactttgcttaaaatcccgagaaattttcctccaacagcccatacttttggaactggaagctcccttaaaaatctgcggggacattcatggccaatacacagatctgctccgtctttttgaatatgggggctttcctcctgaagccaattacctgttccttggcgactacgttgatcgtggtaaacaatcgctagagaccatctgcctgcttctggcctataaaattaaatatcctgaaaacttcttcctcctcagaggaaaccacgaatgcgcgtcgattaaccgaatatacggattttacgacgaatgcaagagacggtacaacatcaagttgtggaaaaccttcaccgattgcttcaactgcttgccaatagctgcgataatcgacgagaaaattttctgctgtcacggggggctcagtcctgacctgcaaggcatggagcagatccgtcgtattatgcgcccgaccgatgtacctgacacaggtctgctgtgcgatttgctgtggtccgaccctgataaagacgtgcaaggttggggtgagaacgaccgcggagtgtcatttactttcggcgctgatgtcgttagtaaatttttgaaccgtcacgatctagatttgatctgtcgcgcccatcaagtggtggaggatgggtacgaatttttcgcaaaaagacaactagtcacgcttttctcagccccgaattattgcggcgagtttgacaacgctggagggatgatgagtgtagatgaaacgttaatgtgttcttttcagattttgaagccgtcggaaaagaaagccaagtatcaataccaaggagtgaactcaggacgtccctcaacgcctcagagaaacccaacaactaaaaagaaataa

SEQ ID NO: 89594 - protein, 326 aa, Tribolium castaneum
MAEPDLNVDNLIQRLLEVRGCRPGKSVQMSEAEVRGLCLKSREIFLQQPILLELEAPLKICGDIHGQYTDLLRLFEYGGFPPEANYLFLGDYVDRGKQSLETICLLLAYKIKYPENFFLLRGNHECASINRIYGFYDECKRRYNIKLWKTFTDCFNCLPIAAIIDEKIFCCHGGLSPDLQGMEQIRRIMRPTDVPDTGLLCDLLWSDPDKDVQGWGENDRGVSFTFGADVVSKFLNRHDLDLICRAHQVVEDGYEFFAKRQLVTLFSAPNYCGEFDNAGGMMSVDETLMCSFQILKPSEKKAKYQYQGVNSGRPSTPQRNPTTKKK

SEQ ID NO: 89595 - DNA, 915 bp, Tribolium castaneum
  CDS (1)..(915)
atgtcttcagagctggatcaatggattgaaatcgtgaaagactgcaagtatttgaccgaaaacgacttgaagaaattgtgcagtatcgtatgtgatattcttttggaggagtcgaacgtgcagcccgtctccactcctgtgacggtctgtggggacatccacggccagttttatgacctggaggagctgttccggcaagggggccaagtccctgacaccaattacatatttttaggcgattttgtcgacagggggtattacagtcttgagacttttactcgattgctcactttgaaggcggcttatccgaacaaaattactttgttaagggggaaccatgagagtcgacagattacgcaagtttacggtttttacgacgagtgtctgactaaatatggcaatgctaacgcttggaaatactgctgttctgtgtttgatctgcttactgtcgctgcgttaattgacgagaaagtgctttgtgtacatgggggcttaagtccggatattaaaacggttgaccagattcggactttggagagaaatcaggaaattccgcataaaggtgccttctgtgatttagtttggtcggaccctgaggatgtggacacctgggcgtcgagtcccaggggggctgggtacttgttcggggcgaaggtcactcatgaattcatgcaaattaacgcgctcacattaatttgcagagctcatcagttagtccacgaaggttataaatacatgtttgatgataagctgataacggtttggtcggcccccaattattgctaccgttgtggcaacattgcaagtattttggaattccagaccacggataaagtcgaaccgaaattattcaacgccgtacccgacaatgaacgagttattccaagtagaagtgttactccgtattttttgtaa

SEQ ID NO: 89596 - protein, 304 aa, Tribolium castaneum
MSSELDQWIEIVKDCKYLTENDLKKLCSIVCDILLEESNVQPVSTPVTVCGDIHGQFYDLEELFRQGGQVPDTNYIFLGDFVDRGYYSLETFTRLLTLKAAYPNKITLLRGNHESRQITQVYGFYDECLTKYGNANAWKYCCSVFDLLTVAALIDEKVLCVHGGLSPDIKTVDQIRTLERNQEIPHKGAFCDLVWSDPEDVDTWASSPRGAGYLFGAKVTHEFMQINALTLICRAHQLVHEGYKYMFDDKLITVWSAPNYCYRCGNIASILEFQTTDKVEPKLFNAVPDNERVIPSRSVTPYFL

SEQ ID NO: 89597 - DNA, 930 bp, Tribolium castaneum
  CDS (1)..(930)
atggatgataaagcgtcgtgtaaagaactggatcagtggatagaacagttaaatgactgtaagcaactatcagaaaatcaagtaaagacactatgtgataaggcgaaagagatcctgtcgaaggagtcgaacgtacaagaagtgcgatgtcctgtaaccgtgtgcggggacgtccacggccaattccacgacttgatggagttgttcaggataggaggaaggagtcccgacacgaattacctcttcatgggtgactatgtagaccgtggttattattcggtggagacggtgacactcctagtagctctcaaagttcgatataaagaaagaataacgattctaagaggtaaccacgagtcgagacaaatcacccaagtttacggtttttacgacgagtgtttgagaaaatacggaaacgcaaacgtttggaaattctttacggatttatttgattatttgcctttgacggcgctcgtcgatagtcaaattttctgtctgcatggaggactcagtcccagcattgataccttggatcacattagggcgttagatcgtttgcaagaggttcctcatgaggggccaatgtgcgaccttttgtggtcggaccccgacgatcgcgggggctggggtatttccccccgaggggctggttacaccttcggtcaggacatttccgagactttcaatcattcgaacggtttgacattagtttcgcgtgcccatcagctagttatggaaggttacaattggtgtcacgaccgcaacgtcgtcaccatctttagcgcccccaattactgttaccgttgcggtaaccaagcggctatcatggaactagatgatgccctcaaatattcattcttacaatttgacccagcacctcgtcgtggggaaccccacgtgacgcgcaggacacccgattacttcttgtaa

SEQ ID NO: 89598 - protein, 309 aa, Tribolium castaneum
MDDKASCKELDQWIEQLNDCKQLSENQVKTLCDKAKEILSKESNVQEVRCPVTVCGDVHGQFHDLMELFRIGGRSPDTNYLFMGDYVDRGYYSVETVTLLVALKVRYKERITILRGNHESRQITQVYGFYDECLRKYGNANVWKFFTDLFDYLPLTALVDSQIFCLHGGLSPSIDTLDHIRALDRLQEVPHEGPMCDLLWSDPDDRGGWGISPRGAGYTFGQDISETFNHSNGLTLVSRAHQLVMEGYNWCHDRNVVTIFSAPNYCYRCGNQAAIMELDDALKYSFLQFDPAPRRGEPHVTRRTPDYFL

SEQ ID NO: 89599 - DNA, 978 bp, Aspergillus niger
  CDS (1)..(978)
atgataattgacattaccagtaggccagataatcagccgaagccaccgggattggactaccatcgcatccggacccttgacgcatggattgagcaattaatgaattgtgtaaccttgtcggaggatgatatagagcgactatgcaatcaggcaagggaggtggtgcaagacgaatcgaacgtacagccagtttccagtccagtcacggtctgcggtgacatccacggccaatatcatgacttgatcgagctattccgaataagcgggccttgtccggacaccaattacctcttcatgggcgactacgtcgaccgcggttaccactccgtcgaatcagtatccctcctcgtcgccctcaaagtccgctaccccaagcgcataacgatccttcgtggcaatcacgaatcccgtcaaatcacccaagtgtacggcttctacgatgaatgtctacgaaaatatggcaacgcgcgggtgtggacattattcacagacctattcgactaccttcctcttaccgctctcatcgacaatcgcatcttctgcctccacgggggcctaagtccctcaattgatactctggataatattcggtcgttggatcgggtacatgagcctccgcatgagggtccgatgtgtgatcttctctggagtgatcctgatgacagatgtggctggggcatttctcctcgtggagccgggtataccttcggacaggatatatctgacgcgtttaatcataataacggccttagtctcgtcgcccgagctcatcagatggtgatggatgggtatctttggtcacatgacagaaatgtggttacggttttctctgctccgaactactgctaccgttgtggcaatcaagcagcgatactggaagtagatgagcaactcaattaccaatttatacagtttgatccttcaccacggactggagaacctacggtgtatagaaggacgccagattactttctatag

SEQ ID NO: 89600 - protein, 325 aa, Aspergillus niger
MIIDITSRPDNQPKPPGLDYHRIRTLDAWIEQLMNCVTLSEDDIERLCNQAREVVQDESNVQPVSSPVTVCGDIHGQYHDLIELFRISGPCPDTNYLFMGDYVDRGYHSVESVSLLVALKVRYPKRITILRGNHESRQITQVYGFYDECLRKYGNARVWTLFTDLFDYLPLTALIDNRIFCLHGGLSPSIDTLDNIRSLDRVHEPPHEGPMCDLLWSDPDDRCGWGISPRGAGYTFGQDISDAFNHNNGLSLVARAHQMVMDGYLWSHDRNVVTVFSAPNYCYRCGNQAAILEVDEQLNYQFIQFDPSPRTGEPTVYRRTPDYFL

SEQ ID NO: 89601 - DNA, 996 bp, Aspergillus niger
  CDS (1)..(996)
atgagcgaccttgaccggtattccctcccttcccgcccctcttaccctcttcctctccccttaggccaggatgagctaacctcccgcttttcgtcgcgtagggcgatcgcgcaattacgcgcttgtcgtttgatacccgaagcccaggtccgcgaactctgctacaaggcgcgcgagctcctaatcgaagaaggaaacgtagtctgcgtcgacgcgcccgtcacaatctgcggcgacatccatggccagttccatgacttgatggaactgttccgcgtgggcggcgacgtcccggacaccaactacctattcatgggtgacttcgtcgatcgcggattctactccctcgaatctttcctcctccttctctgcctcaaagtccgataccccgaccgcatcaccttgatacgtggcaatcacgagtcgcgccaaatcaccaccgtctacggattctacgatgagtgcatccgcaaatacggcagcgccaacgtctggcgatactgctgcgaggtcttcgactaccttgcgctcggggccctcgtcttccgcacgggagccgtgctctgcgtgcacggcggcctctccccggccatcgacaccgttgacaagatccgcctgattgaccgaaaacaggaagtgccccacgaaggcgccatgtgcgacctgctctggtccgaccccgacgagatcgacggctggggcctcagtccccgcggcgcggggttcctcttcggcggcgacatcgtcaaacgcttcaactaccgaaacgacctatcactgatcgcgcgcgcgcatcaactcgtcatggaagggtacaaggagatgttcgacggcgggatcgtaacggtctggtccgcacctaactactgctaccggtgcggcaacgtcgccgctatcctggaactaggcgaagatacaagcaacggtggcaccgccgcggcgcaggataccagaggcatgcctgctaagaagcctgttgctgattatttcctgtga

SEQ ID NO: 89602 - protein, 331 aa, Aspergillus niger
MSDLDRYSLPSRPSYPLPLPLGQDELTSRFSSRRAIAQLRACRLIPEAQVRELCYKARELLIEEGNVVCVDAPVTICGDIHGQFHDLMELFRVGGDVPDTNYLFMGDFVDRGFYSLESFLLLLCLKVRYPDRITLIRGNHESRQITTVYGFYDECIRKYGSANVWRYCCEVFDYLALGALVFRTGAVLCVHGGLSPAIDTVDKIRLIDRKQEVPHEGAMCDLLWSDPDEIDGWGLSPRGAGFLFGGDIVKRFNYRNDLSLIARAHQLVMEGYKEMFDGGIVTVWSAPNYCYRCGNVAAILELGEDTSNGGTAAAQDTRGMPAKKPVADYFL

SEQ ID NO: 89603 - DNA, 999 bp, Herdmania curvata
  CDS (1)..(999)
atgtcagaatctgataaattgaatgttgataaaatcatctcccgtttgctggaagtccgcggctctcgtccaggaaagaacgttcagctcacagaaaatgaaatccgcggcctctgcctgaaaactcgtgaaattttcctaagtcaaccaatcttgctcgagttggaagcccctttgaagatctgtggtgatgtgcacggccagtactacgaccttcttcggctctttgactacggcgggttcccaccagagtccaactacctttccttgggtgactacgtggacagaggaaaacagtctctggagaccatctgcctcttgctggcgtacaagatcaaatacccggaaaattttttcttgttgcgtggaaatcacgaatgtgcaagcatcaatagaatttatggtttttacgatgaatgcaagaggcggtataacatcaagctgtggaaaaccttcactgactgcttcaactgtcttccactcgccgcaatcattgatgaaaaaatcttctgctgtcatgggggcctttcacccgacctccagtccatggaacaaattcgccgaatcatgagacccacggatgtccctgatcaaggactcctgtgcgatctcttgtggtcagatccagacaaagaagttgctggatggggtgagaatgaccgcggcgtctcgttcacgtttggtgcggaagttgtggcaaaatttctacacaaacaagatcttgatcacatctgtcgggctcaccaagtcgttgaagatggctacgagttttttgcaaagcgtcagcttgtcacgttgttcagcgcaccaaactactgtggagagtttgacaacgcaggtgcaatgatgagcgtggatgaaaccttgatgtgctcttttcaaatattgaaaccagtggataaaaagaagttcccgtacggaggtctgaacgccggaaggccagtgacgccgcctcgagcctcagctggaaaaggaaaaggagcaaaatcaggaaaatga

SEQ ID NO: 89604 - protein, 332 aa, Herdmania curvata
MSESDKLNVDKIISRLLEVRGSRPGKNVQLTENEIRGLCLKTREIFLSQPILLELEAPLKICGDVHGQYYDLLRLFDYGGFPPESNYLSLGDYVDRGKQSLETICLLLAYKIKYPENFFLLRGNHECASINRIYGFYDECKRRYNIKLWKTFTDCFNCLPLAAIIDEKIFCCHGGLSPDLQSMEQIRRIMRPTDVPDQGLLCDLLWSDPDKEVAGWGENDRGVSFTFGAEVVAKFLHKQDLDHICRAHQVVEDGYEFFAKRQLVTLFSAPNYCGEFDNAGAMMSVDETLMCSFQILKPVDKKKFPYGGLNAGRPVTPPRASAGKGKGAKSGK

SEQ ID NO: 89605 - DNA, 1566 bp, Catharanthus roseus
  CDS (190)..(1134)
gccacgcgtcgattgtacggggggggggggggaaatacgaatcacacactctctgaccggctttgattctatccctccgaatcggagattttatctgttttcagaagttttggtgttcattccctagttccgatcccactttattcagagaaggagatacagtgtggtgacaagaggaacagccggaagatgagtgcggatctggtggcgtcgagcacatatggaaatctggatgagcaggatgagcagatttcacaactcatgcggtgtaaacctttgtccgagacggaggttagagccttatgcgagaaggccaaggagatactgatggaggaaagcaacgtccagcctgtaagaagcccagtgaccatctgtggtgatattcatgggctatttcatgaattggctgaactttttcgcattggagggaagtgtcctgatacaaattatcttttcatgggagattatgtggatcgtggatattactcggtggaaactgtaacactcttagtggctctgaaggtacggtacccccaacgaatcaccattcttcgaggaaatcatgagagtcgtcagattacccaggtttatgggttttatgatgagtgtctgcgcaagtatggcaatgctaatgtctggaagaccttcacagacctttttgattattttccactgacagcattggttgaatctgaaatcttctgtttgcatggtggattatcaccatctattgaaacacttgataacataagaaattttgatcgtgttcaagaagttccccatgaaggacctatgtgtgatctcttgtggtccgatccagatgaccgatgtggttggggtatttcccctcgtggtgccgggtacacatttggccaggatatatctgagcaatttaaccataccaacaacttgattgctagggctcatcagctggttatggagggctataactggagccatgagcaaaaggtcgttactattttcagtgcaccaaattactgttatcgttgtggaaacatggcatctatcttggaagttgatgactgcaggcaacacacatttatccagtttgagccagctccaagaaggggagagcctgatgtgactcggagaacgcctgattatttcctgtaaagcagttgagctagctgattaattgtggtggtctagcggattgtttgtctaaggtggccggacacgtctgtcttcggaattgaaacttttttagcagcaaactactaggattctcttctagtgggtggtgtcacaaggggaccaagaggcggtaaaatactagccagttgggaaggtccgattgattctcgtaagttataattctaaccaagaagttggggaagctaggcactcgtcagataatactgtattgtatcatttcatgtagagaactcacaatctcgtttgtagctgtttgttttcatttagtaattttttgattgttgtttgtattcgtctttatatttttcgctttatatatacttaaaaatactttaccttttaaaaaaaaaaaaaaaaaaaaaaaaaaaaaaaaaaaaaaaaaaaaaaaaa

SEQ ID NO: 89606 - protein, 314 aa, Catharanthus roseus
MSADLVASSTYGNLDEQDEQISQLMRCKPLSETEVRALCEKAKEILMEESNVQPVRSPVTICGDIHGLFHELAELFRIGGKCPDTNYLFMGDYVDRGYYSVETVTLLVALKVRYPQRITILRGNHESRQITQVYGFYDECLRKYGNANVWKTFTDLFDYFPLTALVESEIFCLHGGLSPSIETLDNIRNFDRVQEVPHEGPMCDLLWSDPDDRCGWGISPRGAGYTFGQDISEQFNHTNNLIARAHQLVMEGYNWSHEQKVVTIFSAPNYCYRCGNMASILEVDDCRQHTFIQFEPAPRRGEPDVTRRTPDYFL

SEQ ID NO: 89607 - DNA, 1193 bp, Trichoderma harzianum
  CDS (1)..(984)
atggacacaaatatggaagacgtcgggagggtaccggccgacgtgtcgccagtgcagacggagcctgcgaccagatccacgctggaacagtggattgagaatctgatgaactgcaaacagctgtccgaggccgacgtccagaggctgtgcgacatgggtcgagaggttgttcaggaggaatcaaacgtccagccagtgaaatgccccgtcacggtctgtggcgatatccacggccagttccacgacctgatggagctgttcaagattggcggccccagtcccgacaccaactatctcttcatgggtgactacgtcgacagaggatactactcagtcgagaccgtgtcgctcctcgtcgccctcaagatccgctacccccaacgcatcaccatcctgcgaggcaaccacgagtcgcgccagatcacacaagtctacggcttctacgacgagtgcctccgcaaatacggcaacgccaacgtgtggaagattttcaccgacttcttcgactaccttcccctgaccgccctgattgagaaccagattttctgcctccacggcggcctgtcccccagcatcgacacattagataacatcagggccctcgaccgtgtccaggaagtcccccacgaaggtcccatgtgcgatctcctatggtctgaccccgacgaccgctgcggctggggcatctctccccgcggtgcggggtacacgtttggccaggacatttcagaggctttcaatcacaataacggcttgacattggtggcacgagcgcatcagcttgtcatggaaggttacaactggtctcaggaccggaacgtggtgacaatcttttcagcaccaaattactgttaccgatgtggtaaccaagctgccataatggagattgacgagcatctgaaatataccttccttcaatttgatccgtgcccgagagccggagagccaatggtctctagacgaacccccgactacttcctctaatctagtaccgacgttcttcattcaaacgagttattgctgtaaagggctttttgcaagagggcttatagttgttagagcccagggagccgggcatctaaagaaaaaataatgtacgattaatcctactgccggtgttcgggcccacgccacccagccgtgacaagtctcaatgtgaacaggagttgccaaaaaaaaaaaaaaaaaaaaaa

SEQ ID NO: 89608 - protein, 327 aa, Trichoderma harzianum
MDTNMEDVGRVPADVSPVQTEPATRSTLEQWIENLMNCKQLSEADVQRLCDMGREVVQEESNVQPVKCPVTVCGDIHGQFHDLMELFKIGGPSPDTNYLFMGDYVDRGYYSVETVSLLVALKIRYPQRITILRGNHESRQITQVYGFYDECLRKYGNANVWKIFTDFFDYLPLTALIENQIFCLHGGLSPSIDTLDNIRALDRVQEVPHEGPMCDLLWSDPDDRCGWGISPRGAGYTFGQDISEAFNHNNGLTLVARAHQLVMEGYNWSQDRNVVTIFSAPNYCYRCGNQAAIMEIDEHLKYTFLQFDPCPRAGEPMVSRRTPDYFL

SEQ ID NO: 89609 - DNA, 927 bp, Medicago truncatula
  CDS (1)..(927)
atggattcaaattcccatggtaatctcgacgagcagatttctcagctcatgcagtgcaaacccttgtccgagcaagaggttagggtcttgtgtgataaggcaaaagagattttgatggaagaaagcaatgttcagcctgtaaaaagtcctgttacaatatgcggtgatattcacgggcaattccacgatctggcagagcttttccgcatcggagggaagtgtccagatactaattacttgtttatgggagattacgtcgatcgtggctattattctgtcgaaactgtaacgcttttggtctcccttaaagtgcgttatcgtcagcgtatcactattttgaggggaaatcatgaaagtcgccagattacccaagtttatggattctatgacgagtgcctacggaagtatggcagtgccaatgtttggaagatgtttactgatttgtttgactacttcccattgacagcattggttgaatctgaaatattctgtcttcatggtgggttgtccccatccattgaaacccttgacaacatccgtaattttgatcgtgtgcaagaagttcctcatgagggacccatgtgtgatcttctatggtctgatccggatgatcgctgtggttggggtatctctcctagaggtgctggatataccttcggccaggatatatcagagcagtttaaccataccaataatttgaagctgattgccagagctcaccagctggttatggaaggatataactggggtcatgagcaaaaggtggttaccatattcagtgctcctaattactgttatcgctgtgggaacatggcatccatccttgaagttgatgactgcaaaggacacacattcattcagtttgagccagcaccaaggaggggagagccagatgtaaccagaagaacccctgactacttcctatga

SEQ ID NO: 89610 - protein, 308 aa, Medicago truncatula
MDSNSHGNLDEQISQLMQCKPLSEQEVRVLCDKAKEILMEESNVQPVKSPVTICGDIHGQFHDLAELFRIGGKCPDTNYLFMGDYVDRGYYSVETVTLLVSLKVRYRQRITILRGNHESRQITQVYGFYDECLRKYGSANVWKMFTDLFDYFPLTALVESEIFCLHGGLSPSIETLDNIRNFDRVQEVPHEGPMCDLLWSDPDDRCGWGISPRGAGYTFGQDISEQFNHTNNLKLIARAHQLVMEGYNWGHEQKVVTIFSAPNYCYRCGNMASILEVDDCKGHTFIQFEPAPRRGEPDVTRRTPDYFL

SEQ ID NO: 89611 - DNA, 930 bp, Acyrthosiphon pisum
  CDS (1)..(930)
atggacgataaaacgtccctcaaggaactagaccaatggattgagcagctgaacgagtgcaaacagttgaccgagagccaagtgaagttcctgtgcgacaaggcaaaagaaattttgactaaagagtctaatgtacaagaagtaaaatgtccggtgacagtatgcggggatgtgcacggacagttccacgacctaatggaactgtttcgaataggtggaaagtccccagatacaaattacctgttcatgggagattatgttgatcgtggttactattctgtcgaaactgttacattattggttgcattaaaggtacgataccgtgaaagaataacaattcttagaggtaatcatgaaagtcgacagattacacaagtgtatggcttctatgacgaatgcttacgaaagtatggtaatgcgaacgtatggaagttttttaccgacctgtttgactatctcccattgactgcacttgttgacgaacagattttctgtcttcacggtgggctgtctccatccattgacacgctagatcatattagagcattagatcgtatgcaagaagtccctcatgaaggtcccatgtgtgatctattatggtcagaccctgatgatcgtattggttggggtatatcacctagaggggccggttatacgttcggtcaagatatttcagaaacattcaatcattcgaatggtctgacacttgtttccagagctcatcaacttgtgatggaaggttataactggtgtcatgatcgtaatgtagtgacaatattttcggcccctaattattgttatcggtgtggtaaccaagcagctattatggaactagacgacggcttaaaatactcatttttgcaattcgatccagccccaagacgcggcgaaccacacgtcacccgtaggacaccagattatttcttataa

SEQ ID NO: 89612 - protein, 309 aa, Acyrthosiphon pisum
MDDKTSLKELDQWIEQLNECKQLTESQVKFLCDKAKEILTKESNVQEVKCPVTVCGDVHGQFHDLMELFRIGGKSPDTNYLFMGDYVDRGYYSVETVTLLVALKVRYRERITILRGNHESRQITQVYGFYDECLRKYGNANVWKFFTDLFDYLPLTALVDEQIFCLHGGLSPSIDTLDHIRALDRMQEVPHEGPMCDLLWSDPDDRIGWGISPRGAGYTFGQDISETFNHSNGLTLVSRAHQLVMEGYNWCHDRNVVTIFSAPNYCYRCGNQAAIMELDDGLKYSFLQFDPAPRRGEPHVTRRTPDYFL

SEQ ID NO: 89613 - DNA, 990 bp, Aspergillus oryzae
  CDS (1)..(990)
atggacaacaatatggaaatcgataccgcgcggtcccccgagccccaccgcctgtcgccaacgtctgaccctgggtcgataccgacattggacggatggattgaaaatttgatgagctgcaagcaactagcggaggaagacgtgcggaggctgtgcgatcgggcaagagaggtgttgcaggaagaatccaatgtgcaaccagttaaatgcccagtgactgtgtgtggtgatatacacggccagttccacgacttaatggaactgttccgcatcggaggcccgaatccagacacaaactatctgttcatgggtgactatgtcgaccgtggttattactccgtagagaccgttaccctccttgtttgccttaaaatccgttacccccagcgtatcaccatcctccgtggaaaccacgagtcccgtcagattactcaagtttatggattctacgacgagtgcttgcgtaaatatggcaatgccaatgtctggaaatacttcactgatcttttcgattacctacctctcaccgcactcatcgaaaaccagatcttctgcctccacggcggcctgagtccgtcgatcgacacgcttgacaacattcggtccctggatcggatccaggaggtaccccacgagggaccgatgtgtgacctgctgtggagcgaccccgacgaccgatgtggttggggaatctcgccccgtggtgctggatacaccttcgggcaggatatttcggaagcatttaaccataacaacggcttgactctggttgcacgagcgcatcagcttgtaatggagggatataattggtcgcaggatcggaacgtggtcacaattttctcagcgccgaattattgttaccgctgcggtaaccaagccgcgattatggagattgatgagcatttgaagtatacattcctacaattcgatccttgcccccgcgcaggcgagccaatggtctcgaggcgtacccccgactatttcctgtga

SEQ ID NO: 89614 - protein, 329 aa, Aspergillus oryzae
MDNNMEIDTARSPEPHRLSPTSDPGSIPTLDGWIENLMSCKQLAEEDVRRLCDRAREVLQEESNVQPVKCPVTVCGDIHGQFHDLMELFRIGGPNPDTNYLFMGDYVDRGYYSVETVTLLVCLKIRYPQRITILRGNHESRQITQVYGFYDECLRKYGNANVWKYFTDLFDYLPLTALIENQIFCLHGGLSPSIDTLDNIRSLDRIQEVPHEGPMCDLLWSDPDDRCGWGISPRGAGYTFGQDISEAFNHNNGLTLVARAHQLVMEGYNWSQDRNVVTIFSAPNYCYRCGNQAAIMEIDEHLKYTFLQFDPCPRAGEPMVSRRTPDYFL

SEQ ID NO: 89615 - DNA, 1324 bp, Malus domestica
  CDS (48)..(959)
gctaaacagagagaagaagaagaagaagaagaagaagaagaagagagatggatttggaccagtggatctcaaaggtgaaggaaggacagcatcttctggaggacgagcttcaactcctatgcgaatacgtaaaagagattcttattgaggagtccaatgtgcaacctgtaaacagtccggtcactgtttgtggcgatattcatggccaattccacgacctaatgaaacttttccagactggaggccatgtaccagagacaaattacatatttatgggtgattttgttgatcgaggatacaacagccttgaagttttcactatccttttgcttcttaaggcgagatatccagctaatattacccttttgcgtggtaatcatgagagcaggcaacttacccaggtatatggcttttatgacgaatgccagaggaagtatggaaatgctaatgcctggcggtattgtacagatgtttttgactatctgacactatcggcaattatagatggaactgtgttatgtgtccatggtggactttctcctgacatccgaacaattgatcagatacgggtcattgagcgaaattgtgaaattccacatgaggggccattttgtgatctcatgtggagcgatcctgaagatattgaaacatgggcagtaagtccgcgtggagcaggttggctgtttggatccagagtcacttctgagttcaaccacataaataatctagatctggtttgtcgagcacaccaacttgttcaagaaggtcttaagtacatgtttcaagataaaggccttgtaactgtctggtctgcaccaaattactgttatcgctgtgggaatgtggcttctatcttgagttttaatgacaatatggagagagaggtgaagttcttcactgaaacagaggagaacaaccagatgagaggaccgaggacaggagtaccttatttcttatgatcgtttggagtgattacctgcatcatttgtataatcattttaagtcttggtataggtgttgagagtactggaacagagaagaatcttgaatacgtcggtcagttgctgtggggtggatctcctttctgcttgactgtaggttttccatctggtctgtctggtagccacactattttacattcttgggttgtgtattacttattaggttgctaattgttattcaattcttaatccatgcccgatacatttcgttatgtttcttgtctgccctgttttgcaattcatgtctaatgcattatgcagaaatgcgcaaattacaactagctttctgttatttaatatttatgatgcctatgtatgtcccc

SEQ ID NO: 89616 - protein, 303 aa, Malus domestica
MDLDQWISKVKEGQHLLEDELQLLCEYVKEILIEESNVQPVNSPVTVCGDIHGQFHDLMKLFQTGGHVPETNYIFMGDFVDRGYNSLEVFTILLLLKARYPANITLLRGNHESRQLTQVYGFYDECQRKYGNANAWRYCTDVFDYLTLSAIIDGTVLCVHGGLSPDIRTIDQIRVIERNCEIPHEGPFCDLMWSDPEDIETWAVSPRGAGWLFGSRVTSEFNHINNLDLVCRAHQLVQEGLKYMFQDKGLVTVWSAPNYCYRCGNVASILSFNDNMEREVKFFTETEENNQMRGPRTGVPYFL

SEQ ID NO: 89617 - DNA, 927 bp, Cryptococcus neoformans
  CDS (1)..(927)
atggcggccaacgacgatgtggatgcctggatcgcacaattgatgcaatgcaagcctctgagcgagcccgaagtaaagaagctatgcgataaggcgcgagaagttctgatggaagaatccaatgttcaacccgtgaggtgccctgtcacggtctgtggtgatattcacggtcaatttcacgatctttcagaactcttccgtatcggcggcaactctcctgacacaaactaccttttcatgggggattatgttgaccgaggatactactctgtggagaccgtcacacttttggtcgcgcttaaattgcggtaccgagaccgtgtgactattttacgaggaaaccatgagtcacgtcaaatcacccaggtctatggtttctacgacgagtgtttaagaaaatatggcaatgccaatgtctggaaattcttcaccgacttgtttgactaccttcccctgactgcattgattgacaaccaaatcttctgtcttcacggtggtttgtcgccctcaatcgacacccttgaccacattagatctattgaccgcattcaagaagttcctcatgaaggccctatgtgtgatcttctttggtcagaccctgatgacagatgcggttggggtatcagccctcgaggagctggttatactttcggtcaagatatctctgaggctttcattgtagaccacaacaacggccttacattggtcgcgcgagcacatcagttggtcatggaaggttttgcctggtcacaagaacgaaatgtcgtcaccatattctcagcgcccaactactgttaccgatgcggtaatcaggccgctatccttgaagtggatgacgcgcttaagtacactttccttcaattcgaccctgcgcctcgggctggtgagcctctggtgacccgtagacccccagactacttcctgtaa

SEQ ID NO: 89618 - protein, 308 aa, Cryptococcus neoformans
MAANDDVDAWIAQLMQCKPLSEPEVKKLCDKAREVLMEESNVQPVRCPVTVCGDIHGQFHDLSELFRIGGNSPDTNYLFMGDYVDRGYYSVETVTLLVALKLRYRDRVTILRGNHESRQITQVYGFYDECLRKYGNANVWKFFTDLFDYLPLTALIDNQIFCLHGGLSPSIDTLDHIRSIDRIQEVPHEGPMCDLLWSDPDDRCGWGISPRGAGYTFGQDISEAFIVDHNNGLTLVARAHQLVMEGFAWSQERNVVTIFSAPNYCYRCGNQAAILEVDDALKYTFLQFDPAPRAGEPLVTRRPPDYFL

SEQ ID NO: 89619 - DNA, 930 bp, Drosophila melanogaster
  CDS (1)..(930)
atgacgaccctaacggaattaaacaatattgatcagcttattttgcgaattattgacactcgccgtctcaagcagcttaatttaactgaaacggatatacggttattatgtaatagatctcgggaagtttttatgtcgcaaccaatgctcctcgagctttccgcaccggttaagatctgcggtgatatacatggtcagtttactgacctattgaggctgtttgactatggcggatacccaccagcgtccaattacctatttcttggagattatgtggaccgcggcaaacaatctatcgagaccatgtgcctattgctggcctataaaataaaataccctgaaaacttttttctccttcgtggaaaccatgagtcggctggaattaaccgcatatatggattttacgatgagtgcaagcggcgttacaccataaaactttggcgtacatttgtcgactgttatagttgcatgccagtttccgccatcgttgacgaaaaaatattttgttgtcacggcggtctcagtcccgacttattaaatatgaatcaaattggacaattagcccgaccatgtgacgttcctgacaagggtttactttgcgacctcctatggtcagaccccgatccaaagataatgggatggagcgacaacgatcgaggcgtcagtgttacttttggtgctgacatagtgggaaagtttgtgcaccgtcataaatttgatctcatttgccgtgcacatcaggttgttgaggatggttacgagttctttgcaaagcgacaactaattactatattttctgcaccaaattactgcggagaattcgacaatgcaggtgctatgatgtcagtcgatgagacattaatgtgctcgttctacgtccttaaaccttcaaagaagcctggcctcaggaaaatccactcaaagagctaa

SEQ ID NO: 89620 - protein, 309 aa, Drosophila melanogaster
MTTLTELNNIDQLILRIIDTRRLKQLNLTETDIRLLCNRSREVFMSQPMLLELSAPVKICGDIHGQFTDLLRLFDYGGYPPASNYLFLGDYVDRGKQSIETMCLLLAYKIKYPENFFLLRGNHESAGINRIYGFYDECKRRYTIKLWRTFVDCYSCMPVSAIVDEKIFCCHGGLSPDLLNMNQIGQLARPCDVPDKGLLCDLLWSDPDPKIMGWSDNDRGVSVTFGADIVGKFVHRHKFDLICRAHQVVEDGYEFFAKRQLITIFSAPNYCGEFDNAGAMMSVDETLMCSFYVLKPSKKPGLRKIHSKS

SEQ ID NO: 89621 - DNA, 1014 bp, Drosophila melanogaster
  CDS (1)..(1014)
atggccgtggatacaacactgcacagtttacatttcgcggggcagttgtcgaatagcgacgcgaatgctgactaccgtctgcctggtgccctgaatctgaacgatttgctcaataaactgatgagctttcgacgctcaaagatgcaaaggcttccattgttggagtcagaagtgaacttactgtgcaccctggcacgtgaacttttcctggacgagcccatgttgctcaatgttccggcacccattcgagttgtgggcgacatacacgggcagttttatgatctgctgaagatcctcgatcaatgcggatatccgccgcagacacggtatctatttctcggggattacgtggacaggggcaagaattcggtggaaacgatcaccctgctcttggcactgcgcgtcaagttcccaaagcatatttacctactgcgcggaaatcacgaatcgcagtcggtgaatcgagtctatggattctttgacgagtgcaagcggcgctacacggtgaagctgtggaaaacctttgtcgattgctacaactgcatgcccgtggcagccatcatttcccaccgcatcttctgttgccacggcggcctgagcccgcagctgaaggagctgagcaacatcgaatcgattgcccgtccaacagaagtgcccgaaacgggtctgctatgcgatctgttgtggagcgatccggatcgctatggattcggctggacatcgagtgatcgaggtgttagctatctctatggtcgcgatgtcctcgagaagtttctgcaaaagaacgacttcgatctggtgtgtcgtgcccaccaggtggtggaggatggatacgagttctttgccaaacgccaattggtcaccgtcttctcggcacccaactattgtggattgtacgacaatgcaggagcttcaatgggcgtggacaaggacctagttatctctttcgatatacagcggggtgacattcgaagaatcgtggttagaaatgagagcgtttctcccataagttga

SEQ ID NO: 89622 - protein, 337 aa, Drosophila melanogaster
MAVDTTLHSLHFAGQLSNSDANADYRLPGALNLNDLLNKLMSFRRSKMQRLPLLESEVNLLCTLARELFLDEPMLLNVPAPIRVVGDIHGQFYDLLKILDQCGYPPQTRYLFLGDYVDRGKNSVETITLLLALRVKFPKHIYLLRGNHESQSVNRVYGFFDECKRRYTVKLWKTFVDCYNCMPVAAIISHRIFCCHGGLSPQLKELSNIESIARPTEVPETGLLCDLLWSDPDRYGFGWTSSDRGVSYLYGRDVLEKFLQKNDFDLVCRAHQVVEDGYEFFAKRQLVTVFSAPNYCGLYDNAGASMGVDKDLVISFDIQRGDIRRIVVRNESVSPIS

SEQ ID NO: 89623 - DNA, 1107 bp, Saccharomyces cerevisiae
  CDS (1)..(1107)
atggaattggacgaatgtttagaaaggctatacaaggcccagttactacctgaagtgactgtaagggcactctgctttaagctgaaggaaatgctagtgaaggagtcaaacgtgattcacattcagacccctgtcacagtcgtgggggatatgcatggacagtttcacgatatgctggagatcttccaaataggcggccctgttcctgatacgaattatctgttcttgggcgactatgtagacagggggttgtacagtgtggaaacaattatgctattgattgtgcttaagcttcgatatcctagtagaattcatcttttgaggggaaaccacgagtcacgtcaaatcacgcagagctatggtttctacacggagtgcttgaacaagtacggtggcaattcaagagtttggcaatatttgacagatatatttgactatctagtgttatgctgtattatcggcgacgaaattttttgtgttcatggtgggctctcgcccaatgttcaaaccatagatcagatcaagattattgatagatttcgagaaattccacacgatggcgccatggcagacttggtttggtctgatccggaagaaaacaataaccccacgttagatcatccagataactctggacaacatttccaggtgtcacctcgtggagcaggttatactttcggaagaagcgtggtggagaaattcttacgtatgaacgatatgaacagaatatacagagcccatcagttatgtaacgaaggttaccagatatattttgatggattggttactactgtatggtcggcgccaaactattgttatcggtgcggcaataaagcatctattctggagctgtatagtaaagatcaattctacttcaacgttttcgaagaggcacctgaaaataaactgttgaaagagaacagtatgaacgacaatgccttagaagatagcatatctaatccggtagccaacaggaaattgattgcagattatttcgaagacgactctgcctccgcagatggctccacggaccctgaaatgtacatattttcagatgtataccaagccagatctgcttctaacagacatgttgattacttcttgtag

SEQ ID NO: 89624 - protein, 368 aa, Saccharomyces cerevisiae
MELDECLERLYKAQLLPEVTVRALCFKLKEMLVKESNVIHIQTPVTVVGDMHGQFHDMLEIFQIGGPVPDTNYLFLGDYVDRGLYSVETIMLLIVLKLRYPSRIHLLRGNHESRQITQSYGFYTECLNKYGGNSRVWQYLTDIFDYLVLCCIIGDEIFCVHGGLSPNVQTIDQIKIIDRFREIPHDGAMADLVWSDPEENNNPTLDHPDNSGQHFQVSPRGAGYTFGRSVVEKFLRMNDMNRIYRAHQLCNEGYQIYFDGLVTTVWSAPNYCYRCGNKASILELYSKDQFYFNVFEEAPENKLLKENSMNDNALEDSISNPVANRKLIADYFEDDSASADGSTDPEMYIFSDVYQARSASNRHVDYFL

SEQ ID NO: 89625 - DNA, 1511 bp, Solanum lycopersicum
  CDS (307)..(1227)
gaattcggcacgagggaaaatgatgaagaagaacttcaaaattaccagataatttggagattcaaaccctagcacttttagtaatattcaatctctttgtatttttttgaattttttggtgtttaaattttatttttttgttacgtatatttcgtttgattgatttcagctgaatattcaccgtttgatcttcgatcggtttgattctctgatcggtctgcgtggagttttcagatcggagattgtgaggaaaaggaaaaattctgttaaagcactagaaagttttagaggaatctagataaaaaaatgccgtctcatgcagatctagatcggcagatcgaacaattgatggagtgcaagccgttatcggaagctgatgtgaaaactctgtgtgatcaagcgagggctatacttgttgaggaatggaatgttcaaccggtgaaatgtccggtgactgtttgtggtgatattcatggacagttttacgacctgattgagctgtttcggattggaggaaatgctcctgatactaattatctcttcatgggcgattatgttgaccgtggatactattcagtggagactgtcacacttttggttgctctgaaggttcgttatagagatagaatcacgattcttaggggaaatcatgaaagccggcaaatcacccaagtgtatggtttttatgatgaatgcttgaggaaatatggcaatgcaaatgtttggaagtatttcactgatctttttgattatctaccactaacagcactgatagagagtcagatattctgtttgcatggaggactctcaccttctctggatacactggataatatccgagcgctggaccgtatacaagaggttccacatgaagggccaatgtgtgatctcctgtggtctgatccagatgatcggtgtggttggggaatctcacctcgaggggctggttatacctttggacaggatatagcatctcaattcaatcacaccaatggtctcaccctgatttctagagctcatcagcttgtgatggagggtttcaattggtgtcaggataagaatgttgtgacagtatttagtgctccaaactattgttaccggtgtggtaatatggctgccattctagaaataggcgaaaacatggagcagaatttccttcagtttgacccagctcctcgacagatagagcccgacaccacaaggaagactccagattactttttgtgattccaatacttgcgcttgtttgccagcaggtatgtttcagaaggtggagttttgctggttgaggattattctcgagaccattcttttgtttggagctcgacttcactctatgccagtagctcagtagagttgacgaaatgccccgagtggttttcatgtatatttttcaaatcgaagcaacacggtacattctgttctgtaatttgaaatctaccgtaaaaagctgtttttttccctcaatgtccaatcactgaccttgtttcaaccaaaaaaaaaaaaaaaaa

SEQ ID NO: 89626 - protein, 306 aa, Solanum lycopersicum
MPSHADLDRQIEQLMECKPLSEADVKTLCDQARAILVEEWNVQPVKCPVTVCGDIHGQFYDLIELFRIGGNAPDTNYLFMGDYVDRGYYSVETVTLLVALKVRYRDRITILRGNHESRQITQVYGFYDECLRKYGNANVWKYFTDLFDYLPLTALIESQIFCLHGGLSPSLDTLDNIRALDRIQEVPHEGPMCDLLWSDPDDRCGWGISPRGAGYTFGQDIASQFNHTNGLTLISRAHQLVMEGFNWCQDKNVVTVFSAPNYCYRCGNMAAILEIGENMEQNFLQFDPAPRQIEPDTTRKTPDYFL

SEQ ID NO: 89627 - DNA, 1380 bp, Solanum lycopersicum
  CDS (270)..(1190)
gaattcggcacgagcatgaatggagacgaatttcagaaacaggagatgattcagagattgaaaccctagtttcttcatcaatgttccaatcgttaatttctgtttgattttaatcttcggcgtgcaaaaactccgattctgttggtcaatttcatagcaattggattttacctcgattcgatctgaggacttttgggtctttttttgctaatcgaagcggtgaggaatatttaggcaggtgattgtagaggataattttgtttgaaaaaatgccgtcgcacgcggatgtagatcggcagatcgagcaattgatggagtgcaagccgttatcggaggcggaggtgaagacgttgtgtgaacaagcaagggcgatactagtggaggaatggaatgtgcaaccggtgaaatgtccggtgacggtgtgcggtgatatccatggacagttttacgatctgattgagctttttcgaatcggcggcaacgtcctgattactaattatctcttcatgggagattatgttgaccgtggatactattctgtcgagactgtctcactattggttgctttgaaggttcgttatagagatagaatcacaattcttaggggaaaccatgaaagccgacagatcactcaagtgtatggtttttatgatgaatgtttgaggaagtatggaaatgccaatgtttggaagtatttcactgatctctttgattatctaccattgacggcactcatagagagtcagatattctgtttgcatggaggactctcaccatcccttgatacacttgataacatccgagcactggaccgtatacaagaggtgccacatgaagggccgatgtgtgatctcctatggtctgatccagacgatcgctgtggttggggaatatcacctcggggggctggttacacatttggacaggatatagcatctcagtttaatcacactaatggtctctcactgatttctagagcccatcagcttgtcatggaaggttttaattggtgtcaggataagaatgttgtaacagtatttagtgctccaaactattgttatcgctgtggtaatatggctgcaatcctagaaataagtgaaaacatggagcagaatttccttcagtttgacccagctccacgacagattgagcctgatactacaaggaagactccagactacttcttgtaatccgaatacttgagctgactgtttgtagcccatcagtatcgtatcttgtagatgtgtctttaaaaaaaaaggttatgttatttgaggattagtatcatcatcattgttttgtttggagtttgctctgctgctggcttttaacatatcccgtagattcgccagagttttgacaaaaaaaaaaaaaaaaaaa

SEQ ID NO: 89628 - protein, 306 aa, Solanum lycopersicum
MPSHADVDRQIEQLMECKPLSEAEVKTLCEQARAILVEEWNVQPVKCPVTVCGDIHGQFYDLIELFRIGGNVLITNYLFMGDYVDRGYYSVETVSLLVALKVRYRDRITILRGNHESRQITQVYGFYDECLRKYGNANVWKYFTDLFDYLPLTALIESQIFCLHGGLSPSLDTLDNIRALDRIQEVPHEGPMCDLLWSDPDDRCGWGISPRGAGYTFGQDIASQFNHTNGLSLISRAHQLVMEGFNWCQDKNVVTVFSAPNYCYRCGNMAAILEISENMEQNFLQFDPAPRQIEPDTTRKTPDYFL

SEQ ID NO: 89629 - DNA, 1261 bp, Arabidopsis thaliana
  CDS (153)..(1073)
aaacaaaaccaaagacgagccagagccacctctaacaccatcggcgacttctcctcctactcctccgtcgccgacgtgttcgatttacaacgattcggtggctaatcgttgttagatttagaattaaaggttaaaggagacgacgacgagagatgccgtcaaacggagatctcgaccgtcagatcgaacagctaatggagtgtaagccgttaggtgaagcagacgtgaagatcctttgcgatcaagctaaagcgattctcgttgaggaatataatgttcaaccggttaagtgtccggttacggtatgcggcgatatccatggacagttttatgacctaattgagctatttcgtattggtggtaatgctcctgatactaattacctcttcatgggagattatgtagatcgtggctactattctgtagaaacagtctctctattggtggcattgaaggtgcgttacagggacagacttacgatcctgcgagggaatcatgagagccgtcagattacacaagtctatggtttttatgacgaatgcttgaggaaatacggaaatgcaaatgtgtggaagtattttacggaccttttcgattatctccctctaacagcactcatagagagtcaggttttctgtttgcatggaggcctttcaccttctctggatactcttgacaatatccgaagcttggatcgaatacaagaggttccacacgaaggaccaatgtgcgatctactctggtctgatcccgacgatcgttgtggatggggaatatctcctcgtggtgctggttacacgtttggacaggacattgctactcagttcaatcataacaatggactgagtctgatatcaagagcgcatcaacttgtaatggaaggctataattggtgtcaggaaaagaacgtagtgacagtgtttagtgcaccaaactactgttacagatgtggaaacatggccgcaattcttgagattggagaaaagatggaacagaacttccttcaattcgatccagcacctagacaagtcgaacccgataccacacgcaagacccctgattattttttgtgatttcattttttttcttccaaagtttgtttgttgctgtatcattgtagatgtgtctctgttttattttgttttttcgagtctctagatggaatgtgataccaaagacgaaaaacccatcatttttttgttgatgttgatactgaaacaggtttgtagaagcctcttcttattatagaaaatgtcttttg

SEQ ID NO: 89630 - protein, 306 aa, Arabidopsis thaliana
MPSNGDLDRQIEQLMECKPLGEADVKILCDQAKAILVEEYNVQPVKCPVTVCGDIHGQFYDLIELFRIGGNAPDTNYLFMGDYVDRGYYSVETVSLLVALKVRYRDRLTILRGNHESRQITQVYGFYDECLRKYGNANVWKYFTDLFDYLPLTALIESQVFCLHGGLSPSLDTLDNIRSLDRIQEVPHEGPMCDLLWSDPDDRCGWGISPRGAGYTFGQDIATQFNHNNGLSLISRAHQLVMEGYNWCQEKNVVTVFSAPNYCYRCGNMAAILEIGEKMEQNFLQFDPAPRQVEPDTTRKTPDYFL

SEQ ID NO: 89631 - DNA, 1213 bp, Pisum sativum
  CDS (95)..(1006)
gagaatcgagacgctcctttcctccttctcctcttgttttggtacatttcgtattttagcaccgccgagggagaagagagagactgagtgagatatggatttggaccagtggatctcgaaggttaaagacggccaacaccttctcgaagacgaacttcaacttctctgcgaatatgttaaagagattcttattgaggagtccaatgtgcaacctgtgaatagtccagtaactgtttgtggtgatattcatggtcagtttcatgatctaatgaaacttttccagaccggtggtcatgttcccgagacaaattacatttttatgggggactttgttgatcggggttacaatagtcttgaagtattcaccatccttttgcttctaaaagctagatacccggctaatattacccttctacgtggaaatcatgaaagtagacaactcacccaggtctatggattttatgatgaatgccagagaaagtatggaaatgctaatgcttggcgatactgtaccgatgtcttcgactatcttacactttctgcaattatagatggaactgtgctttgtgttcacggcggcctttctccagacattcgaacaattgaccagataagagtcattgagcggaactgtgaaattcctcatgaggggccattttgtgatctaatgtggagtgatcctgaggatattgaaacatgggcagtcagtccgcgtggagctggttggcttttcggatctcgggttacatctgagttcaatcacataaacaaccttgatcttgtttgtcgagcacatcaacttgtacaagaaggccttaaatacatgttccaagataaaggccttgtaactgtatggtctgcacctaattactgttaccgttgtggaaatgtagcttctattcttagtttcaatgaaaatatggagagagaagttaagtttttcactgaaacagaggagaacaatcagatgagagggccaaggacaggtgttccgtatttcttataatttggtgaatatttgactgaatttattgtaaaattatttagtaaatggcttactattatgattggatagtgctagtcatgtatcgttgagattcaaatgcattgttttttcttaggtgaaccctatttttgttatattattttgtctacttccaccaaatattttacatttagtttcacaatcctttgtataaaaaaaaaaaaaaaa

SEQ ID NO: 89632 - protein, 303 aa, Pisum sativum
MDLDQWISKVKDGQHLLEDELQLLCEYVKEILIEESNVQPVNSPVTVCGDIHGQFHDLMKLFQTGGHVPETNYIFMGDFVDRGYNSLEVFTILLLLKARYPANITLLRGNHESRQLTQVYGFYDECQRKYGNANAWRYCTDVFDYLTLSAIIDGTVLCVHGGLSPDIRTIDQIRVIERNCEIPHEGPFCDLMWSDPEDIETWAVSPRGAGWLFGSRVTSEFNHINNLDLVCRAHQLVQEGLKYMFQDKGLVTVWSAPNYCYRCGNVASILSFNENMEREVKFFTETEENNQMRGPRTGVPYFL

SEQ ID NO: 89633 - DNA, 993 bp, Drosophila melanogaster
  CDS (1)..(993)
atgggcgacttcgatctgaatgtggacagcttgatacagcggctgctggagatgcgcagctgccgaacgggcaaacaggtccagatgacggaggcggaggtgcgtggcctctgtctcaagtcgcgcgagatcttcttgcaacagcccatcctgctggaactggaggcaccgctgatcatctgcggcgacatccacggccagtacacagacctgttgcgcctgttcgagtacggcggattccctccggctgccaactacttgttcctcggcgactacgtcgatcggggcaagcagtccctggagaccatctgtctgctgctggcctacaagatcaaatatccggagaacttcttcttgttgcgcggcaaccacgagtgcgccagtattaataggatttacggcttctacgatgagtgcaagcgccgatacaatgtcaaactgtggaagactttcacagattgcttcaactgtctgccggtagccgccattattgacgaaaagatcttctgctgccacggcggcctcagtcccgatcttcagggcatggagcagatccgtcgcctaatgcgacccacagatatgccggataccgggttactgtgcgatcttctgtggagtgatcccgacaaggatgttcagggttggggcgagaatgatcgcggtgtgagcttcaccttcggtgtggatgtggtctccaagtttttgaaccgccacgagctggacttgatctgccgtgcacatcaggttgtggaggatggctatgagttctttgcgcgtcggcaactggtcacgttgttctcggcgcccaattactgtggagagttcgacaatgccggcggaatgatgaccgtggacgacacgctgatgtgctcattccagatcctgaaaccatccgagaagaaggccaagtatctgtacagcggaatgaactcgtcgcgacccacaacaccgcagcgcagcgccccaatgcttgcgaccaacaagaagaaataa

SEQ ID NO: 89634 - protein, 330 aa, Drosophila melanogaster
MGDFDLNVDSLIQRLLEMRSCRTGKQVQMTEAEVRGLCLKSREIFLQQPILLELEAPLIICGDIHGQYTDLLRLFEYGGFPPAANYLFLGDYVDRGKQSLETICLLLAYKIKYPENFFLLRGNHECASINRIYGFYDECKRRYNVKLWKTFTDCFNCLPVAAIIDEKIFCCHGGLSPDLQGMEQIRRLMRPTDMPDTGLLCDLLWSDPDKDVQGWGENDRGVSFTFGVDVVSKFLNRHELDLICRAHQVVEDGYEFFARRQLVTLFSAPNYCGEFDNAGGMMTVDDTLMCSFQILKPSEKKAKYLYSGMNSSRPTTPQRSAPMLATNKKK

SEQ ID NO: 89635 - DNA, 930 bp, Drosophila melanogaster
  CDS (1)..(930)
  misc_feature (403)..(403): w is a or t
  misc_feature (422)..(422): n is a, g, c or t
atgacgaccctaacggaattaaacaatattgatcagcttattttgcgaattattgacactcgccgtctcaagcagcttaatttaactgaaacggatatacggttattatgtaatagatctcgggaagtttttatgtcgcaaccaatgctcctcgagctttccgcaccggttaagatctgcggtgatatacatggtcagtttactgacctattgaggctgtttgactatggcggatacccaccagcgtccaattacctatttcttggagattatgtggaccgcggcaaacaatctatcgagaccatgtgcctattgctggcctataaaataaaataccctgaaaacttttttctccttcgtggaaaccatgagtcggctggaattaaccgcatatatggatttwacgatgagtgcaagcggcngtacaccataaaactttggcgtacatttgtcgactgttatagttgcatgccagtttccgccatcgttgacgaaaaaatattttgttgtcacggcggtctcagtcccgacttattaaatatgaatcaaattggacaattagcccgaccatgtgacgttcctgacaagggtttactttgcgacctcctatggtcagaccccgatccaaagataatgggatggagcgacaacgatcgaggcgtcagtgttacttttggtgctgacatagtgggaaagtttgtgcaccgtcataaatttgatctcatttgccgtgcacatcaggttgttgaggatggttacgagttctttgcaaagcgacaactaattactatattttctgcaccaaattactgcggagaattcgacaatgcaggtgctatgatgtcagtcgatgagacattaatgtgctcgttctacgtccttaaaccttcaaagaagcctggcctcaggaaaatccactcaaagagctaa

SEQ ID NO: 89636 - protein, 309 aa, Drosophila melanogaster
  misc_feature (135)..(135): The Xaa at location 135 stands for Asn, or Tyr.
  misc_feature (141)..(141): The Xaa at location 141 stands for Arg, Gln, Leu, or Pro.
MTTLTELNNIDQLILRIIDTRRLKQLNLTETDIRLLCNRSREVFMSQPMLLELSAPVKICGDIHGQFTDLLRLFDYGGYPPASNYLFLGDYVDRGKQSIETMCLLLAYKIKYPENFFLLRGNHESAGINRIYGFXDECKRXYTIKLWRTFVDCYSCMPVSAIVDEKIFCCHGGLSPDLLNMNQIGQLARPCDVPDKGLLCDLLWSDPDPKIMGWSDNDRGVSVTFGADIVGKFVHRHKFDLICRAHQVVEDGYEFFAKRQLITIFSAPNYCGEFDNAGAMMSVDETLMCSFYVLKPSKKPGLRKIHSKS

SEQ ID NO: 89637 - DNA, 1502 bp, Yarrowia lipolytica
  CDS (49)..(1191)
ttctcaagctcgtggcagccaagaaaaccaacctgtgtgcttctctggatgttaccaccaccaagagctcgctgtagacacaagagcttccgtcacccgcatccatctcacagacacagacacacacccacacattcacgcatcaccagacccacaagaaccgccacaatggaagattcagacgtgctgatgagagatatcaacgacgacggactcaagcccatggacgccatgggagccgggggcgaagggacgttcacagaactgacacccacaacccgcggccagctggacgcctggatcgcacgactgaccgaatgccagcctctcagcgaagacgacgtcaacgagctgtgcaacatggccaagggggtgttgcagaaggaggaaaacgtgcagcccgtgcacgcgccggtgaccatctgtggagacgtgcacggccagttccacgacctgatggagctgttcaaaatcggcgggccgtgtccagacacaaactacctgtttatgggagactacgtggaccgaggctactactcggtcgaaacggtgtcctatctggtggccatgaaggtgcgataccccaaccgactgaccattctgcgaggaaaccacgagtcgcgacaaatcacccaggtctacggcttctacgacgagtgtctgcgaaagtacggaaacgccaacgtgtggagagccttcacgtcgctgttcgactacttccccgtcaccgccctggtggagaaccaaatcttctgtctgcacggaggcctgtctcccatgatcgagtccatcgacaacatccgagaactcaaccgattccaggaggtgccccacgacggccccatgtgcgacctgctgtggtccgaccccgatgaccgaggaggatggggaatgagcccccgaggagccggcttcaccttcggtgccgacatttccgaacagtttaaccacacaaacaacctgagtctcatttcaagagcacaccagctggtcatggaaggcttcagctgggcacacgagcagcaggtggtcaccatcttctccgcccccaactactgctaccgatgcggaaaccaggccgccatcatggaggtggacgaaaacctctcaaactcctttttgcagtacgatccttgtccccgtcccggagagccctccgtgtctcgacgaacccccgactacttcttgtagacactgtcacgcgagaatacagatttctattagtacaaaaggacacaaaagaaatgatataatgatatagggtaatgatacgtatgatgtacttgtatcagattgatcttacagcaatacatactgtaccctctttaaccaccagggtacttgctcaaacaatacagcaaaaaaaaaacacaacggggatatgggattacgatggtcacgtgatcctcaagcgagctcattgagcttgccgataaggtcggaccttatgtgtgcatgatcaagacccatatcgacctcctttaccacctccccctacgcca

SEQ ID NO: 89638 - protein, 380 aa, Yarrowia lipolytica
MLPPPRARCRHKSFRHPHPSHRHRHTPTHSRITRPTRTATMEDSDVLMRDINDDGLKPMDAMGAGGEGTFTELTPTTRGQLDAWIARLTECQPLSEDDVNELCNMAKGVLQKEENVQPVHAPVTICGDVHGQFHDLMELFKIGGPCPDTNYLFMGDYVDRGYYSVETVSYLVAMKVRYPNRLTILRGNHESRQITQVYGFYDECLRKYGNANVWRAFTSLFDYFPVTALVENQIFCLHGGLSPMIESIDNIRELNRFQEVPHDGPMCDLLWSDPDDRGGWGMSPRGAGFTFGADISEQFNHTNNLSLISRAHQLVMEGFSWAHEQQVVTIFSAPNYCYRCGNQAAIMEVDENLSNSFLQYDPCPRPGEPSVSRRTPDYFL

SEQ ID NO: 89639 - DNA, 1497 bp, Fagus sylvatica
  CDS (258)..(1178)
gaggaatgctcgaaaggtcgaagaaccccaaccgatttccaaaacgattcgtttcgtcctctgccgccgcgtttcgatccgaaaaccctaagctaagcacttcgtaatcggtttcgatgactcttcgcttcgattgaatcccgagtctcagagatcggtcggttcgcggttcgagtttctgtacggctttcgattcgttaaatcggcgatctcggtggtgcggatctgagcgttgagagagagagagactgaaaacgatgccgtcgcactcggatctggaccgtcagatcgagcatctgatggagtgcaagccgttgccggaggcggaggtgaaaacgctttgcgatcaggcgagagcgattctggtggaggagtggaacgtacaaccggtgaagtgcccggtgacggtgtgcggtgatatccacggcgagttctacgatctcatcgagctctttcggataggaggaaatgctcccgataccaattatctcttcatgggagattatgtagatcgtgggtactacccagttgagactgttacacttttggtggctctgaaagttcgttatagagataggatcacaattcttagagggaatcatgagagccggcaaataactcaagtgtatggtttttatgacgaatgcttgagaaaatacggaaatgccaacgtgtggaagttcttcaccgatctatttgattatctaccccttacagcccttattgagagtcagatcttctgtttgcatggaggtctttcaccatctttggatacgttggataatattcgagccttggaccgtatacaggaggttccacacgaaggaccaatgtgtgacctcttatggtctgatcctgatgaccgatgtggttggggaatatctcctcgtggtgctggatatacatttggacaggatatagctgctcagttcaaccataccaatgggctcacactgatttcaagagcccaccagcttgttatggaagggttcaattggtgtcaggataagaatgtggtgactgtatttagtgcaccaaactattgttaccgttgtgggaatatggctgcaatactggagattggggagaatatggaccagaattttctgcagtttgatccagccccccgacaaattgagcctgacaccacacgcaagactccagattattttttgtaattttcgtatatctacctgctgcttgtaatccctattttctgctgtgttattgtagatgtgtctttaaaaagaggagttttgttgttttaagttgagggttatcatcaacatgattcttttgtttggagtttgtcctgctgctgctttgttgatttcctcaagaaactcataggagaacttacagaagccaccaatatggcctgttttcttgtatattttcgggaggaggaagcggcaataacatggtatatctcgttctgtaattttgcaattttaaggtagagagcagatttttcaaaaaaaaaaaaaaaaaaaaaaa

SEQ ID NO: 89640 - protein, 306 aa, Fagus sylvatica
MPSHSDLDRQIEHLMECKPLPEAEVKTLCDQARAILVEEWNVQPVKCPVTVCGDIHGEFYDLIELFRIGGNAPDTNYLFMGDYVDRGYYPVETVTLLVALKVRYRDRITILRGNHESRQITQVYGFYDECLRKYGNANVWKFFTDLFDYLPLTALIESQIFCLHGGLSPSLDTLDNIRALDRIQEVPHEGPMCDLLWSDPDDRCGWGISPRGAGYTFGQDIAAQFNHTNGLTLISRAHQLVMEGFNWCQDKNVVTVFSAPNYCYRCGNMAAILEIGENMDQNFLQFDPAPRQIEPDTTRKTPDYFL

SEQ ID NO: 89641 - DNA, 927 bp, Oryza sativa
  CDS (1)..(927)
atgggcataaatgtctacacaactggtgttcttatattcctggaatctacgtgtgttctaatggaccctcaattgcaggttaaagcactgtgcgagaaggccaaggagatattgatggaggaaagcaatgttcagcctgtcaaaagcccagtaacgatttgtggtgatattcacggacaattccatgatcttgtagaactttttcggatcggtgggaagtgcccagatactaattatttatttatgggggattatgtggatcgtggctattactctgttgagactgttactcttttggtagcgctgaaggtgcgtcacccacatcggattacaatccttcgcggaaatcacgagagccggcagatcacacaggtttatggattctacgacgaatgtttacgaaagtatggcaatgcaaatgtatggaagatattcacggatttatttgactattttccactgacagcactggtggaatctgaaattttctgcctgcatggtggtttatctccatcaattgagaaccttgatagtgtgcgtagcttagatcgtgtccaagaggttccgcatgagggaccaatgtgtgatcttctatggtctgatccagatgaccgctgtggttggggcatatctcctcgtggtgctggctacacttttgggcaggatatatccgagcaattcaatcacaccaacaatctcaaacttgtagctcgggctcatcaactagttatggaaggatataattgggctcatgaacaaaaagttgttactatattcagtgctccaaattattgttaccgatgtgggaatatggcatccattttggaagttgatgactgcaacagccatacttttattcagttcgaaccagctcctaggagaggtgagcctgacgtgacacggaggacgcccgattatttcctttga

SEQ ID NO: 89642 - protein, 308 aa, Oryza sativa
MGINVYTTGVLIFLESTCVLMDPQLQVKALCEKAKEILMEESNVQPVKSPVTICGDIHGQFHDLVELFRIGGKCPDTNYLFMGDYVDRGYYSVETVTLLVALKVRHPHRITILRGNHESRQITQVYGFYDECLRKYGNANVWKIFTDLFDYFPLTALVESEIFCLHGGLSPSIENLDSVRSLDRVQEVPHEGPMCDLLWSDPDDRCGWGISPRGAGYTFGQDISEQFNHTNNLKLVARAHQLVMEGYNWAHEQKVVTIFSAPNYCYRCGNMASILEVDDCNSHTFIQFEPAPRRGEPDVTRRTPDYFL

SEQ ID NO: 89643 - DNA, 1502 bp, Vicia faba
  CDS (120)..(1061)
tcctcttccgtccacactcttcactgcgagagcgagcgaggacgctgaaaaaatctcctcctcctagggtttgttaaaacttccccaatttgaatcttctctcccgatttcaccataaaatgggtgccaattcgaatctagccgaatccactcacgatctcaacgagcagatctctcagctcatgcagtgcaaaccactttccgaacaacaggttaaagaattatgtgagaaggctaaggagattttaatggatgaaagtaatgtccagcctgtgaaaagcccggtgacaatttgtggcgatattcatgggcagtttcatgatcttgctgaactatttcgaattggagggaagtgtccagataccaactacttgtttatgggcgattatgtggatcggggttattattcagttgagactgtaacacttctcgtggcactcaaagtgcggtatcctcagcggattactattcttagaggaaaccatgaaagtcgtcagattactcaagtatatggattttacgatgagtgcctaagaaagtatgggagtgctaatgtctggaagatctttacagacctcttcgattttttcccgttgactgcattggttgaatcagaaatattttgtttgcatggtggactgtcaccgtcaattgagacccttgataacataagaaactttgaccgtgttcaagaggttcctcatgaagggcctatgtgtgatctactatggtctgacccagatgacagatgtggttggggaatttctcctcgtggggctggatacacctttggccaggatatatctgaacagttcaatcacacgaacagccttaaattaattgctagagctcaccagcttgttatggatggatttaactgggctcatgaacaaaaggtggttaccattttcagtgctcctaattactgttaccgatgtggcaacatggcttccatattggaggttgatgattgcaagggccacacatttatccagtttgaacctgctccaaggagaggagaacctgatgtcactcgaagaacgcctgattacttcttgtagtgtagctgcggctgaatgtctctctcatactggcatatcatgggtactctactttcagtttaatatcaggtagttgtggatcctcattggggagattgccgtagtgcttatatccagttgatattttggttgtccaaaggctgctttgatgtaaaataggcggttaatattccaccgatctgttacactgaagaatttgctggacaccttatctggaagaagtcgtcaggattatgactctacaaggatgtattaatccagcaaaatgtggatattttttttgtatgttttccatgttattttttttatatattatgttttccaggccctagttcctacacgactggatttttttaaatctctgggacgcttttgatattttatctcaattttagtaaaagtttcatggtaaaaaaaaaaaaaaaaaaaaaaaaaaaaaaa

SEQ ID NO: 89644 - protein, 313 aa, Vicia faba
MGANSNLAESTHDLNEQISQLMQCKPLSEQQVKELCEKAKEILMDESNVQPVKSPVTICGDIHGQFHDLAELFRIGGKCPDTNYLFMGDYVDRGYYSVETVTLLVALKVRYPQRITILRGNHESRQITQVYGFYDECLRKYGSANVWKIFTDLFDFFPLTALVESEIFCLHGGLSPSIETLDNIRNFDRVQEVPHEGPMCDLLWSDPDDRCGWGISPRGAGYTFGQDISEQFNHTNSLKLIARAHQLVMDGFNWAHEQKVVTIFSAPNYCYRCGNMASILEVDDCKGHTFIQFEPAPRRGEPDVTRRTPDYFL

SEQ ID NO: 89645 - DNA, 1475 bp, Vicia faba
  CDS (255)..(1175)
ctctcaaatgagagtaattatttgaagactagttttgctctaaaaaggatataatttttgtcgcgttgtttttgtctctcaaattgagagactgaaaccaacagaaccaccaaaaacggtgcgttttactctcgcccttcggattcagaatctaaccctaacaccgtcgacgacgctcggattgatcaattccggcgagaccagatctatctacagaagaactgaagatctggattggatcggtagtgataaacatgccgtctcaagcggatctggaccgtcaaatcgaacaccttatggagtgcaaacctttgacagaatcggaagtgaaggctctttgcgatcaagcgagagcgattctggtggaagagtggaacgtgcagccagtgaagtgtccggtcacggtttgcggtgatattcacggccagttttacgatctcatcgagttgtttcggataggagggcatgctcctcatactaattacctctttatgggtgattatgtagatcgtggatactattctgtggagactgttacacttctcgtggccttgaaagttcgttacagagatagaattacaattctcagaggaaaccatgaaagccgtcaaattactcaagtgtatggcttctatgatgaatgcttgagaaaatacggaaatgccaatgtctggaaattttttaccgacttgtttgattacttacctctgactgccctcattgagagtcaggttttctgcttgcatggaggtctctcaccttctttggacacactggacaatatcagagcattggatcgtatacaagaggttccgcatgaagggccaatgtgtgatctcttatggtctgatcccgatgatcgttgtgggtggggaatatctccacgtggtgctggatacacatttgggcaggatatagcttcacagttcaatcacaccaatggtctctcgctgatatccagagctcaccagcttgttatggaaggatacaattgggctcaggagaagaatgtggtcactgtatttagtgctccaaattactgttaccgatgtgggaatatggctgccatactggaaatcggagagaacatggatcagaattttcttcagtttgacccagcccccaggcaaattgagcctgatactacacgcaaaactccagattattttttgtaatgactcatatatctgcttgtttgtagtactgcttttgcaattactgtagatgtctttttaaggaaagaagaatttcactgtttaattgaagactgatcatcgacatgattctttaagttggagttgtcctcccgccgctgctcatgccttatctgcgagaaatcaatagagctgatctcagccaccaattggtgttgtatatttttagtggggaagcggcaataacatggttgttatatttcgttttgtaattttttatttataattaaacctcaatttagaggaaaaaaaaaaaaaaaa

SEQ ID NO: 89646 - protein, 306 aa, Vicia faba
MPSQADLDRQIEHLMECKPLTESEVKALCDQARAILVEEWNVQPVKCPVTVCGDIHGQFYDLIELFRIGGHAPHTNYLFMGDYVDRGYYSVETVTLLVALKVRYRDRITILRGNHESRQITQVYGFYDECLRKYGNANVWKFFTDLFDYLPLTALIESQVFCLHGGLSPSLDTLDNIRALDRIQEVPHEGPMCDLLWSDPDDRCGWGISPRGAGYTFGQDIASQFNHTNGLSLISRAHQLVMEGYNWAQEKNVVTVFSAPNYCYRCGNMAAILEIGENMDQNFLQFDPAPRQIEPDTTRKTPDYFL

SEQ ID NO: 89647 - DNA, 1417 bp, Vicia faba
  CDS (256)..(1176)
cacacaaaacagagcaaaagagagcgaaatgaatgattgagaagagatccaataataatataaagaaaccatttcgaaacgcatcgtttcgcatcggaatctcatcagcctcatctacccggacgattctccggtcaccgtcgccgactcttctccggtcggcttaacagctgtcttctgattctgatttccttcgatcggttggaaacatagatctaggagcttccagatctgagaattttttgagccaaaacgatgccgtctcacgcggatctggatcggcagatcgagcatctgatggagtgcaagcctctaccggaggcggatgtgaaggcgctttgcgatcaggctagggcgattctggtggaagagtggaacgttcaaccggtgaagtgtcccgttacggtttgtggtgatattcacggtcagttttatgatctgattgagctttttcggataggaggaaacgcgcctgatactaattatctctttatgggagattatgtagatcgtgggtactattcagtggagactgtttcacttttggtggcactgaaagtacgttatagagataggattacaattctcaggggaaatcatgagagtcgtcaaattactcaagtgtatggcttctacgatgaatgcttgagaaagtatggaaatgcaaatgtctggaaattctttaccgacttgtttgattatttacctctgaccgcccttattgagagtcagattttctgtttgcatggaggtctctcgccatctttggatacactggataatatccgcgccttggatcgcatacaggaggttccacatgaaggaccgatgtgcgatctcttgtggtctgatcccgatgatcgttgtggttggggaatatctccacgaggtgctggatatacatttggacaggatatagctgcccagttcaatcatacaaatggtctctcactgatatctagagctcatcagctcgtgatggaaggatacaattggtgccaggagaagaatgtggtgactgtttttagtgctccaaattactgctaccgatgtgggaatatggctgcgattctggaaattggggagaatatggatcagaattttctgcagtttgatccagctccgaggcaaattgagcctgacactacacgaaagacaccagattattttttgtaacttcatatatgtctctgtatgtagttacttctttatgctgttactgtagatttgtctttaagaaaaagagggttatcatcaacaacataattctttctttttagagtttgtctgctgctgctgctgtcgtcttatttggacaagaaaccaatagaattgacacaattgttattgtatatttttgataggaggaagcggcaataacatggtatatcttgtgctgtaaaaaaaaaaaaaaaaa

SEQ ID NO: 89648 - protein, 306 aa, Vicia faba
MPSHADLDRQIEHLMECKPLPEADVKALCDQARAILVEEWNVQPVKCPVTVCGDIHGQFYDLIELFRIGGNAPDTNYLFMGDYVDRGYYSVETVSLLVALKVRYRDRITILRGNHESRQITQVYGFYDECLRKYGNANVWKFFTDLFDYLPLTALIESQIFCLHGGLSPSLDTLDNIRALDRIQEVPHEGPMCDLLWSDPDDRCGWGISPRGAGYTFGQDIAAQFNHTNGLSLISRAHQLVMEGYNWCQEKNVVTVFSAPNYCYRCGNMAAILEIGENMDQNFLQFDPAPRQIEPDTTRKTPDYFL

SEQ ID NO: 89649 - DNA, 936 bp, Saccharomyces cerevisiae
  CDS (1)..(936)
atggtatctagaggccccgacgaatggcttgaaacaataaagaaatgccaggcgctaactgaaaacgagatgaaacaactgtgtgaaatggtgaaagaacttttgatggaggaaagtaacatccagccggtacagacccccgttactgtatgtggagacatacacggccaatttcatgacttgttagagctattccgtacggcgggtggctttcctgacgatataaactacatttttctcggtgattacgtggatcgtggctactatagtctggaaacttttacgcttttaatgtgtctgaaagtcaagtacccggcaaagataactttggtcagaggaaaccatgagtccagacaaattactcaagtttacgggttctacgaggaatgcctgaataagtacggatctaccaccgtatggaagtattgctgtcaagtttttgatttcctgacgctggccgctataattgacggtaagatcttatgtgtccatggagggttatctcccgagattagaatgctcgatcaaatcagagtcttgtcaagagctcaagaagtgccacacgagggtgggttctcggacctgctttggtcagaccctgacaatgtagaggcttggcaagtttcccctcgtggtgcaggatggctctttggcagtaaagttgctagagagtttaaccacgttaatggactgaaccttattgcccgggctcaccaactggttatggaggggttcaagtaccattttcctgaaaaggacgttgtaaccgtgtggtccgcgccaaattactgttatagatgtggtaatgtcgcgagtgtaatgaaggtcgatgaggatctggaacctactttcaaaattttctcggctgttcccgatgactacataagagaatccacggcaaaccataataatcaaagagccggctatttcttataa

SEQ ID NO: 89650 - protein, 311 aa, Saccharomyces cerevisiae
MVSRGPDEWLETIKKCQALTENEMKQLCEMVKELLMEESNIQPVQTPVTVCGDIHGQFHDLLELFRTAGGFPDDINYIFLGDYVDRGYYSLETFTLLMCLKVKYPAKITLVRGNHESRQITQVYGFYEECLNKYGSTTVWKYCCQVFDFLTLAAIIDGKILCVHGGLSPEIRMLDQIRVLSRAQEVPHEGGFSDLLWSDPDNVEAWQVSPRGAGWLFGSKVAREFNHVNGLNLIARAHQLVMEGFKYHFPEKDVVTVWSAPNYCYRCGNVASVMKVDEDLEPTFKIFSAVPDDYIRESTANHNNQRAGYFL

SEQ ID NO: 89651 - DNA, 993 bp, Drosophila melanogaster
  CDS (1)..(993)
atgggcgacttcgatctgaatgtggacagcttgatacagcggctgctggagatgcgcagctgccgaacgggcaaacaggtccagatgacggaggcggaggtgcgtggcctctgtctcaagtcgcgcgagatcttcttgcaacagcccatcctgctggaactggaggcaccgctgatcatctgcggcgacatccacggccagtacacagacctgttgcgcctgttcgagtacggcggattccctccggctgccaactacttgttcctcggcgactacgtcgatcggggcaagcagtccctggagaccatctgtctgctgctggcctacaagattaaatatccggagaacttcttcttgttgcgcggcaaccacgagtgcgccagtattaataggatttacggcttctacgatgagtgcaagcgccgatacaatgtcaaactgtggaagactttcacagattgcttcaactgtctgccggtagccgccattattgacgaaaagatcttctgctgccacggcggcctcagtcccgatcttcagggcatggagcagatccgtcgcctaatgcgacccacagatgtgccggataccgggttactgtgcgatcttctgtggagtgatcccgacaaggatgttcagggttggggcgagaatgatcgcggtgtgagcttcaccttcggtgtggatgtggtctccaagtttttgaaccgccacgagctggacttgatctgccgtgcacatcaggttgtggaggatggctatgagttctttgcgcgtcggcaactggtcacgttgttctcggcgcccaattactgtggagagttcgacaatgccggcggaatgatgaccgtggacgacacgctgatgtgctcattccagatcctgaaaccatccgagaagaaggccaagtatctgtacagcggaatgaactcgtcgcgacccacaacaccgcagcgcagcgccccaatgcttgcgaccaacaagaagaaataa

SEQ ID NO: 89652 - protein, 330 aa, Drosophila melanogaster
MGDFDLNVDSLIQRLLEMRSCRTGKQVQMTEAEVRGLCLKSREIFLQQPILLELEAPLIICGDIHGQYTDLLRLFEYGGFPPAANYLFLGDYVDRGKQSLETICLLLAYKIKYPENFFLLRGNHECASINRIYGFYDECKRRYNVKLWKTFTDCFNCLPVAAIIDEKIFCCHGGLSPDLQGMEQIRRLMRPTDVPDTGLLCDLLWSDPDKDVQGWGENDRGVSFTFGVDVVSKFLNRHELDLICRAHQVVEDGYEFFARRQLVTLFSAPNYCGEFDNAGGMMTVDDTLMCSFQILKPSEKKAKYLYSGMNSSRPTTPQRSAPMLATNKKK

SEQ ID NO: 89653 - DNA, 1092 bp, Arabidopsis thaliana
  CDS (1)..(921)
atgccgtcgaacggagatctggaccgtcagatcgagcagctgatggagtgtaaaccgttatcggaggcggatgtgaggacgctttgcgatcaagcgagagcgatccttgtcgaggaatataatgttcagccggtgaagtgtcctgttaccgtttgcggcgatattcacggccagttttatgaccttattgagctctttcgtatcggtggcaacgctcctgatactaactacctcttcatgggagactatgtagatcgtggctactattcagtagagacagtttctctattggtggcactaaaagtgcgatacagggatagacttacaatcttacgagggaatcacgagagtcggcagattactcaagtctatggtttttatgacgaatgcttgaggaagtacggaaatgctaacgtctggaagtattttacagaccttttcgattatcttcctcttaccgccctcatagagagtcaggttttctgtttgcatggagggctttcaccttctctggatactcttgataatatccgaagcttggatcggatacaggaggttccacacgaaggacctatgtgtgatttattatggtctgatcctgatgatcgatgtggatggggaatatctccacgaggtgctggttatacatttggacaggatatcgcagctcaatttaatcacaacaatggactaagtctcatatcaagagcgcatcaacttgtcatggaaggttttaactggtgtcaggataagaatgtggtgactgtgtttagtgcaccaaactattgctaccggtgtggaaacatggctgccattctagagataggagagaacatggagcaaaacttcctccagttcgatccagctcctcgacaagttgaacctgatactactcggaagacccctgattattttttgtgatttctctgtttttttttgtggtcccgaccatatataattttttgaagttccagttttattgcctatgtatcattgtagatgtgcccttttctcttcttttttctaagtggagttcgaatttcccctagaaaaaaagaaacacatcatttttttctgttgttgaggtgattg

SEQ ID NO: 89654 - protein, 306 aa, Arabidopsis thaliana
MPSNGDLDRQIEQLMECKPLSEADVRTLCDQARAILVEEYNVQPVKCPVTVCGDIHGQFYDLIELFRIGGNAPDTNYLFMGDYVDRGYYSVETVSLLVALKVRYRDRLTILRGNHESRQITQVYGFYDECLRKYGNANVWKYFTDLFDYLPLTALIESQVFCLHGGLSPSLDTLDNIRSLDRIQEVPHEGPMCDLLWSDPDDRCGWGISPRGAGYTFGQDIAAQFNHNNGLSLISRAHQLVMEGFNWCQDKNVVTVFSAPNYCYRCGNMAAILEIGENMEQNFLQFDPAPRQVEPDTTRKTPDYFL

SEQ ID NO: 89655 - DNA, 930 bp, Schizosaccharomyces pombe
  CDS (1)..(930)
atgtctgtctctggaaaaattggagaggtcgatcgttggattgaacagttgagtcgatgcgaacctctttcagaggaagatgtcattcaaatgtgtgatctcgcaaaagaggtactttctgtagaatcaaacgttcaaagcgtccgatgccctgtaacggtttgtggtgatattcatggacaattccatgacttaatggagttgttcaatattggcggcccttcacctgatacaaattatttgtttatgggagattatgttgacagaggatatcacagtgtagaaacagtttctctactgattgcttttaaaattcgatatccccagcgtataacaatattacgtggaaaccatgaatctaggcaaattacacaagtttatggattttatgatgaatgccttagaaagtatggaaatgcgaatgtttggcagtactttacagatctttttgactatttgcctctcaccgccctaattgaagatcgaattttttgccttcacggaggtctttctcctagtattgatacacttgaccatgttcgtatattagatcgtgtgcaagaggttcctcatgaaggtccgatatgcgacttgttatggtcagatcctgatgaccgacctggttggggtatttctcctcgaggtgctgggtatacgtttggcccggatattgctgaagcatttaaccataataacggtttagatttaatagcaagagctcatcagctagttatggaaggttataattggactacaaaccataatgttgttactattttttctgctcccaattattgttatcgatgtggaaaccaagcagccattatgggaattgatgaccacataaattacgcatttatccaatatgatactgctccccgaaaggaggaattacatgtcaccagaagaacacccgattacttcttataa

SEQ ID NO: 89656 - protein, 309 aa, Schizosaccharomyces pombe
MSVSGKIGEVDRWIEQLSRCEPLSEEDVIQMCDLAKEVLSVESNVQSVRCPVTVCGDIHGQFHDLMELFNIGGPSPDTNYLFMGDYVDRGYHSVETVSLLIAFKIRYPQRITILRGNHESRQITQVYGFYDECLRKYGNANVWQYFTDLFDYLPLTALIEDRIFCLHGGLSPSIDTLDHVRILDRVQEVPHEGPICDLLWSDPDDRPGWGISPRGAGYTFGPDIAEAFNHNNGLDLIARAHQLVMEGYNWTTNHNVVTIFSAPNYCYRCGNQAAIMGIDDHINYAFIQYDTAPRKEELHVTRRTPDYFL

SEQ ID NO: 89657 - DNA, 1110 bp, Saccharomyces cerevisiae
  CDS (1)..(1110)
atggatacagatttagatgtgcctatgcaagatgctgttaccgaacagctgactcccacagtatctgaagatatggatctcaacaacaattcatcggataataatgcagaagaattctcggttgatgatttaaaacctggttcctcgggcatagcagatcacaaatcttccaaaccactagaactgaataacacaaatataaatcagcttgaccaatggattgagcatttgagtaaatgcgagccactatcagaagacgatgtagcacgactatgtaaaatggcggtggacgtgttgcagttcgaggagaatgttaaaccaattaacgtgcctgttaccatttgtggtgacgtacacggtcaattccatgacttgttagaactttttaagattggtggcccttgtcctgacaccaattaccttttcatgggtgattacgtggatagaggatattattctgttgaaactgtatcttacctagttgccatgaaagtcagatacccacatagaattacgatactgagaggcaatcacgagtctaggcagattacccaagtatacgggttttatgatgaatgtttgagaaagtacggcagtgcaaacgtgtggaaaatgttcacagatcttttcgattattttcctataaccgcattagtagataataaaattttctgtctgcatggaggactttcccccatgatagaaaccatagatcaggtgagagagttgaacagaatacaggaagtgcctcatgaaggtcctatgtgtgaccttctatggtcagaccctgacgatagaggcggatggggaatcagtcccagaggtgcaggcttcacttttggacaagatgtcagtgagcaattcaatcacactaatgatctatcactaatagcaagagctcaccaattggtaatggaaggctatgcttggtctcaccagcaaaatgttgtcaccattttcagtgctcctaattactgctacagatgtggtaatcaagcagctatcatggaagtggacgagaatcataatagacaattcttacagtacgacccatccgtaagaccaggtgaacctagcgtcagcagaaagacgccagattactttttatga

SEQ ID NO: 89658 - protein, 369 aa, Saccharomyces cerevisiae
MDTDLDVPMQDAVTEQLTPTVSEDMDLNNNSSDNNAEEFSVDDLKPGSSGIADHKSSKPLELNNTNINQLDQWIEHLSKCEPLSEDDVARLCKMAVDVLQFEENVKPINVPVTICGDVHGQFHDLLELFKIGGPCPDTNYLFMGDYVDRGYYSVETVSYLVAMKVRYPHRITILRGNHESRQITQVYGFYDECLRKYGSANVWKMFTDLFDYFPITALVDNKIFCLHGGLSPMIETIDQVRELNRIQEVPHEGPMCDLLWSDPDDRGGWGISPRGAGFTFGQDVSEQFNHTNDLSLIARAHQLVMEGYAWSHQQNVVTIFSAPNYCYRCGNQAAIMEVDENHNRQFLQYDPSVRPGEPSVSRKTPDYFL

SEQ ID NO: 89659 - DNA, 1522 bp, Oryza sativa
  CDS (114)..(1037)
gctttttgcccccctcctctcctccgcctcctccacacacgagcgcgtcccccgacgccgcgccgagatctagggttgggcgcgcgcgacgccccccccccgcggcgaggaggatgagcagcccccatggcggcctcgacgaccagatcgagcgcctcatgcagtgcaagcccctccccgagcccgaggtcagagcactttgcgagaaggcaaaagagatattgatggaggagagcaacgttcaacctgtaaagagtcctgttacaatatgtggtgatattcatgggcagtttcatgaccttgcagaactgttccgaatcggtggaaagtgcccagatacaaactacttgtttatgggagattacgtggatcgtggttattattctgttgaaactgtcacgcttttggtggctttaaaggttcgttatcctcagcgaattactattctcagaggaaaccacgaaagtcgacagatcactcaagtttatggattctatgacgagtgcttaaggaagtacgggaatgcaaatgtgtggaaaacttttacagatctcttcgattacttccccttgacagcattggttgagtcagaaatattttgcctgcatggtggattatcgccatccattgagacacttgataacatacgtaacttcgatcgtgtccaagaagttccccatgaagggcccatgtgtgatcttctgtggtctgatccagacgatcgatgtggttggggtatttctcctcgaggtgctggatacaccttcgggcaggatatatcagagcagttcaaccataccaataatttaagacttattgctagagctcaccagttggtcatggagggattcaattgggctcatgagcaaaaagttgttaccatatttagtgcacctaattattgctatcgctgtgggaacatggcatcaatcttggaagttgatgattgcagggagcatacattcatccagtttgagccagccccaagaaggggagagccagatgtaactcgtagaacacctgactatttcctgtgatgtaaaagtggtggactgtctctgcagcaaatgtttgatagctaggtgaagttccctggttgcagatatttttttcccctcgaatctcctgtgtgttattcttactacctttgcccgtggcgcttggctatcgcgagctgctttgctgcatcatgattcaagtgtatacctacagctgggaggattcatcgtgttctcacttatctctaattggctgatgcttggcttgggggctgcagtggtgactcgaagcatcaagtagcaaatttgtattatgaaaggaaaactattctctttgtattcattttgttcgcctttcttccccacaaatttcacctaattttcttttttcttttttcatgatccttgtagagatgaacaatgtagttgtatggctccctgttgagccggtaggtctttctgagtacatcttgatttgccgtacataattgcttgaaaaacaagtattagaattctttgtgacc

SEQ ID NO: 89660 - protein, 307 aa, Oryza sativa
MSSPHGGLDDQIERLMQCKPLPEPEVRALCEKAKEILMEESNVQPVKSPVTICGDIHGQFHDLAELFRIGGKCPDTNYLFMGDYVDRGYYSVETVTLLVALKVRYPQRITILRGNHESRQITQVYGFYDECLRKYGNANVWKTFTDLFDYFPLTALVESEIFCLHGGLSPSIETLDNIRNFDRVQEVPHEGPMCDLLWSDPDDRCGWGISPRGAGYTFGQDISEQFNHTNNLRLIARAHQLVMEGFNWAHEQKVVTIFSAPNYCYRCGNMASILEVDDCREHTFIQFEPAPRRGEPDVTRRTPDYFL

SEQ ID NO: 89661 - DNA, 969 bp, Schizosaccharomyces pombe
  CDS (1)..(969)
atgtctatagatccagcaaatgatagtaagcttgctccggaggcgaatgacgctactctaggagacgttgacagatggatcgaacagttgaaaaaatgcgagcctctgagcgaagctgacgttgaaatgttatgcgataaggctcgtgaggttttatgtcaggaaaataatgtccaacctgtccgaaatccagttactgtttgcggtgatattcatggacagtttcatgatctgatggaattatttaaaattggaggtgatgtgcctgatatgaactatctttttatgggtgactatgttgacagaggttatcacagcgtcgaaactgtaagtttgcttgttgcaatgaagttacgctaccctaaccgaattacgattcttcgaggaaatcatgaatctagacaaatcactcaagtttacggattttatgatgaatgtttgcgtaaatatggatccgctaatgtttggaaacatttcacaaatttatttgactatttccctttaactgctttaattgaagaccgtattttctgcctacatggaggtctttccccgagcattgattcattagaccatgtacggactttggatcgtgtacaagaagttccccatgaaggtccgatgtgtgatttgctttggtcagaccctgatgatagatgtggttggggaatttctcctcgtggtgccggatacaccttcggacaagacatttctgagacatttaatcacgcaaatggattaagtttaacggcacgagcccatcagctagttatggaaggatttaattgggcacatgatggagacgtagttacaattttttctgccccaaattattgttatcgctgtggtaatcaagcagctattttggaagttgatgatacgatgaatcaagtctttttacaattcgatcctgccccacgagaaggcgaaccggtaatagctcgaaggacaccagactacttcctttaa

SEQ ID NO: 89662 - protein, 322 aa, Schizosaccharomyces pombe
MSIDPANDSKLAPEANDATLGDVDRWIEQLKKCEPLSEADVEMLCDKAREVLCQENNVQPVRNPVTVCGDIHGQFHDLMELFKIGGDVPDMNYLFMGDYVDRGYHSVETVSLLVAMKLRYPNRITILRGNHESRQITQVYGFYDECLRKYGSANVWKHFTNLFDYFPLTALIEDRIFCLHGGLSPSIDSLDHVRTLDRVQEVPHEGPMCDLLWSDPDDRCGWGISPRGAGYTFGQDISETFNHANGLSLTARAHQLVMEGFNWAHDGDVVTIFSAPNYCYRCGNQAAILEVDDTMNQVFLQFDPAPREGEPVIARRTPDYFL

SEQ ID NO: 89663 - DNA, 942 bp, Arabidopsis thaliana
  CDS (1)..(942)
atgggcgcgaattctattccgacggacgcaaccattgatcttgatgagcagatctcgcagctcatgcagtgcaagcctctctcggagcaacaggttagagcattatgcgagaaagccaaggagatcttaatggatgaaagcaatgttcagcctgtgaaaagccctgtgacaatctgcggtgatattcatggacagttccatgatcttgcagagcttttccgtatagggggaatgtgccctgataccaattacctgtttatgggagactatgtggaccgtggttattattctgttgaaactgttacgctgttagtcgccttaaagatgcgatatcctcagcgaatcactattcttagaggaaaccatgaaagtcgtcagattactcaggtttatggattttatgatgaatgtctacgaaagtacggcaacgcaaatgtttggaaaatctttacagacctcttcgactattttcctctgacagccttggttgagtcagaaatattttgccttcatggtggattatctccatctatcgagacccttgacaacataaggaattttgatcgagttcaagaagtgccccatgaagggccgatgtgtgacttattatggtctgaccccgatgaccgatgtggttggggcatctctcctcggggtgccggatatacatttggtcaggatatatctgaacaattcaatcacacaaacaacttaaagctgatcgcccgagctcaccagttggttatggatggatacaactgggctcacgagcaaaaagtggttactattttcagtgcaccaaactattgttaccgttgtgggaacatggcctcgattcttgaggtcgacgactgcaggaaccacaccttcatccagtttgaaccagcaccgaggagaggagaaccagacgtcacccgaaggactccagactatttcctgtga

SEQ ID NO: 89664 - protein, 313 aa, Arabidopsis thaliana
MGANSIPTDATIDLDEQISQLMQCKPLSEQQVRALCEKAKEILMDESNVQPVKSPVTICGDIHGQFHDLAELFRIGGMCPDTNYLFMGDYVDRGYYSVETVTLLVALKMRYPQRITILRGNHESRQITQVYGFYDECLRKYGNANVWKIFTDLFDYFPLTALVESEIFCLHGGLSPSIETLDNIRNFDRVQEVPHEGPMCDLLWSDPDDRCGWGISPRGAGYTFGQDISEQFNHTNNLKLIARAHQLVMDGYNWAHEQKVVTIFSAPNYCYRCGNMASILEVDDCRNHTFIQFEPAPRRGEPDVTRRTPDYFL

SEQ ID NO: 89665 - DNA, 1296 bp, Oryza sativa
  CDS (172)..(1095)
aggcttgagctccacctccacctcctccacctccaacccccgatcccccgcaaaccctagccctctcccccaccctcctcgccggcggcgagcggcggcggcgcgcggcgggacccggagcccccagtagcgcctcctccgtcctcccctccctgaggtgcgggggagaggatgccgtcgtcgcacggggatctggaccggcagatcgcgcagctgcgggagtgcaagcacctggcggaaggggaggtgagggcgctgtgcgagcaggcgaaggccatcctcatggaggagtggaacgtgcagccggtgcggtgccccgtcacggtctgcggcgacatccacggccagttctacgacctcatcgagctcttccgcatcggcggcgaggcgcccgacaccaactacctcttcatgggcgactacgtcgaccgtggctactactcagtggagactgtttcgttgttggtggctttgaaagtacgctacagagatcgaattacaatattgagaggaaatcatgagagcagacaaatcactcaagtgtacggcttctacgatgaatgcttgagaaagtatggaaatgcaaatgtatggaaatactttacagacttgtttgattatttgcctctcacagctcttatagaaaaccaggtgttctgccttcacggtggtctctctccatcattggatactttagataacatccgtgctcttgatcgtatacaagaggttcctcatgaaggacccatgtgtgatcttttgtggtctgacccagatgacagatgcgggtggggaatttcaccgagaggagcaggttatacatttgggcaagatatcgctcaacagtttaaccatacaaatggtctatctctcatctcaagggcacatcaacttgtaatggaaggatttaattggtgtcaggacaagaatgttgtgacggtcttcagtgcaccaaactactgttatcgctgtggtaacatggctgcaattcttgagattggtgaaaacatggatcagaacttcctccaatttgatccagctcctcggcaaattgaaccagacacaacacgcaagactcccgactactttttgtaatttgtggtgttgacaattttaactcacctgtgttgatgctcctctcctccgcggtgtcggggtctgtagatcttctgtccttagatacgggttccacgagcccggctgtatgtctctcaattcttttgtttggagattttgttgctgcttctcaacctttatacaagacgttaaaagttacatgcactggatttttttctc

SEQ ID NO: 89666 - protein, 307 aa, Oryza sativa
MPSSHGDLDRQIAQLRECKHLAEGEVRALCEQAKAILMEEWNVQPVRCPVTVCGDIHGQFYDLIELFRIGGEAPDTNYLFMGDYVDRGYYSVETVSLLVALKVRYRDRITILRGNHESRQITQVYGFYDECLRKYGNANVWKYFTDLFDYLPLTALIENQVFCLHGGLSPSLDTLDNIRALDRIQEVPHEGPMCDLLWSDPDDRCGWGISPRGAGYTFGQDIAQQFNHTNGLSLISRAHQLVMEGFNWCQDKNVVTVFSAPNYCYRCGNMAAILEIGENMDQNFLQFDPAPRQIEPDTTRKTPDYFL

SEQ ID NO: 89667 - DNA, 942 bp, Arabidopsis thaliana
  CDS (1)..(942)
atgggcgcgaattcgcttccaacggatgcaaccctcgatctagatgagcagatctcgcagctcatgcagtgcaagcctctctccgagcaacaggtcagagcattatgtgagaaagctaaggagatcttaatggatgaaagcaacgttcagcctgttaaaagccctgtgacaatctgcggtgatattcatggacagttccatgatcttgcagagcttttccgtattgggggaaagtgtcctgataccaactatctgtttatgggagactatgtcgaccgtggatattattctgtggaaactgttacgctgttggttggcttgaaagtacggtatccacagcgaatcactattcttagaggaaaccatgaaagtcgtcagattactcaggtttatggattttatgatgaatgtctgcgaaagtatggcaatgcaaatgtttggaagatatttacagacctctttgactatttcccactgacagccttggtggagtcggaaatattctgccttcacggtggattatcaccatccatcgagacccttgacaacattaggaactttgatcgggttcaagaagttccacatgaagggcctatgtgtgacttattatggtctgatcctgatgacagatgtggctggggaatctctcctcgtggtgctggatatacatttggtcaggatatttcggaacaattcaatcacactaacaacttaaagctgatcgcccgagcgcatcagctcgttatggatggattcaattgggcacacgagcaaaaagtggttactatattcagtgcaccaaactattgctatcgctgtggaaacatggcctcaattcttgaggtcgatgactgcaggaaccacacgttcattcagtttgaaccagcaccgaggagaggagagccagatgtaacccgaaggacacctgactatttcctttga

SEQ ID NO: 89668 - protein, 313 aa, Arabidopsis thaliana
MGANSLPTDATLDLDEQISQLMQCKPLSEQQVRALCEKAKEILMDESNVQPVKSPVTICGDIHGQFHDLAELFRIGGKCPDTNYLFMGDYVDRGYYSVETVTLLVGLKVRYPQRITILRGNHESRQITQVYGFYDECLRKYGNANVWKIFTDLFDYFPLTALVESEIFCLHGGLSPSIETLDNIRNFDRVQEVPHEGPMCDLLWSDPDDRCGWGISPRGAGYTFGQDISEQFNHTNNLKLIARAHQLVMDGFNWAHEQKVVTIFSAPNYCYRCGNMASILEVDDCRNHTFIQFEPAPRRGEPDVTRRTPDYFL

SEQ ID NO: 89669 - DNA, 1225 bp, Oryza sativa
  CDS (120)..(1064)
aatctctctcctctctctctctctccagctcgcctccccctcgccggcgacgagctctcccccggctagggttagaccaggtgcccctcttgtctgcggcggaggaggtgggaggaaggatggaggagtccgtgggctcgcgcggcggcggcggcggcggcctggacgcccagatcgagcagctcatggagtgccgcccgctctccgagcccgaggtcaagacgttgtgcgagaaggcgaaggagatattgatggaagaaagcaacgttcagccagttaagagcccagtcacaatttgtggtgatatccatgggcaattccatgatctagtagagctctttcggattggtgggaagtgtccagatacaaattatttgtttatgggagattatgtagatcgtggctactattctgttgagactgttacacttttggttgcactgaaggtgcgctacccacagcggattacaatccttcgtggaaaccatgagagtcggcagatcacacaggtgtatggattctacgacgaatgcctacgaaagtatggaagtgcaaatgtctggaagatcttcaccgatctttttgactattttccattgacagcattggttgaatcagagattttctgcctccatggtggtttatcgccatcaatcgacaatcttgatagtgttcgcagcttagatcgtgttcaagaggtccctcatgagggaccaatgtgtgatcttctatggtctgacccggatgatcgatgcggttggggcatatctcctcgtggtgctggctacacttttggccaggacatatcggagcagtttaaccataccaataatctcaaacttgtagcccgggctcatcaattagttatggaaggatataactgggcgcacgaacaaaaggtcgtgaccatattcagtgcacctaattattgttatcgctgtggcaacatggcatccatcctggaggttgatgactgcaggaatcacacatttattcagtttgaaccagctcctaggagaggtgaaccagatgtgacacggagaacacctgattatttcctttaaattatctgttgtaatttgtattgttttgtttcttttgtttctctaagaccgcaatagtgagtgctggtcagtaaaattttgttggatccctttggtaactaaactggccagcgatagcatgagaatgccgatgcccaaaaaaaatgtgaaacttatgcccc

SEQ ID NO: 89670 - protein, 314 aa, Oryza sativa
MEESVGSRGGGGGGLDAQIEQLMECRPLSEPEVKTLCEKAKEILMEESNVQPVKSPVTICGDIHGQFHDLVELFRIGGKCPDTNYLFMGDYVDRGYYSVETVTLLVALKVRYPQRITILRGNHESRQITQVYGFYDECLRKYGSANVWKIFTDLFDYFPLTALVESEIFCLHGGLSPSIDNLDSVRSLDRVQEVPHEGPMCDLLWSDPDDRCGWGISPRGAGYTFGQDISEQFNHTNNLKLVARAHQLVMEGYNWAHEQKVVTIFSAPNYCYRCGNMASILEVDDCRNHTFIQFEPAPRRGEPDVTRRTPDYFL

SEQ ID NO: 89671 - DNA, 1480 bp, Nicotiana tabacum
  CDS (116)..(1060)
aagaaaactaaagggcttttgtgggttgtggaaaaaatattcacaaaatttattcaagaaatatattggaaaaaaggttcttaattcttgtagttgaaattttgagttgtagaaaatgagttcttcggatctggtagcagcgagcatacagggtaatctggatgagcagatttctcagttaatgcagtgcaagcctctctctgagcctgatgttagagcattatgcgagaaggccaaagagatactagcggaagaaagtaatgttcagccagtaaaaagccctgtgactatatgtggtgatatccacggacaattccatgatctcgccgagctttttaggattggtggacagtgtccagatacaaattatctgtttatgggtgattacgtcgaccgtggatattattcagtcgaaactgttaccctattggtagctttgaaagtacgttatcctcagcgattaacaatcctcagaggaaatcatgaaagccgacagatcacacaagtctatgggttctatgatgagtgcttgcggaagtacggcaatgctaatgtctggaaaacatttactgatctatttgattatttccctttgacagcattggttgaatccgaaattttttgtttgcatggaggattatctccatctattgaaacccttgataatgtaagaagttttgaccgtgtccaagaagttccccatgaaggggccatgtgtgatcttttgtggtcagacccagatgattgttgtggctgggggatgtcaccccgcggtgctggatacacttttgggcaggacatctccgagcaatttcaccaaaccaacaatctaaagctgatagctcgagctcatcagctggtcatggagggatataactggagccatgaacaaaaggttgtcactatttttagtgcaccaaattattgttatcgatgtggaaacatggcctctattttggaggttgacgactgcagagggcacacgtttatccagtttgatccagctccaagaaggggagaaccggatgtaacacgaagaacccctgattacttcttataaaaatggtcaactatttctgttgtctcccaatagcttgttttgctatattttccatctgctgtcgagatatgagcataattatggcaaagctagctactcttgggaggtaatccatggaccaagaagcttgtaaaaccctagaccaggtccccttggtttaagtcatattctaacctatgttaggaattattagagtgggaaagtgcagcaagctgtattgtatcatttcatggagacttcttttcggttgttccattcatgttctgagtcttcagtcttagtgtgatatttctctcaaagttttcatatgttgttgcaaggaagtatgttgtgtaaagttaaaaatccactttacagtgtaacttttaccttgttaatgcagccgatccttgtgaaaaaaaaaaaaaaaaaaaaaaaaaa

SEQ ID NO: 89672 - protein, 314 aa, Nicotiana tabacum
MSSSDLVAASIQGNLDEQISQLMQCKPLSEPDVRALCEKAKEILAEESNVQPVKSPVTICGDIHGQFHDLAELFRIGGQCPDTNYLFMGDYVDRGYYSVETVTLLVALKVRYPQRLTILRGNHESRQITQVYGFYDECLRKYGNANVWKTFTDLFDYFPLTALVESEIFCLHGGLSPSIETLDNVRSFDRVQEVPHEGAMCDLLWSDPDDCCGWGMSPRGAGYTFGQDISEQFHQTNNLKLIARAHQLVMEGYNWSHEQKVVTIFSAPNYCYRCGNMASILEVDDCRGHTFIQFDPAPRRGEPDVTRRTPDYFL

SEQ ID NO: 89673 - DNA, 930 bp, Drosophila melanogaster
  CDS (1)..(930)
atggaggataaagcaacaacaaaagatcttgatcaatggattgagcagttgaacgaatgcaatcagttgacagagacacaagttcgcaccctctgcgacaaggccaaggagattctctccaaggagtccaatgtgcaggaggtaaaatgcccggtgacagtgtgcggagatgtccacggtcagtttcacgacctcatggagctcttccggataggcggcaagtctccggacaccaactacctgttcatgggcgactacgtggaccgtggatactactccgtggagaccgtgacccttctggtggccctgaaggttcgctatcgcgagcgcatcaccatcctgcgcggtaaccacgagtcgcgccagatcacacaggtgtacggcttctacgacgagtgcctgcgcaagtatggcaatgccaacgtttggaagtacttcacggatctgttcgactacttgccactgacggcactcgtcgacgggcagatcttctgcctgcacggaggcctcagtccctcgatcgacagtctggatcacattcgggccctcgatcgcttgcaggaggttccgcacgagggtcccatgtgcgatctgctctggtccgatcccgatgacaggggtggctggggaatctcgcctcgtggcgccggttacacctttggccaggatatttcggaaacctttaacaacacaaacggcctgacactggtgtcgcgcgcccatcagctggtgatggagggctacaactggtgtcacgatcgcaatgtggtcacaatattctcagcgccaaactattgctaccgctgtggcaaccaagcggctcttatggaactggatgattcacttaaattttcattcctacaatttgatccagcacccaggcgcggggagcctcatgttacgcgaagaacacccgattatttcctttaa

SEQ ID NO: 89674 - protein, 309 aa, Drosophila melanogaster
MEDKATTKDLDQWIEQLNECNQLTETQVRTLCDKAKEILSKESNVQEVKCPVTVCGDVHGQFHDLMELFRIGGKSPDTNYLFMGDYVDRGYYSVETVTLLVALKVRYRERITILRGNHESRQITQVYGFYDECLRKYGNANVWKYFTDLFDYLPLTALVDGQIFCLHGGLSPSIDSLDHIRALDRLQEVPHEGPMCDLLWSDPDDRGGWGISPRGAGYTFGQDISETFNNTNGLTLVSRAHQLVMEGYNWCHDRNVVTIFSAPNYCYRCGNQAALMELDDSLKFSFLQFDPAPRRGEPHVTRRTPDYFL

SEQ ID NO: 89675 - DNA, 1211 bp, Helianthus annuus
  CDS (142)..(1059)
gaattcggcacgagctttaaccgccggctgccatgacggaaccctaagcaacttctccggcgactccggcggagctccgttcaacctaaatgcgaatcattcttccagatcttcaaatccgaacacacaaatcacgtaacaatgccgtcgcaatcggatctggaccgtcagatcgagcacttgatggactgtaaaccgctgccggaggaggtgcggacgttgtgtgatcaggcgaggacgattttggtcgaggagtggaatgtgcagccggtgaagtgtccggtgactgtttgcggtgatattcatgggcagtttcatgatttgcttgagctgtttcggatcggaggaagtgctccggacacgaattacttgtttatgggagattatgttgatcgaggctattactcggtggagactgttacgcttcttgtggcattgaaagttcgttacagagataggattactattctcagaggaaaccatgagagcaggcagataactcaagtgtatggatttttcgatgaatgcttgaggaagtacggaaacgcaaatgtatggaaacatttcactgacctttttgattatctacctctcactgcccttatcgagagtcagatattctgtctccatggtggcttgtctccatctttggatacactagataacatacgtgctttagatcgcatacaagaggttcctcatgaagggccaatgtgtgaccttttgtggtctgatcctgatgaccggtgtggttggggaatatctcctcgtggagccggttacactttcgggcaggatatagccgcacagtttaaccatacaaacgggctctcgcttatttctcgggctcaccagcttgtcatggaaggttacaattggtctcaggagaacaacgttgtaaccatatttagtgcaccaaactactgctatagatgcgggaatatggctgcgatacttgaggttggagagaatatggaccagaatttcttacaatttgacccagcccctcgtcaggttgagcccgatgttgcacgaagaactccggattacttcctgtaaatttgtgttggataatatgacctttgcatgcatcctatttatgttgttatagttttcgctttcccctgctagagagtccccctattcttgagaattaaagacaatatgtatgattgtttgtcccttgttctatttgagattatttgtttaac

SEQ ID NO: 89676 - protein, 305 aa, Helianthus annuus
MPSQSDLDRQIEHLMDCKPLPEEVRTLCDQARTILVEEWNVQPVKCPVTVCGDIHGQFHDLLELFRIGGSAPDTNYLFMGDYVDRGYYSVETVTLLVALKVRYRDRITILRGNHESRQITQVYGFFDECLRKYGNANVWKHFTDLFDYLPLTALIESQIFCLHGGLSPSLDTLDNIRALDRIQEVPHEGPMCDLLWSDPDDRCGWGISPRGAGYTFGQDIAAQFNHTNGLSLISRAHQLVMEGYNWSQENNVVTIFSAPNYCYRCGNMAAILEVGENMDQNFLQFDPAPRQVEPDVARRTPDYFL

SEQ ID NO: 89677 - DNA, 1370 bp, Hevea brasiliensis
  CDS (154)..(1074)
atgatagagagatccacaaaaacgattcgttttgggaacaaaaccggtgccacagatcgttagtcgtggaatcttttacgagtataatctgattcgattccgattgagaatattgttgttgaccgtacgaacgatctttgtggaccggagaggatgccgtctcacggggatctggaccgtcagatcgaacacctcatggagtgcaagccgttgccggaggcccgaggtcaaactctctgtgatcaagccagggcgattctcgtcgaggagtggaacgtgcagccagtgaaatgtccggtcaccgtttgcggtgatattcacgggcagttctacgatctcatcgagctctttaggataggagggaatgcgcctgataccaattatctcttcatgggcgactatgtagatcgtgggtactattcagtggagactgtcacactcttagtggccctgaaagttcgttacagagatagaattacaattcttaggggaaatcatgaaagcaggcagatcactcaagtgtatggtttctatgatgagtgcttgagaaaatatggaaatgccaatgtgtggaagtatttcacagatcttttcgattatctacctcttacagcccttattgagagtcagatcttctgtttgcacggtggactttcaccatctttggatacattagataatatccgagctttggaccgtatacaagaggttccacatgaaggacctatgtgtgatctcttgtggtctgacccagatgatcgatgtggttggggaatatctcctcgtggtgctggctatacatttggacaggatatagctgctcaattcaaccataccaatgggctcactctgatttcacgagcgcaccagctcgtcatggaaggatacaactggtgtcaggaaaagaatgtggttactgtatttagtgcaccaaactattgctaccggtgtggaattatggctgcaattctcgagattggggagaacatggcccagaacttccttcaatttgatcctgcacctcggcaaattgaacctgacaccacgcgcaagacccctgattattttttataattttcatatttctgccttctgtttgtaaaccttgtttgctgctgtatcactgtagatgtgtcttaaaaaagaggattttttgttctttaaggtgggattgatccacatcattattctttgtttggagtttgtcctgctgctgctgctttattaatgtgctcaagtaaacccataggaaagttgacagaaggcaccaaaggccttatttcttgtatattttcagaaggaagcagcaataacatgatatatcgtgttctgtaaaaaaaaaaaaaaaaaaaaaaaaaaaaaaaaaaaaa

SEQ ID NO: 89678 - protein, 306 aa, Hevea brasiliensis
MPSHGDLDRQIEHLMECKPLPEARGQTLCDQARAILVEEWNVQPVKCPVTVCGDIHGQFYDLIELFRIGGNAPDTNYLFMGDYVDRGYYSVETVTLLVALKVRYRDRITILRGNHESRQITQVYGFYDECLRKYGNANVWKYFTDLFDYLPLTALIESQIFCLHGGLSPSLDTLDNIRALDRIQEVPHEGPMCDLLWSDPDDRCGWGISPRGAGYTFGQDIAAQFNHTNGLTLISRAHQLVMEGYNWCQEKNVVTVFSAPNYCYRCGIMAAILEIGENMAQNFLQFDPAPRQIEPDTTRKTPDYFL

SEQ ID NO: 89679 - DNA, 1299 bp, Medicago sativa
  CDS (71)..(1012)
ttcttctcctagctagctagggttcctttgatttgaatatttttcttcagattcattcattcacaatacaatgggtgcgaattcaatgatagccgatgtcactcacgatctcaacgagcagatctctcagctcatgcagtgcaaaccactttccgaacaacaggttaaagaattatgtgagaaggctaaggagattttaatggatgaaagtaatgtccagcctgtgaaaagtcctgtgacaatctgtggcgatattcatggccagtttcatgatcttgctgaattatttcgaattggagggaagtgtccagatacaaactacttgtttatgggtgattacgtggaccgaggttattattcagttgagactgtaacactcctcgtggcactgaaagtgagatatcctcagcgaattactattcttagaggaaaccatgaaagccgtcagattactcaagtatatgggttttacgacgaatgcctaagaaaatatgggagtgctaatgtctggaaaatctttacagacctctttgattttttcccattgactgcattggttgaatcagaaatattttgtttgcatggtggactgtcaccttcaattgagacccttgataacataaggaactttgatcgtgttcaagaggttcctcatgaagggcctatgtgtgatctactgtggtctgacccagacgacagatgtggttgggggatttctcctcgtggtgctggatatacctttggtcaggatatatctgaacaattcaatcacacaaacagccttaaattgattgctagagctcaccagcttgttatggatggatttaactgggctcatgaacaaaaggtggttactatttttagtgctcctaactactgttaccgatgtgggaacatggcctccatattggaggttgatgattgcaagggccacacatttatccagtttgaacctgctccaaggagaggagaacctgatgtcacccgaagaacgcctgattacttcctgtaaagcagctgctgctggatgtcatactgaggccgcattgatgtataataggcaaacaatattccaccgatctgttgcactcaagaaattgctggacaccctttctggagaagttgtcaagattatgactacaaggaagtactattccagcaaaatgtggatatttttttgtatgtttttttcaaatcatgttttatatctccctttcaaggctttaggtactgtgactgaattttttaactcgtggatattgatatgttatctcaattttttagtaaaaaaaaaaaaaa

SEQ ID NO: 89680 - protein, 313 aa, Medicago sativa
MGANSMIADVTHDLNEQISQLMQCKPLSEQQVKELCEKAKEILMDESNVQPVKSPVTICGDIHGQFHDLAELFRIGGKCPDTNYLFMGDYVDRGYYSVETVTLLVALKVRYPQRITILRGNHESRQITQVYGFYDECLRKYGSANVWKIFTDLFDFFPLTALVESEIFCLHGGLSPSIETLDNIRNFDRVQEVPHEGPMCDLLWSDPDDRCGWGISPRGAGYTFGQDISEQFNHTNSLKLIARAHQLVMDGFNWAHEQKVVTIFSAPNYCYRCGNMASILEVDDCKGHTFIQFEPAPRRGEPDVTRRTPDYFL

SEQ ID NO: 89681 - DNA, 1589 bp, Nicotiana tabacum
  CDS (221)..(1159)
gctgcaatggctcttgttgatgagagaatgagcacagaaggaacaggcctttcctctttggtttcaccaccaccactcgctcactcctctctctctctctctgtagagctgagagaaaatcaaatcaaatcaaacccccgtttgatttcatccctcttttccgctagggtttctgcacaaagttccctccagaatcagttgaaaagaagatcaatcagcaatggatccggtgccatcgagcgcatctcatggaaatctcgacgaacaaattgctcagcttatgcagtgcaaacccttgtccgaacaggaggtaagaggactatgtgagaaagcgaaggagattctaatggaagagagcaacgtgcagcctgtgaaaagtcctgtgacgatatgtggtgatattcatggtcagttccatgatcttgctgagctttttcgaattggtggaaagtgtcctgacactaattatttattcatgggagattatgtagatcgtggatactattctgttgaaacagtaacgcttttggtggctctcaaagtgcgctatccccagcgaattacaatcctaaggggtaatcatgagagtcgccagattactcaggtttatgggttttatgatgaatgcctacggaaatatggtaatgccaatgtgtggaagactttcacagatctgtttgactactttcctctgactgctttggttgagtcagagattttctgcctccacggtggtttgtctccatctattgaaactcttgataatattcgcaattttgaccgtgtacaagaagttccacatgagggtgctatgtgtgatcttttatggtctgatcctgatgatcgttgtggttggggtatctcacctaggggtgctggatatacatttggccaagatatctctgagcagtttaaccacaccaacaacttgaagctaattgctagagcacaccagctggttatggagggattcaattgggcccacgatcaaaaggtggttaccatctttagtgcacctaattattgttaccgttgtggcaatatggcatccatcttggaagttgatgattccagggagcgcacattcattcagtttgaaccagctccaaggagaggggagccagatgtaacccgaagaacacctgattacttcttatgatgcgaatgcacaaacctattgatttttgtgcggtaggtcctgctgactgctttatatgctacgagccttttaccagtttgtagtttttttcccgctacggtggcgctactactatgaaatgaagcatgtaaatcaggcatgtgatactgaaacctcattgagatgctgtgaagagatggtgaagccagtgacagagggtgcatgtatcatttttccgcagacaatattttcactctttggtcatatattttttggttagatagaaaggacaatgatttgcttcgtgataattcttgtccctttacaaggacaattcctgtcgtataagcgttgtagaggtaagattatttttttaaacaccttttaatgagtgctcgtgtaattttctatgaggtcacgactctattttgatttctaaaaaaaaaaaaaa

SEQ ID NO: 89682 - protein, 312 aa, Nicotiana tabacum
MDPVPSSASHGNLDEQIAQLMQCKPLSEQEVRGLCEKAKEILMEESNVQPVKSPVTICGDIHGQFHDLAELFRIGGKCPDTNYLFMGDYVDRGYYSVETVTLLVALKVRYPQRITILRGNHESRQITQVYGFYDECLRKYGNANVWKTFTDLFDYFPLTALVESEIFCLHGGLSPSIETLDNIRNFDRVQEVPHEGAMCDLLWSDPDDRCGWGISPRGAGYTFGQDISEQFNHTNNLKLIARAHQLVMEGFNWAHDQKVVTIFSAPNYCYRCGNMASILEVDDSRERTFIQFEPAPRRGEPDVTRRTPDYFL

SEQ ID NO: 89683 - DNA, 1713 bp, Drosophila melanogaster
  CDS (1)..(1713)
atgtcttcgaataaccagagcagcagcgttgcccaggcggcaacaagtgcccgcaccgtcagtgccggatcggcggaagccacagatgccaatagtaccgcctcgaacaacaacaataatagcagcagtaccgctgcagcgggcaacaacagcgacaacagcagtcccaccactggaacgggcacaggagcgagcactggaaagctgcacggcggccacacggcagtaaacaccaaggaacgggtggtggacagcgttcccttcccgcccagccacaagctgaccttggcggaggtgttcgaccaacgcaccggcaagcccaaccatgagctgctcaagcagcacttcattcttgagggcagaatcgaggaggcgcccgccctgaaaatcatccaggacggagccgccctgctgcgtcaggagaagacgatgatcgatattgaggcgccggtgacggtgtgcggtgatatccacggccagttctacgacctgatgaagctgttcgaagtgggcggctcgcccgcgagcaccaagtatctgttcctgggcgactacgtcgatcggggctacttcagcatcgagtgcgtcctgtatttgtggtcgctaaagatcacctatccgcagacgctgttcctgctgcgcggcaaccacgagtgccggcacttaaccgagtacttcaccttcaagcaggagtgcaagatcaagtactcggagcgcgtgtacgacgcctgcatggacgcattcgactgcctgccgctggcggcgctaatgaaccagcagttcctctgcgtgcacggcggtctgtcgccggagatacacgagctggaggacatccggcggctcgaccgcttcaaggagccgcccgcctttggccccatgtgcgacctgctgtggtccgatcccctggaggactttggcaacgagaagaactcggacttctacacgcacaactccgtgcgcggatgctcgtacttctacagctacgccgcctgctgcgacttcctgcagaacaacaacctgctgtcgatcatccgggcgcacgaggcgcaggacgccggctaccgcatgtaccgcaaaagccagaccaccggcttcccctcgctgatcaccatcttctcggcgcccaactatctcgacgtgtacaacaacaaggcggcggtgctgaagtacgagaacaacgtgatgaacatccggcaattcaactgctcgccgcacccgtactggctgcccaacttcatggacgtgttcacctggtcgctacccttcgtgggcgagaaggtcaccgagatgttggtgaacgtgctgaacatctgctccgacgacgagctcatgaccgaggagagcgaggagccgctctccgacgacgaggcggcgctgcgcaaggaggtgatacgcaacaagatccgtgccattggcaagatggcgcgcgtcttctccgtgctgcgcgaggagtccgagtcggtgctgcagctgaagggcctgacgcccacgggcgccctgcccctcggcgccctctccggcggcaagcagtcgctcaagaacgccatgcagggcttctcgcccaaccacaagattacctcgttcgcggaggccaagggcctggatgccgtcaacgaacggatgccgccgcggcgggatcagccgcccacgcccagcgaggatccgaatcagcacagtcagcagggcggcaaaaatggggctggacatgggtaa

SEQ ID NO: 89684 - protein, 570 aa, Drosophila melanogaster
MSSNNQSSSVAQAATSARTVSAGSAEATDANSTASNNNNNSSSTAAAGNNSDNSSPTTGTGTGASTGKLHGGHTAVNTKERVVDSVPFPPSHKLTLAEVFDQRTGKPNHELLKQHFILEGRIEEAPALKIIQDGAALLRQEKTMIDIEAPVTVCGDIHGQFYDLMKLFEVGGSPASTKYLFLGDYVDRGYFSIECVLYLWSLKITYPQTLFLLRGNHECRHLTEYFTFKQECKIKYSERVYDACMDAFDCLPLAALMNQQFLCVHGGLSPEIHELEDIRRLDRFKEPPAFGPMCDLLWSDPLEDFGNEKNSDFYTHNSVRGCSYFYSYAACCDFLQNNNLLSIIRAHEAQDAGYRMYRKSQTTGFPSLITIFSAPNYLDVYNNKAAVLKYENNVMNIRQFNCSPHPYWLPNFMDVFTWSLPFVGEKVTEMLVNVLNICSDDELMTEESEEPLSDDEAALRKEVIRNKIRAIGKMARVFSVLREESESVLQLKGLTPTGALPLGALSGGKQSLKNAMQGFSPNHKITSFAEAKGLDAVNERMPPRRDQPPTPSEDPNQHSQQGGKNGAGHG

SEQ ID NO: 89685 - DNA, 933 bp, Ashbya gossypii
  CDS (1)..(933)
atggcaggtatgcaactggacgaaattattgaatatctgcggtatagcaagcatattccggaggaaactatttacgaactatgtttgaagtgtcaagaactacttgttaacgaatcgaacgtgacgcatgtggacacgccggtaactatctgcggagacatacacggacagctgcacgacctgttgacgctgtttgaaaagtcggaggggatcgagaagaaccgcttcatctttctgggcgacttcgtggatcggggcttctactcgctggaaagcttcctcctactgctgtgctacaaactgaggtatcctgaccgcatcacactcattcgcggaaaccacgaaacaagacagatcaccaaggtgtatggcttctatgatgaggtcatccgcaagtacggtaactctaatgtctggcgttactgctgcgaggtgtttgactacctctcattaggcgcgatcatcaacggccagatcttctgcgtgcacggcggcctttcgccggatgtcatgacggttgacgagatacgatcgatcgaccgtaagcaggaagtgcctcatgagggtgccatgtgtgatctcttgtggagcgaccccgatgaggtcgacacctggtcactgtcgcctcgaggagctggcttcttgtttggcaagaacgaagtggaccagttcttgcacaggaatgatatcagtctcatcgcacgcgcgcaccaactggtcatggagggctacaaggaaatgtttgacggcggcctggtaaccgtgtggtcggcgcccaactactgctaccggtgcgggaatgtcgctgcagtgttacggatcgacgacgacctcagccgaaattacactatattcgaagctgtgcccgcacaggacaatcgcggcaacgcaatcattccaaccaagaaacctcaaatggactactttttatga

SEQ ID NO: 89686 - protein, 310 aa, Ashbya gossypii
MAGMQLDEIIEYLRYSKHIPEETIYELCLKCQELLVNESNVTHVDTPVTICGDIHGQLHDLLTLFEKSEGIEKNRFIFLGDFVDRGFYSLESFLLLLCYKLRYPDRITLIRGNHETRQITKVYGFYDEVIRKYGNSNVWRYCCEVFDYLSLGAIINGQIFCVHGGLSPDVMTVDEIRSIDRKQEVPHEGAMCDLLWSDPDEVDTWSLSPRGAGFLFGKNEVDQFLHRNDISLIARAHQLVMEGYKEMFDGGLVTVWSAPNYCYRCGNVAAVLRIDDDLSRNYTIFEAVPAQDNRGNAIIPTKKPQMDYFL

SEQ ID NO: 89687 - DNA, 927 bp, Kluyveromyces lactis
  CDS (1)..(927)
atgatgaaactcgatgagattatagagactctaaggcaggggaaacatgttgacgaggattcgatatactcgctgtgtgtcatggctcaagaacttcttatgaatgagtctaacgtgacacatgtggatacgccagtcacaatttgtggagatattcatggccaattgcatgatttgttgactctctttgctaagagtggaggcattgaaaagaatagatacatctttttgggagatttcgtggatagagggttctattcgttagagagtttccttcttttggtatgttataaattaaggtatccagatagaattgtgttgatacgaggaaatcatgaaacaagacagattacgaaggtttatgggttttacgacgaagtggtaaggaaatatggtaacagtaacgtatggagatactgttgcgaagtattcgactatttgcccttgggtgccattgtaaacaacaaggttttctgtgttcatggtggattatcgccggacgttttatcaatcaacgaaatacgaaccatcgataggaaaaaggaggtaccgcatgaaggtgctatgtgtgatttattgtggtcggatccagaggatgtggatacttggtctctttccccgcgtggtgcaggtttcctatttggccaaaacgaagtagataaatttttacacacaaatagtgtcgaattaatcgctagagctcatcaattggtcatggaaggttataaagagatgttcgatgggggattagtcacggtatggtcagcaccaaactactgttatcgttgtgggaatgtggctgctgtgctgcgcatcgatgacgatatgacgaaggattacaccatttttgaagctgttcaggcgagggatagtggaggtaatgtcattctccctacgaaaaaacctcaaatggactacttcttgtaa

SEQ ID NO: 89688 - protein, 308 aa, Kluyveromyces lactis
MMKLDEIIETLRQGKHVDEDSIYSLCVMAQELLMNESNVTHVDTPVTICGDIHGQLHDLLTLFAKSGGIEKNRYIFLGDFVDRGFYSLESFLLLVCYKLRYPDRIVLIRGNHETRQITKVYGFYDEVVRKYGNSNVWRYCCEVFDYLPLGAIVNNKVFCVHGGLSPDVLSINEIRTIDRKKEVPHEGAMCDLLWSDPEDVDTWSLSPRGAGFLFGQNEVDKFLHTNSVELIARAHQLVMEGYKEMFDGGLVTVWSAPNYCYRCGNVAAVLRIDDDMTKDYTIFEAVQARDSGGNVILPTKKPQMDYFL

SEQ ID NO: 89689 - DNA, 927 bp, Saccharomyces cerevisiae
  CDS (1)..(927)
atgatggacttagataagattatagcatcactgagagacggaaaacatattcctgaagaaaccgtttttaggctatgtttaaattcacaggaactattaatgaatgaaggcaatgtaacacaagtcgatacaccggttacaatatgcggtgatatacatggccaattacacgatctactaacgctcttcgaaaagagtggtggtgtagagaaaacaaggtatattttcttgggcgattttgtggataggggattttactcattggagagttttttacttttactatgttacaaattaagatatcctgataggattactttaattagaggcaatcacgaaacccggcaaattactaaagtatacggattttacgatgaagtagtaagaaaatatggtaatagtaacgtatggaggtactgctgtgaagtttttgattatttatcattgggggcaataataaacaatagcatattctgtgttcatggtggattatctccggatatgaccacggttgatgaaatacgaacaatagacaggaaacaagaagttccacatgaaggtgctatgtgtgacttattatggagcgaccccgaagacgttgacacatggtcattatcaccaagaggtgctggatttcttttcggtaaaagagaagttgatcaattcttagagaaaaacaacgttgagttaattgctagagctcatcagttagtgatggaaggttacaaagaaatgttcgacggtggattagtgacagtctggtcggcaccgaattactgttatcgttgtggtaatgtagcagctgtattgaagatagacgacgatttgaatcgtgaatatacaatttttgaagctgttcaggcacaaaatgaagtcggaaatgctataattccaaccaaaaaatctcaaatggactatttcttataa

SEQ ID NO: 89690 - protein, 308 aa, Saccharomyces cerevisiae
MMDLDKIIASLRDGKHIPEETVFRLCLNSQELLMNEGNVTQVDTPVTICGDIHGQLHDLLTLFEKSGGVEKTRYIFLGDFVDRGFYSLESFLLLLCYKLRYPDRITLIRGNHETRQITKVYGFYDEVVRKYGNSNVWRYCCEVFDYLSLGAIINNSIFCVHGGLSPDMTTVDEIRTIDRKQEVPHEGAMCDLLWSDPEDVDTWSLSPRGAGFLFGKREVDQFLEKNNVELIARAHQLVMEGYKEMFDGGLVTVWSAPNYCYRCGNVAAVLKIDDDLNREYTIFEAVQAQNEVGNAIIPTKKSQMDYFL

SEQ ID NO: 89691 - DNA, 918 bp, Schizosaccharomyces pombe
  CDS (1)..(918)
atgtttgacttggatgaatggatcgctacagtaaggaagtgtaaatatcttccagaacaccagttgaaacgattgtgtgagatggtaaaagttattttaatggaggagtccaatatccagcctgtgcggactcccgttactgtttgtggtgatatacatggtcagttttacgaccttttggaactgtttcgagtaggtggagaattgccaagcacaaattatatatttatgggtgattttgtggatcgaggttattttagcttagaaacttttacgttatttatgcttttgaaagcaaggtacccagataaaattacattgcttcgtggtaatcacgaaagtcgccagatcactcaagtctacgggttttatgatgagtgtcaaaccaaatatggaaatgcaaatgtttggaaatattgttgccaagtttttgattttttgactttggcagcggttatcgataacaaaattttatgcgtgcatggtggattatctccggaagttcgcacattggatcagattcgtattcttgcgcgtgctcaagaaattccccatgaaggctcattttgcgatttgatgtggtctgatccagaggatattgaatcttggactgtttcgcctcggggagctggatggttgtttggttctaaagttactaccgaatttagtcaaatcaacgacttgacattgattgctcgtgctcatcaacttgttcaagagggctacaaatatcattttgccgataaaaatcttgttaccgtttggagtgctcccaattactgctatagatgtggaaatgtggcaagtgttatgaaagtagatgaatctttggaaccggaatttcgtattttctcggctgttgccgacgaagatcgtaccgttccccctagcagaaaaagaagcgagtatttcatctaa

SEQ ID NO: 89692 - protein, 305 aa, Schizosaccharomyces pombe
MFDLDEWIATVRKCKYLPEHQLKRLCEMVKVILMEESNIQPVRTPVTVCGDIHGQFYDLLELFRVGGELPSTNYIFMGDFVDRGYFSLETFTLFMLLKARYPDKITLLRGNHESRQITQVYGFYDECQTKYGNANVWKYCCQVFDFLTLAAVIDNKILCVHGGLSPEVRTLDQIRILARAQEIPHEGSFCDLMWSDPEDIESWTVSPRGAGWLFGSKVTTEFSQINDLTLIARAHQLVQEGYKYHFADKNLVTVWSAPNYCYRCGNVASVMKVDESLEPEFRIFSAVADEDRTVPPSRKRSEYFI

SEQ ID NO: 89693 - DNA, 912 bp, Drosophila melanogaster
  CDS (1)..(912)
atgggcgacgtggacaagtggatagaagacgtgaagaaatgcaagtacctgccggagaacgagctgaagaagctatgcgagatggtctgcgatatcctcctggaggagacgaacatcctgcccgtgagcacgcccgtcaccgtttgcggtgacatccatggccagttctacgacctggagcagctgttccgcactggaggccaggtgccgcataccaactacatattcatgggcgacttcgtggacaggggctactactcgctggagacattcaccagactgctcacgctgaaggcgcgctatcccagccggatcaccctgctgcgcggcaaccacgaaacgcggcagatcaccaaggtgtacggattctttgacgagtgcttcagcaagtacggcaatgccaatggctggaaatactgctgcaaggtcttcgatttgcttaccatcgctgccatcatcgacgaggaggtgttgtgcgtgcacggtggcctgagtcccgagatcattacactggaccagatcaggacgatcgatcgcaacggcgagataccgtacaagggtgccttctgcgatctggtgtggtccgatcccgaggacatggagtactggggtcagagtccgcgcggcgctggctggctgtttggccacaatgtgaccaaggattttatggcgatcaataatctgaacctcatatgccgagcacatcagctggtcaacgagggcatcaagtatatgtttgatggcaaactggtgaccgtgtggtcggcgccaaactattgctatcgctgcggcaacgttgccgccattcttagcttcgaaacggcggagaagcggcagacgaagatcttcctagcggttccggatgcggagcgtgtgatacccaagcagaacacaacgccctacttcctgtaa

SEQ ID NO: 89694 - protein, 303 aa, Drosophila melanogaster
MGDVDKWIEDVKKCKYLPENELKKLCEMVCDILLEETNILPVSTPVTVCGDIHGQFYDLEQLFRTGGQVPHTNYIFMGDFVDRGYYSLETFTRLLTLKARYPSRITLLRGNHETRQITKVYGFFDECFSKYGNANGWKYCCKVFDLLTIAAIIDEEVLCVHGGLSPEIITLDQIRTIDRNGEIPYKGAFCDLVWSDPEDMEYWGQSPRGAGWLFGHNVTKDFMAINNLNLICRAHQLVNEGIKYMFDGKLVTVWSAPNYCYRCGNVAAILSFETAEKRQTKIFLAVPDAERVIPKQNTTPYFL

SEQ ID NO: 89695 - DNA, 945 bp, Drosophila melanogaster
  CDS (1)..(945)
atggccgtcttaactactcacgaaatagattgcattataaaggagctcacatccctgaatggaagtgagtgcacattaaaggaggaactaatcgagagactcattcaacagactcgtgaagtgatcaaatggcaaccgatgctgctcgaacttcaggctccggtcaatatatgcggcgatattcatggccagtttacagatctcttgaggattttcaaggcatgcggctttccacccaaagccaactatttatttctcggtgactatgtggaccggggcaagcaatcgctggaaacaatttgcctgctatttgcttacaaagttaaatatccgctaaatttctttttgcttcgcggcaatcacgagagcgccagtataaataaaatttacggattttatgacgagatcaaacgtagacacactgttcgtctgtggcacagtttcaccgattgcttcaactggcttccggtggccgcattggtgggcgagcgcatcttctgctgccacggaggactgagtccatcgctccggaatttgcaacagatcaatcatattcagcgacccactgatattccggatgagggtattatgtgcgatctcctttgggcggatctaaatcacaccaccaaaggctggggtcacaacgatcgcggtgtgagcttcaccttcgataaggtcatagttcgggattttcttaaagccttcgacttgcaacttatggttcgcgcccatgaggttgtggaggatggatacgagttctttgccaaccgacagctggtcaccgtattctcggcccccaactattgcggtatgatgaacaatgccggcggagtgatgagtgttagcacagacttgatctgctccttcgtcattattctaccgtgtcacaaatacaaaatgattgcgactgatgccaaccaaatgccgactaacgaagaggagtga

SEQ ID NO: 89696 - protein, 314 aa, Drosophila melanogaster
MAVLTTHEIDCIIKELTSLNGSECTLKEELIERLIQQTREVIKWQPMLLELQAPVNICGDIHGQFTDLLRIFKACGFPPKANYLFLGDYVDRGKQSLETICLLFAYKVKYPLNFFLLRGNHESASINKIYGFYDEIKRRHTVRLWHSFTDCFNWLPVAALVGERIFCCHGGLSPSLRNLQQINHIQRPTDIPDEGIMCDLLWADLNHTTKGWGHNDRGVSFTFDKVIVRDFLKAFDLQLMVRAHEVVEDGYEFFANRQLVTVFSAPNYCGMMNNAGGVMSVSTDLICSFVIILPCHKYKMIATDANQMPTNEEE

SEQ ID NO: 89697 - DNA, 924 bp, Schizosaccharomyces pombe
  CDS (1)..(924)
atgattgacctcgataacataatagagagattatatgaaaaacaattgattgctgagtccgttattgcttatctttgttctctcgcaaaggaagttttaatgcaagaaagcaatgttgtcaggttgtctactcccattaccgtggttggtgatattcatggccaatttgatgatctacttgaaatctttcgtataggaggcccatgcccatacacaaactatctttttctcggtgattatgttgatcggggctattatagtatagaaactataacccttttgatatgtctcaagttacggtatccaaagaggattactcttttgcgcggaaaccatgagtccagaggaataacccaaacctatggattttattcagaatgcttaagaaaatacggtaatgctaatgtttggaaatattttaccgatatctttgatttcctaacactttctgcaacaattgatgacactattttttgtgttcatggtggactttctcctagtattcagcacatagatcaaatccttgtcttagacaggtttagagaattcccacacgagggacctatggccgatctcgtgtggtcggatccggatcctagcgtgcaagaattttcactttcgccccgtggtgcaggtttttctttcggtgaagttattgtaacaaaatttctagaatacaacaatatgaagcacatcttacgagctcatcaactatgcagcgaaggttatcaaatattgtttgaaaaaaaattatcgacagtgtggtctgccccaaattactgttacagatgtgccaacttggctagcatccttcagatcgacacagatcaatcaagattttttaatgtttttgatgcagctcctaatcaagaaacgccttttgtggagccagctgcaaaagtgacagcggaatatttcctttag

SEQ ID NO: 89698 - protein, 307 aa, Schizosaccharomyces pombe
MIDLDNIIERLYEKQLIAESVIAYLCSLAKEVLMQESNVVRLSTPITVVGDIHGQFDDLLEIFRIGGPCPYTNYLFLGDYVDRGYYSIETITLLICLKLRYPKRITLLRGNHESRGITQTYGFYSECLRKYGNANVWKYFTDIFDFLTLSATIDDTIFCVHGGLSPSIQHIDQILVLDRFREFPHEGPMADLVWSDPDPSVQEFSLSPRGAGFSFGEVIVTKFLEYNNMKHILRAHQLCSEGYQILFEKKLSTVWSAPNYCYRCANLASILQIDTDQSRFFNVFDAAPNQETPFVEPAAKVTAEYFL

SEQ ID NO: 89699 - DNA, 978 bp, Oryza sativa
  CDS (1)..(978)
atgatgatgacgcgggcgtcgatgggggcgatggaaggcgcggcggtggacgaggtggtgcggcgcctcgtggagggcgggcgcggggggaggcaggtgcagctgtcggaggcggagatccggcagctctgcgtcgaggcgaagcgggtgctcctgtcgcagccgaacctcctgcgcatccacgcccccgtcaagatctgcggtgatatccatgggcaatttgttgatcttctgaggctgtttgatttgggcggttatcctccaacttccacttatcttttccttggagattatgtggacagaggcaaacaaagcttggaaaccatatgcttgcttctggcatacaaagtgaagtatcctgataagattttcctgttaaggggaaaccatgaagatgcgaaaattaacagagtgtatggtttctatgatgaatgtaagaggcgattcaatgttcgactgtggaagattttctgtgattgcttcaactgcttgcctatggcagcactcattgacgataagatactctgcatgcatggtggcctctcacctgaactgaatagcttggatcaaataaaggatatcgagaggcccactgagattcctgactatggtcttttgtgtgatttagtttggtctgatcctagtcctgactcagaagggtggggagagagtgacagaggtgtttcctgcacttttggtgcagataagcttgtagaatttttggagaagaatgatcttgatcttatatgccgcgctcatcaggttgttgaggatggctacgagttctttgcgcaaaggagattagtgacaatcttttcagctccaaactattgtggggaatttgataatgcgggtgctctgttgagcatagatgaaagtttaatgtgttcttttcaaatcttgaagccaaatgatacaggggctccacattcaaggaaaccaacttcaaacaagaccccaaaaactggaaacgcttaa

SEQ ID NO: 89700 - protein, 325 aa, Oryza sativa
MMMTRASMGAMEGAAVDEVVRRLVEGGRGGRQVQLSEAEIRQLCVEAKRVLLSQPNLLRIHAPVKICGDIHGQFVDLLRLFDLGGYPPTSTYLFLGDYVDRGKQSLETICLLLAYKVKYPDKIFLLRGNHEDAKINRVYGFYDECKRRFNVRLWKIFCDCFNCLPMAALIDDKILCMHGGLSPELNSLDQIKDIERPTEIPDYGLLCDLVWSDPSPDSEGWGESDRGVSCTFGADKLVEFLEKNDLDLICRAHQVVEDGYEFFAQRRLVTIFSAPNYCGEFDNAGALLSIDESLMCSFQILKPNDTGAPHSRKPTSNKTPKTGNA

SEQ ID NO: 89701 - DNA, 912 bp, Oryza sativa
  CDS (1)..(912)
atggatttggatctgtggatctctaaggtgaaggagggccagcacctcgccgagcacgagctccagtccctctgcgaatacgtgaaggagatcctcatcgaggagtccaacgtgcagccagtgaacagcccggtgaccgtgtgcggagacatccatgggcagttccatgacctgatgaagctcttcgcgactggggggcatgtgcccgagacgaattatattttcatgggtgattttgtagaccgcggcttcaacagtctggaggtcttcaccattctgttgctactaaaagcgaggtaccctgcacacataacgcttctgcgtggaaatcatgaaagcagacagttgacacaggtgtatggtttctacgatgagtgccaaaggaagtatgggaatgcgaatgcatggcggtattgcaccgatgtttttgactaccttactctttcagcaatcattaatggcacggttctttgtgttcatggtggactttctcctgatgtgcgcactgttgatcagattcggacgattgatcgcaattgtgaaattcctcatgaaggtcctttctgtgatctaatgtggagtgaccctgaagaaatagagacatgggctgttagccctcgtggagctggttggctttttggatcacgagtgacagctgagttcaaccatattaacaatctcgatctagtttgccgagctcaccagctggttcaggaaggcttaaagtacatgtttcaggacaaaggccttgtaactgtgtggtccgctcctaattattgctacagatgtggaaatgttgcttctatactaagcttcagtgagacaatggaaagagaggtcaaattcttcacagagacagaggagaataaccagatgcgaggaccgaggactgctgtcccatatttcctctga

SEQ ID NO: 89702 - protein, 303 aa, Oryza sativa
MDLDLWISKVKEGQHLAEHELQSLCEYVKEILIEESNVQPVNSPVTVCGDIHGQFHDLMKLFATGGHVPETNYIFMGDFVDRGFNSLEVFTILLLLKARYPAHITLLRGNHESRQLTQVYGFYDECQRKYGNANAWRYCTDVFDYLTLSAIINGTVLCVHGGLSPDVRTVDQIRTIDRNCEIPHEGPFCDLMWSDPEEIETWAVSPRGAGWLFGSRVTAEFNHINNLDLVCRAHQLVQEGLKYMFQDKGLVTVWSAPNYCYRCGNVASILSFSETMEREVKFFTETEENNQMRGPRTAVPYFL

SEQ ID NO: 89703 - DNA, 951 bp, Oryza sativa
  CDS (1)..(951)
atggatccggtgttgctggacgacatcatccggaggcttatcgaggtgaagaatctgaagccggggaagaacgcgcagctttcggagtcggagattaagcagctctgcgcaacctccaaggagatcttcctgaatcagcccaacctgctcgagctcgaggcccccatcaaaatctgcggtgatgttcatggacagtattctgatctcctgaggctgtttgattatggtgggtatccacctcagtccaactatctcttcttgggcgattatgtggaccggggaaagcaaagccttgagacgatatgccttcttttggcttataagatcaagtaccctgaaaacttcttcctactcagaggcaaccatgaatgtgcatcggtcaaccgcatctatggattttatgacgagtgcaagcgcagattcagtgtaaaactctggaagacttttactgactgttttaactgcttaccagtggcagcattgatagatgaaaagattctttgtatgcacggaggtctttctccagagttgaataagctggatcaaatactcaacctcaaccgccccacggatgtgcctgatactgggttactttgtgatctcctttggtccgatccatccaatgacgcacaagggtgggctatgaatgatcgaggtgtctcatatacattcgggccagacaaagtgtctgaatttcttgagaagcatgatttagacctcatctgtcgagcccatcaggttgtcgaagatgggtacgagttctttgctaaccgccaacttgtaacaatattctcggcccctaattactgtggagaatttgataatgctggtgccatgatgagtgtagatgatacactgatgtgctcttttcaaatactaaaaccagcgaggaaaatgttgggtggttccacgaattccaaatccggcttcaagtcactgagagggtggtga

SEQ ID NO: 89704 - protein, 316 aa, Oryza sativa
MDPVLLDDIIRRLIEVKNLKPGKNAQLSESEIKQLCATSKEIFLNQPNLLELEAPIKICGDVHGQYSDLLRLFDYGGYPPQSNYLFLGDYVDRGKQSLETICLLLAYKIKYPENFFLLRGNHECASVNRIYGFYDECKRRFSVKLWKTFTDCFNCLPVAALIDEKILCMHGGLSPELNKLDQILNLNRPTDVPDTGLLCDLLWSDPSNDAQGWAMNDRGVSYTFGPDKVSEFLEKHDLDLICRAHQVVEDGYEFFANRQLVTIFSAPNYCGEFDNAGAMMSVDDTLMCSFQILKPARKMLGGSTNSKSGFKSLRGW

SEQ ID NO: 89705 - DNA, 969 bp, Oryza sativa
  CDS (1)..(969)
atggcggcggcaccgggggcgggagggcagggcggcggcgggatggacgccgtcctcctcgacgatatcatccgccgcctgctcgaggtgcggacggcgcgcccggggaagcaggtgcagctctccgagtcggagatccgccagctctgcactgtatcccgagaaatcttcctcagccagcccaatctcctcgagctcgaggcgcccatcaagatctgcggtgacatccatggtcagtacagtgaccttctaaggctttttgagtatggtggttttcccccagaagccaattatctattcttaggtgattatgttgatcgaggcaaacaaagtttggaaacaatatgcctcctccttgcatacaaaatcaagtacccggagaatttttttcttctcagaggcaatcatgagtgtgcatcaataaacaggatatatggattttatgatgaatgcaaacgccgatttaatgtgcgtctatggaaggtcttcactgattgttttaactgtctccctgtggctgcgctaattgatgataaaatattatgcatgcatggtggcctctctcctgatctgacacatttagatgagataaagagcttgccccgtcctactgatgtaccggatacaggtctgctatgcgacctactttggtcagatccaggaaaagacgttcaaggttggggcatgaatgataggggggtctcatacacttttggtgctgacaaagtttcagaattcctggaaaaacatgaccttgatcttatttgccgggcacatcaggttgttgaggatggatatgagttctttgccgacagacaacttgtcaccatattctcagctccaaactattgtggtgaatttgataatgcaggtgcaatgatgagtgttgatgaaactttgatgtgttcttttcaaattcttaaacctgctgagagaaaaggcaaatttatggcatcaaacaaaatgtga

SEQ ID NO: 89706 - protein, 322 aa, Oryza sativa
MAAAPGAGGQGGGGMDAVLLDDIIRRLLEVRTARPGKQVQLSESEIRQLCTVSREIFLSQPNLLELEAPIKICGDIHGQYSDLLRLFEYGGFPPEANYLFLGDYVDRGKQSLETICLLLAYKIKYPENFFLLRGNHECASINRIYGFYDECKRRFNVRLWKVFTDCFNCLPVAALIDDKILCMHGGLSPDLTHLDEIKSLPRPTDVPDTGLLCDLLWSDPGKDVQGWGMNDRGVSYTFGADKVSEFLEKHDLDLICRAHQVVEDGYEFFADRQLVTIFSAPNYCGEFDNAGAMMSVDETLMCSFQILKPAERKGKFMASNKM

SEQ ID NO: 89707 - DNA, 969 bp, Oryza sativa
  CDS (1)..(969)
atggatgcggcggcgctcgacgacttgatccggcggctcctggacgcccgcggcggccgcacggcgcgccccgcgcagctcgccgacgcggagatccgcaagctctgcgccgccgccaaggacgtcttcctctcccagcccaacctcctcgagctcgaggcccccatcaaaatctgcggagatatccatggccagtattctgatcttcttcggttatttgagtatgggggcttcccaccagaggcaaactacttgtttctaggtgattatgttgaccgtgggaaacagagtatagaaactatatgtcttctccttgcgtataagattaagtacccagagaacttcttcctccttaggggaaaccatgagtgcgcatctatcaaccgaatctacggattctttgatgaatgcaaaaggaggtttaatgttcgtatttggaaggtttttactgattgtttcaactgcctccctgtggctgcacttattgatgacaagatcctatgcatgcatgggggtttatctcctgacctaaagaacatggaccagattcgcaacattgcccgcccagttgatgttccagaccatggtctcctgtgtgatctgttgtggtcagacccagataaagaaatcgaaggttggggtgagaatgacaggggtgtatcatacacttttggagctgataaggtcgctgagtttctccagacacatgatctagatctgatctgcagggctcaccaggttgtggaggatggctatgaattctttgctaagcgccagcttgtaaccatattctctgcacccaactattgtggcgagtttgacaatgcgggggcgatgatgagcattgatgattctcttacatgctcattccagatccttaagccttctgataagaaaggaaaagcaggaaccggaaatatgtcaaaacctggaactccaccaaggaagataaaaattaatattatttag

SEQ ID NO: 89708 - protein, 322 aa, Oryza sativa
MDAAALDDLIRRLLDARGGRTARPAQLADAEIRKLCAAAKDVFLSQPNLLELEAPIKICGDIHGQYSDLLRLFEYGGFPPEANYLFLGDYVDRGKQSIETICLLLAYKIKYPENFFLLRGNHECASINRIYGFFDECKRRFNVRIWKVFTDCFNCLPVAALIDDKILCMHGGLSPDLKNMDQIRNIARPVDVPDHGLLCDLLWSDPDKEIEGWGENDRGVSYTFGADKVAEFLQTHDLDLICRAHQVVEDGYEFFAKRQLVTIFSAPNYCGEFDNAGAMMSIDDSLTCSFQILKPSDKKGKAGTGNMSKPGTPPRKIKINII

SEQ ID NO: 89709 - DNA, 921 bp, Oryza sativa
  CDS (1)..(921)
atgccgtcgcacgcggatctggaccggcagatctcgcagctgcgggagtgcaagttcctgggggaggcggaggtgagggcgctgtgcgagcaggcgaaggcgatcctcatggaggagtggaacgtgcagccggtgcggtgccccgtcaccgtctgcggcgacatccacggccagttctacgacctcatcgagctcttccgcatcggcggggactcccccgacaccaactacctcttcatgggtgactacgtcgaccgtggttactattcagtggagactgttacattactagtggctcttaaagtccgttatagagacagaatcacaatattgagaggaaatcacgagagcagacaaatcacccaagtgtatggcttctatgacgaatgcttacggaagtatggaaatgcaaatgtttggaagtacttcacggacttgtttgattatttgcctctcacagctcttgtagaaaaccaggtcttttgcctccatggcggtctctcgccgtcattggatacattggataacattcgtgccctcgatcgcatacaggaggtccctcatgaagggcccatgtgtgatcttttgtggtctgacccggacgatcgatgtgggtggggaatttctccaagaggggcaggatacacgtttgggcaagatattgcacaacaattcaaccatactaatggccttacccttatttcaagggcccatcaacttgtgatggaaggcttcaattggtgccaggacaagaacgttgtcacggtgttcagcgccccaaactactgttaccgctgtggtaacatggcagcaattctagaaatcggggagaacatggatcagaacttcctacagttcgatccagccccacgacaaatagagccggacacaacgcgcaagacccccgactactttttgtaa

SEQ ID NO: 89710 - protein, 306 aa, Oryza sativa
MPSHADLDRQISQLRECKFLGEAEVRALCEQAKAILMEEWNVQPVRCPVTVCGDIHGQFYDLIELFRIGGDSPDTNYLFMGDYVDRGYYSVETVTLLVALKVRYRDRITILRGNHESRQITQVYGFYDECLRKYGNANVWKYFTDLFDYLPLTALVENQVFCLHGGLSPSLDTLDNIRALDRIQEVPHEGPMCDLLWSDPDDRCGWGISPRGAGYTFGQDIAQQFNHTNGLTLISRAHQLVMEGFNWCQDKNVVTVFSAPNYCYRCGNMAAILEIGENMDQNFLQFDPAPRQIEPDTTRKTPDYFL

SEQ ID NO: 89711 - DNA, 924 bp, Oryza sativa
  CDS (1)..(924)
atgatggacgggaacgcggtggacgagctgatacggcggctgctcgacgggaagaaggtcaagccgtcgtcgtcggcgaagaaggtgcagctcagcgaggcggagatccggcagctctgcgtcaccggcaaggacatcttcctctcccagcccaacctcctcgagctcgaggcccccatcaacgtctgcggcgacatccacggccaattctccgacctgctccggctgttcgagttcggcgggctgccgccgacggcgaactacctgttcctcggcgactacgtggaccgcgggaagcagagcatcgagacgatctgcctcctgctggcatacaagatcaagtacccggacaacttcttcctgctgcgaggcaaccacgagtgcgcgtcgatcaaccgaatctacgggttctacgacgagtgcaagcgccggttcagcgtccgcctctggaagctcttcaccgactgcttcaactgcctccccgtcgccgccgtcatcgacgacaagatcctctgcatgcacggcggcctctcgccggacctcgacagcctcgaccggatcagggagatcgcccgacccgtcgacgtccccgaccagggcctcctctgcgacctcctctggtccgaccccgaccgcgagagctccggctggggcgagaacgaccgcggcgtctccttcaccttcggcgccgacaaggtcaccgagttcctcaacaagcacgacctcgacctcatctgccgcgctcaccaggtggtggaggacggctacgagttcttcgcggacaggcagctggtgaccatattctcggcgccgaactactgcggcgagttcaacaacgccggcgcgctgatgaacgtggacgccagcctgctctgctcgttccagatcctcaagccgttcagaggcaagtcgcaggcggagtga

SEQ ID NO: 89712 - protein, 307 aa, Oryza sativa
MMDGNAVDELIRRLLDGKKVKPSSSAKKVQLSEAEIRQLCVTGKDIFLSQPNLLELEAPINVCGDIHGQFSDLLRLFEFGGLPPTANYLFLGDYVDRGKQSIETICLLLAYKIKYPDNFFLLRGNHECASINRIYGFYDECKRRFSVRLWKLFTDCFNCLPVAAVIDDKILCMHGGLSPDLDSLDRIREIARPVDVPDQGLLCDLLWSDPDRESSGWGENDRGVSFTFGADKVTEFLNKHDLDLICRAHQVVEDGYEFFADRQLVTIFSAPNYCGEFNNAGALMNVDASLLCSFQILKPFRGKSQAE

SEQ ID NO: 89713 - DNA, 924 bp, Oryza sativa
  CDS (1)..(924)
atggggacgtcggatctggaccggcagatcgagcagctgaagcggtgcgagccgctgacggaggcggaggtcaaggcgctctgcctcaaggccatggagatcctcgtcgaggagagcaacgtccagcgcgtcgacgcccccgtcacgatatgtggagatattcatggacaattctatgacatgaaagaactattcaaagttgggggtgactgcccaaagacaaactacttgttccttggggattttgttgatcgaggattttattctgttgaaacatttttgcttctgttggccttaaaggttagatacccagatcgtataactttaatacgaggaaaccatgagagcagacagattacacaagtctatggtttctatgatgagtgtcttcgtaaatacggctcagtgaatgtctggagatattgcacagatatattcgactatttaagtttgtctgcactcattgagaacaaaatatttagtgtccatggaggcctttctcctaatattacaactcttgatcagataagagtaatagatcgcaagcaagaagtacctcatgatggggccatgtgtgaccttctttggtctgatccagaggatgctgtagatggttggggattaagtccacgaggtgcaggattcctatttggtggaaatgttgtttcttcttttaaccacacaaacaacatagactatatttgccgtgctcatcaactagtcatggaagggtttaagtggatgttcaataacaagattgtcactgtatggtctgctcctaactactgctacaggtgtggcaatgttgctgcaatcctagagcttgatgagaatttgaataagcagttccgtgtatttgaagctgccccacatgaatcaagaggtgttcctgcaaagaggccagcgccagattactttctgtga

SEQ ID NO: 89714 - protein, 307 aa, Oryza sativa
MGTSDLDRQIEQLKRCEPLTEAEVKALCLKAMEILVEESNVQRVDAPVTICGDIHGQFYDMKELFKVGGDCPKTNYLFLGDFVDRGFYSVETFLLLLALKVRYPDRITLIRGNHESRQITQVYGFYDECLRKYGSVNVWRYCTDIFDYLSLSALIENKIFSVHGGLSPNITTLDQIRVIDRKQEVPHDGAMCDLLWSDPEDAVDGWGLSPRGAGFLFGGNVVSSFNHTNNIDYICRAHQLVMEGFKWMFNNKIVTVWSAPNYCYRCGNVAAILELDENLNKQFRVFEAAPHESRGVPAKRPAPDYFL

SEQ ID NO: 89715 - DNA, 960 bp, Brassica napus
  CDS (1)..(960)
atgatgacgagcatggaagggatggtggagaaaggggtgttggatgatatcatcaggagattgttggaaggtagaggaggcaaacaggttcagctatcggagagcgagattcgtcaactctgcttcaacgcacgtcaaatcttcctctctcaacccaatctcctcgagctccatgcccctattcgcatctgcggtgatatccatggccagtatcaagatcttctgaggctattcgaatacggaggctaccctccttcagccaactttctcttcctcggcgactacgttgacagaggcaagcaaagtctcgagaccatttgtctccttctcgcttacaagattcgttacccatcaaagatttatctcttgagaggcaaccacgaggacgctaagatcaacaggatatacggattctacgacgagtgcaaacggagattcaacgtgcgcctctggaagatatttactgattgtttcaactgtttgcccgtagctgcactcatcgacgacaagatcttgtgtatgcacggtggcttgtcgccggagctggacaatttgaatcagattcgagagattcagaggcctacggagattccagacagtggtcttctttgtgatttgctttggtctgatcctgatcagaagattgaagggtgggctgatagtgatcgaggcatctcttgcacttttggagctgataaagtcgctgagtttttggataagaatgatcttgacctcatttgccgtggccatcaggtagtggaagatggttacgagttcttcgcaaaaaggagattagttacgatattctcagctccgaactatggtggagagtttgacaacgctggtgcattactgagtgtggacgagtctcttgtttgctctttcgagattatgaaaccagccacagcttctagcagcggacatcctctcaagaaggtgccgaaaatggggaagtcttag

SEQ ID NO: 89716 - protein, 319 aa, Brassica napus
MMTSMEGMVEKGVLDDIIRRLLEGRGGKQVQLSESEIRQLCFNARQIFLSQPNLLELHAPIRICGDIHGQYQDLLRLFEYGGYPPSANFLFLGDYVDRGKQSLETICLLLAYKIRYPSKIYLLRGNHEDAKINRIYGFYDECKRRFNVRLWKIFTDCFNCLPVAALIDDKILCMHGGLSPELDNLNQIREIQRPTEIPDSGLLCDLLWSDPDQKIEGWADSDRGISCTFGADKVAEFLDKNDLDLICRGHQVVEDGYEFFAKRRLVTIFSAPNYGGEFDNAGALLSVDESLVCSFEIMKPATASSSGHPLKKVPKMGKS

SEQ ID NO: 89717 - DNA, 921 bp, Brassica napus
  CDS (1)..(921)
atgccgccgaacggagatctagaccgtcagatctcccagctgatggagtgtaaaccgctatcagaggccgatgtgaagacgctctgcgatcaagcgagggccatccttgttgaggaatggaacgttcagcccgtgaaatgtcctgttactgtttgtggcgatatccacggccagttctatgaccttatcgagctctttcgaatcggtggtaatcctccggatacgaactacctcttcatgggagactatgtagaccgtggctactattcagtagaaacggtttctctattggtggcactgaaagtgcgatacagagataggattacaatcttgcgagggaatcacgagagtcggcagattactcaagtgtatggtttctatgatgaatgcttgaggaagtacggaaacgcaaatgtttggaagtttttcacagatcttttcgattatcttcctcttactgccctgatagagagtcaggttttctgcttgcatggagggctttcaccttctctggatacccttgataatatccgaagcttggatcgtatacaggaggttccacatgaaggaccaatgtgtgatttactatggtctgaccctgacgatcgatgtgggtggggaatatctccacgaggtgctggttatacatttggacaagacatcgcaactcagttcaatcacaacaatggactcagtctcatatcaagagctcatcagcttgtcatggaaggttttaactggtgtcaggacaagaatgttgtgacggtgtttagtgcaccaaactattgctaccggtgtggaaacatggcagctattctagagataggagagaacatggatcagaacttcctccagttcgatccagctcctcgtcaagtcgaaccagatactacccgcaagacccctgattattttttgtga

SEQ ID NO: 89718 - protein, 306 aa, Brassica napus
MPPNGDLDRQISQLMECKPLSEADVKTLCDQARAILVEEWNVQPVKCPVTVCGDIHGQFYDLIELFRIGGNPPDTNYLFMGDYVDRGYYSVETVSLLVALKVRYRDRITILRGNHESRQITQVYGFYDECLRKYGNANVWKFFTDLFDYLPLTALIESQVFCLHGGLSPSLDTLDNIRSLDRIQEVPHEGPMCDLLWSDPDDRCGWGISPRGAGYTFGQDIATQFNHNNGLSLISRAHQLVMEGFNWCQDKNVVTVFSAPNYCYRCGNMAAILEIGENMDQNFLQFDPAPRQVEPDTTRKTPDYFL

SEQ ID NO: 89719 - DNA, 936 bp, Brassica napus
  CDS (1)..(936)
atggcgcagcaagggggaagcatggaccctgccgttctagacgacatcattcgtcgtttgttggattacagaaacccaaagcctggaaccaaacaggtcatgctcaacgagtctgagatccgacagctttgcatcgtctccagagagattttccttcaacagcctaacctccttgagctcgaagctcccatcaagatctgcggtgatattcatggacagtactcagatctattgaggctatttgaatacggaggcttgcctcctgcagctaactatctattcttaggagactacgtggaccgtgggaagcagagcttagagaccatctgtcttctcctcgcctacaaaatcaaataccccgagaacttctttctcctaagaggaaaccacgagtgtgcttccatcaacagaatctacggtttctacgacgaatgcaaacgtaggttcagcgtcagactctggaaagtctttactgattctttcaactgcctcccagtggctgctgtaatagacgataagattctatgcatgcacggtggtctttctccagatttgaccagcgtggaacagattaagaacattaagcgacctacagatgttccggactctggtctgctttgtgatttgctttggtctgatccgagtaaagatgttaaaggctgggggatgaatgaccgtggagtgtcttacacgtttggacctgataaggttgctgagtttctgataaagaatgatatggatctcatctgtcgtgctcaccaggttgtagaggatggttatgagttctttgctgatagacagcttgtgactatattctcagcgcctaactactgtggtgaattcgacaatgcgggtgcgatgatgagtgttgatgagagtttgatgtgctctttccaaatactgaagcctgctgatcggaggccacggttcttatga

SEQ ID NO: 89720 - protein, 311 aa, Brassica napus
MAQQGGSMDPAVLDDIIRRLLDYRNPKPGTKQVMLNESEIRQLCIVSREIFLQQPNLLELEAPIKICGDIHGQYSDLLRLFEYGGLPPAANYLFLGDYVDRGKQSLETICLLLAYKIKYPENFFLLRGNHECASINRIYGFYDECKRRFSVRLWKVFTDSFNCLPVAAVIDDKILCMHGGLSPDLTSVEQIKNIKRPTDVPDSGLLCDLLWSDPSKDVKGWGMNDRGVSYTFGPDKVAEFLIKNDMDLICRAHQVVEDGYEFFADRQLVTIFSAPNYCGEFDNAGAMMSVDESLMCSFQILKPADRRPRFL

SEQ ID NO: 89721 - DNA, 942 bp, Brassica napus
  CDS (1)..(942)
atgggagtggattcgataccaacagacgcaacgattgatctagatgagcagatctcgcagctcatgcagtgcaagcccctctccgagcaacaggttagatcgttatgcgagaaagccaaggagatcttaatggatgaaagcaacgttcagcctgtgaaaagccctgtgacaatctgcggtgatattcatggacagttccatgatcttgctgagcttttccgtattgggggaatgtgtcctgacaccaactacttgtttatgggagattacgttgatcgtggttattattctgttgaaactgttacgctgttagtcgccttaaagatgcgttatcctcagcgaatcaccattcttagaggaaaccatgaaagtcgtcagatcactcaggtctatggattttacgatgagtgtctgcgaaagtatggcaacgcaaatgtttggaaaatctttacagacctcttcgactattttccattgacagccttggttgagtccgaaatattctgccttcatggtggattgtctccatctatcgagacccttgacaacataaggaactttgatcgagttcaagaagtgccccatgaagggccaatgtgtgacttattatggtctgatcctgatgaccgctgtggttggggcatctctccacgtggtgctggatatacatttggtcaggacatatccgaacagttcaaccactcaaacggcttgaacctgatcgcaagagcccatcagcttgttatggatggatacaactgggctcatgagcaaaaggtggtaactatcttcagtgcaccaaactattgttaccgttgtgggaacatggcgtcgattcttgaggttgatgactgcatgaaccacagtttcattcagtttgaaccagcgccgagaagaggagaaccagacgttactcgaagaacaccagactacttcctctga

SEQ ID NO: 89722 - protein, 313 aa, Brassica napus
MGVDSIPTDATIDLDEQISQLMQCKPLSEQQVRSLCEKAKEILMDESNVQPVKSPVTICGDIHGQFHDLAELFRIGGMCPDTNYLFMGDYVDRGYYSVETVTLLVALKMRYPQRITILRGNHESRQITQVYGFYDECLRKYGNANVWKIFTDLFDYFPLTALVESEIFCLHGGLSPSIETLDNIRNFDRVQEVPHEGPMCDLLWSDPDDRCGWGISPRGAGYTFGQDISEQFNHSNGLNLIARAHQLVMDGYNWAHEQKVVTIFSAPNYCYRCGNMASILEVDDCMNHSFIQFEPAPRRGEPDVTRRTPDYFL

SEQ ID NO: 89723 - DNA, 921 bp, Brassica napus
  CDS (1)..(921)
atgccggagacgggagacatcgatcgtcagatcgagcagctgatggagtgcaaagcgttgtccgaggcggaggtgaagacgttatgcgagcaagcgaaggcgattctggtggaggagtggaatgttcaaccggttaagtgtccggttacggtttgcggcgacatccacggtcaattctacgatctgattgagctttttaagatcggtggctcttctcctgacaccaattatcttttcatgggcgattatgtagatcgagggtattactccgtggagacagtctcgcttttggtagctctgaaagttcgatacagagatagacttacaatccttagagggaaccacgaaagccggcaaattactcaagtgtatggattctatgatgaatgcttgaggaaatatggaaacgctaatgtgtggaagcacttcactgacctttttgattaccttcctcttacagctctcattgagagtcaggttttctgtttacatggaggactttcaccttctttagatacacttgacaatatcagatctctagatcgaatacaagaggttccacatgaaggaccaatgtgtgatctgttatggtccgatccagatgatcgatgcggttggggaatatctcctcgtggcgcaggctacactttcggaacagacatcgctactcagtttaaccacaccaatgggctcagtctgatatcaagagcacaccaacttgtcatggaaggttttaattggtgccaagataagaacgttgtcactgtgttcagtgccccaaactattgctaccgatgcggcaacatggctgcgattctagagataggcgagaacatggaccagaacttccttcagttcgatccagctccacgtcaagtcgaacctgagactacacgtaagactccagattactttttgtaa

SEQ ID NO: 89724 - protein, 306 aa, Brassica napus
MPETGDIDRQIEQLMECKALSEAEVKTLCEQAKAILVEEWNVQPVKCPVTVCGDIHGQFYDLIELFKIGGSSPDTNYLFMGDYVDRGYYSVETVSLLVALKVRYRDRLTILRGNHESRQITQVYGFYDECLRKYGNANVWKHFTDLFDYLPLTALIESQVFCLHGGLSPSLDTLDNIRSLDRIQEVPHEGPMCDLLWSDPDDRCGWGISPRGAGYTFGTDIATQFNHTNGLSLISRAHQLVMEGFNWCQDKNVVTVFSAPNYCYRCGNMAAILEIGENMDQNFLQFDPAPRQVEPETTRKTPDYFL

SEQ ID NO: 89725 - DNA, 951 bp, Glycine max
  CDS (1)..(951)
atgagcacacaggggcaagtgattattgatgaggcggttctggatgacataatccggcgcttaacggaggtccgactggcccgacccggcaagcaggttcagctctccgagtctgagatcaagcaactctgcgtcgcttccagagacatcttcattaaccagcccaatttgcttgaactcgaagcccccatcaagatttgtggtgacattcatgggcagtacagtgatttgttaaggctatttgagtatgggggtttgcctcctactgcgaattatctctttttgggggactacgtggaccgtgggaagcagagcttagaaaccatatgtcttttgcttgcgtataaaatcaaatatccagaaaactttttcctgttaagggggaatcatgagtgtgcttccattaataggatttatgggttttatgatgaatgtaagcgaaggtttaacgtgaggctttggaaagcctttaccgactgttttaacttccttcctgtggcagcccttatagatgataaaatattgtgcatgcatggtggtctttcccctgaactcacaaacttggatgaaatcaggaatctacctcgtcctactgcgattcccgacaccggcttgctttgtgatttgctttggtctgatcctggtagggatgtgaagggttggggtatgaatgacagaggagtgtcctacacctttggccctgataaggtcgctgagttcttgacaaagcatgacttggacctcatttgtcgtgctcatcaggttgtagaggatgggtatgaattctttgctgataggcaacttgttacgatattttcagctccaaactattgtggtgaatttgacaatgctggtgcgatgatgagtgtggacgaaaacttgatgtgctcatttcagattcttaagcctgcagagaaaaaatcaaagtttgtgatgtcaaacaagatgtga

SEQ ID NO: 89726 - protein, 316 aa, Glycine max
MSTQGQVIIDEAVLDDIIRRLTEVRLARPGKQVQLSESEIKQLCVASRDIFINQPNLLELEAPIKICGDIHGQYSDLLRLFEYGGLPPTANYLFLGDYVDRGKQSLETICLLLAYKIKYPENFFLLRGNHECASINRIYGFYDECKRRFNVRLWKAFTDCFNFLPVAALIDDKILCMHGGLSPELTNLDEIRNLPRPTAIPDTGLLCDLLWSDPGRDVKGWGMNDRGVSYTFGPDKVAEFLTKHDLDLICRAHQVVEDGYEFFADRQLVTIFSAPNYCGEFDNAGAMMSVDENLMCSFQILKPAEKKSKFVMSNKM

SEQ ID NO: 89727 - DNA, 912 bp, Brassica napus
  CDS (1)..(912)
atggatttagatcagtggatatccaaggtcaaagacggccaacatctctccgaagacgagcttcacctcctctgcgaatacgtgaaagagattctgattgaggaatcaaatgtacaacctgtcaacagtcctgtcaccgtctgtggtgatatccatggccagtttcacgaccttatgaagcttttccagaccggtggtcatgttcccgacactaactacatttttatgggagatttcgttgatagaggttacaacagtcttgaagttttcactattcttttgcttcttaaagcaagatatccagcccatatcacacttttgcgtggcaatcatgaaagcagacagcttactcaggtctatggtttctatgacgaatgccaaaggaagtacggtaatgctaatgcttggagatattgcacggatgtgtttgactatcttactctttccgctattgtagatggcactgttctatgtgttcatggtggcctttcacctgatgtacggacgattgaccagataagattgattgaccggaattgcgaaatcccgcatgaaggaccattctgtgatcttatgtggagcgatcctgaagatattgaaacatgggctgttagtccacgtggcgctggttggcttttcgggtccagggttaccactgagtttaaccatataaacaatcttgaactagtatgtcgcgcacatcagcttgtacaagaaggtctcaagtacatgttccaagacaaaggccttgtaactgtgtggtctgcacctaactactgctaccgctgtgggaatgtggcttctatgttgagtttcaacgacaacatggaaagggacgtgaagttcttcacggagacagaagagaacaatcaaatgagagggccaagaacaggtgttccttacttcctgtga

SEQ ID NO: 89728 - protein, 303 aa, Brassica napus
MDLDQWISKVKDGQHLSEDELHLLCEYVKEILIEESNVQPVNSPVTVCGDIHGQFHDLMKLFQTGGHVPDTNYIFMGDFVDRGYNSLEVFTILLLLKARYPAHITLLRGNHESRQLTQVYGFYDECQRKYGNANAWRYCTDVFDYLTLSAIVDGTVLCVHGGLSPDVRTIDQIRLIDRNCEIPHEGPFCDLMWSDPEDIETWAVSPRGAGWLFGSRVTTEFNHINNLELVCRAHQLVQEGLKYMFQDKGLVTVWSAPNYCYRCGNVASMLSFNDNMERDVKFFTETEENNQMRGPRTGVPYFL

SEQ ID NO: 89729 - DNA, 912 bp, Brassica napus
  CDS (1)..(912)
atggatttggatcaatggatttcgaaggttaaagacggtcagcatctctccgaggacgagctccagcttctctgcgaatacgtgaaagaaattctgattgaggagtcgaacgttcagcctgtcaacagtccagtcaccgtctgtggtgacatccatggccagtttcatgatctcatgaagctttttcagactggaggtcatgttcccgacaccaactacatatttatgggggactttgtcgatagaggttacaacagccttgaagtcttcactattcttctgcttcttaaagctagacatccagccaatattacacttctgcgtggaaatcatgaaagtaggcagcttacgcaggtatatggtttctatgacgaatgccaaaggaagtatggtaacgccaatgcgtggcgctattgcacagatgtttttgactatcttaccttatcagctattatagatggcacagttctatgtgttcatggcggcctttctccggatgttcggacaattgatcagataagactggtagatcgaaactgtgaaattccccatgaagggcccttttgcgatcttatgtggagcgatcctgaagacattgaaacatgggctgttagtccacgtggagctggttggcttttcggatcgagggttaccactgagtttaaccatatcaacaagcttgatctagtatgccgtgcacaccagctggtacaagaaggtcttaagtacatgttccaagataaaggccttgtaactgtatggtctgcgcctaattactgctatcgctgtgggaatgtagcttctatattgagtttcgatgacaacatggaaaaatcagtgaagtacttcacagagacagaagagaacaatcaaatgagagggccaaggactggagttccatatttcctatga

SEQ ID NO: 89730 - protein, 303 aa, Brassica napus
MDLDQWISKVKDGQHLSEDELQLLCEYVKEILIEESNVQPVNSPVTVCGDIHGQFHDLMKLFQTGGHVPDTNYIFMGDFVDRGYNSLEVFTILLLLKARHPANITLLRGNHESRQLTQVYGFYDECQRKYGNANAWRYCTDVFDYLTLSAIIDGTVLCVHGGLSPDVRTIDQIRLVDRNCEIPHEGPFCDLMWSDPEDIETWAVSPRGAGWLFGSRVTTEFNHINKLDLVCRAHQLVQEGLKYMFQDKGLVTVWSAPNYCYRCGNVASILSFDDNMEKSVKYFTETEENNQMRGPRTGVPYFL

SEQ ID NO: 89731 - DNA, 966 bp, Glycine max
  CDS (1)..(966)
atggacgagaacctgctcgacgatattatccggaggctcgtcgcggcgaagaacggtagaacgacgaagcaggtgcagcttacggaggcagaaattcgacaactctgtgtttcctccaaagagatctttctcagtcaacctaatcttctcgaactcgaggctcctattaagatttgtggagatgttcatggccaatactcagatcttttaaggttgttcgaatatgggggatacccacctgaagcaaattatttatttctcggagattatgttgatcgtggtaagcagagcatagagacaatatgtttactcctcgcctacaagatcaaatacaaggagaatttctttcttctcaggggcaaccatgagtgtgcatccatcaatcgtatatatggtttctatgatgagtgtaagaggaggtttaatgttcgcctctggaagacatttactgattgctttaattgccttcctgtcgctgctctgatagatgagaagatcctttgcatgcatggtggactatcgcctgatcttaaacacttggatcagattcgaagtattgctcgtcctattgatgtgccagatcatggccttctatgtgaccttctatgggctgatcctgataaagatcttgatgggtggggagaaaatgaccgaggtgtatcatttacatttggggctgacaccgttgttgaatttcttgaacatcatgatctcgatctgatttgcagagctcaccaggttgtagaggatggatatgagttttttgccaagcgtcagctggtgacgatattctccgcaccaaattactgtggtgaatttgataatgctggtgctatgatgagtgtggatgacaccttgacatgctctttccaaatacttaaatcttctgaaaagaaagggaaaggtggatttggcatcaacacatcaagaccaggaactccaccccataagggtgggaagaattaa

SEQ ID NO: 89732 - protein, 321 aa, Glycine max
MDENLLDDIIRRLVAAKNGRTTKQVQLTEAEIRQLCVSSKEIFLSQPNLLELEAPIKICGDVHGQYSDLLRLFEYGGYPPEANYLFLGDYVDRGKQSIETICLLLAYKIKYKENFFLLRGNHECASINRIYGFYDECKRRFNVRLWKTFTDCFNCLPVAALIDEKILCMHGGLSPDLKHLDQIRSIARPIDVPDHGLLCDLLWADPDKDLDGWGENDRGVSFTFGADTVVEFLEHHDLDLICRAHQVVEDGYEFFAKRQLVTIFSAPNYCGEFDNAGAMMSVDDTLTCSFQILKSSEKKGKGGFGINTSRPGTPPHKGGKN

SEQ ID NO: 89733 - DNA, 912 bp, Glycine max
  CDS (1)..(912)
atggatctggaccagtggatctccaaggtcaaagatggccagcatcttcttgaagacgagcttcaacttctctgcgaatttgtaaaagagatccttattgaggagtccaatgtgcagcctgtcaatagtccagtgactgtttgtggtgatattcatggtcaattccatgatctaatgaaacttttccagactgggggtcatgtgcccgagacaaattatatttttatgggagactttgttgatcgaggttacaatagtcttgaagttttcaccatccttttacttcttaaagctagatacccagctaatattacccttttacgtggaaatcatgaaagcaggcaattaactcaggtctatggattttatgatgaatgccagaggaagtatggcaatgccaatgcttggcgctattgtacagatgtgtttgactatctaacactttctgcaattattgatggaactgtgctttgtgttcatggtggcctttctcctgacattcgaacaattgatcagataagggtcattgatcgaaactgtgaaattcctcatgagggtcctttctgtgatcttatgtggagtgatcctgaagatattgaaacatgggcagtcagtccccgaggagcaggttggctttttggatccagggtcacttcggagttcaatcacataaataaccttgatcttgtttgtcgagcacaccaactcgttcaggaaggccttaagtatatgttccaagataaaggccttgtaactgtatggtctgcacctaattactgttaccgatgtggaaatgtagcttctattctgagtttcaatgaaaatatggaaagagaagttaaatttttcaccgaaacagaggagaacaatcagatgagaggacccaggacaggcgttccatatttcttataa

SEQ ID NO: 89734 - protein, 303 aa, Glycine max
MDLDQWISKVKDGQHLLEDELQLLCEFVKEILIEESNVQPVNSPVTVCGDIHGQFHDLMKLFQTGGHVPETNYIFMGDFVDRGYNSLEVFTILLLLKARYPANITLLRGNHESRQLTQVYGFYDECQRKYGNANAWRYCTDVFDYLTLSAIIDGTVLCVHGGLSPDIRTIDQIRVIDRNCEIPHEGPFCDLMWSDPEDIETWAVSPRGAGWLFGSRVTSEFNHINNLDLVCRAHQLVQEGLKYMFQDKGLVTVWSAPNYCYRCGNVASILSFNENMEREVKFFTETEENNQMRGPRTGVPYFL

SEQ ID NO: 89735 - DNA, 960 bp, Brassica napus
  CDS (1)..(960)
atggacgagaatttgctggacgatataatacggcggctgttggagactaacaacgggaagcaggtgaagctactcgaggctgagatacgccagctctgctctgcttccaaagaggtttttctcagccagcctaatctcctcgagctcgaggctcctatcaagatttgcggtgatgttcatggtcagtttccagacctcttgcggttgtttgagtacggcggctaccctccagctgcaaattacttgttcctcggagactacgttgatcgtggtaagcggagcatagagaccatatgccttctccttgcctacaagctcaaatacaagctcaacttctttctcctcagaggcaatcacgaatgcgcttctatcaaccgtgtttacggcttctacgatgagtgcaagagaagatacaacgtgcgcctgtggaagagtttcaccgactgtttcaactgcctccccgttgctgctctcatcgacgacaagatcctctgtatgcacggtggactttctcctgatctcaagaccttggatgatatcaggcggattcctcgtcctgttgatgttcctgatcagggcgtcctttgtgatttgttatgggctgatcctgacaaagaaatccaaggctggggggagaatgacagaggtgtgtcttatacatttggtcccgacaaagtggctgagttccttcagactcatgaccttgatcttgtttgccgagctcatcaggttgtagaagatggatatgagttctttgcaaagagacaactggtgacaatattctctgcacccaactactgtggtgagtttgacaatgctggcgcaatgatgagtgttgatgatagtttgacatgttctttccaaatcctcaagtcaactgagaagaaaggaagatttggatacaacaacaacgttcataggccaggaaccccacctcataaggggggaaaaggtggttga

SEQ ID NO: 89736 - protein, 319 aa, Brassica napus
MDENLLDDIIRRLLETNNGKQVKLLEAEIRQLCSASKEVFLSQPNLLELEAPIKICGDVHGQFPDLLRLFEYGGYPPAANYLFLGDYVDRGKRSIETICLLLAYKLKYKLNFFLLRGNHECASINRVYGFYDECKRRYNVRLWKSFTDCFNCLPVAALIDDKILCMHGGLSPDLKTLDDIRRIPRPVDVPDQGVLCDLLWADPDKEIQGWGENDRGVSYTFGPDKVAEFLQTHDLDLVCRAHQVVEDGYEFFAKRQLVTIFSAPNYCGEFDNAGAMMSVDDSLTCSFQILKSTEKKGRFGYNNNVHRPGTPPHKGGKGG

SEQ ID NO: 89737 - DNA, 921 bp, Brassica napus
  CDS (1)..(921)
atggcgtcaaacggggatccggaccgtcagatcgagcagctgatggagtgtaagccgttggctgaaggggacgtgaagatcctctgcgatcaagccaaggccattctcgttgaggaatggaatgttcaaccggttaagtgtccggttaccgtatgcggcgatatccacggccagttctatgacctaatcgagctcttccgtattggtggtaacccgcctgatactaattacctcttcatgggtgattacgtagatcgtggctactactcagttgaaacagtctccctattggtggcactgaaggtgcgttacagagacagactcacgatcctgcgcggtaatcatgagagtcgtcaaattacacaagtatatggtttttatgacgagtgcttgaggaaatacggcaatgcaaacgtgtggaagcattttacggacctctttgattacctacctcttacagcacttattgagagtcaggttttctgtttacatggagggccttcaccttctctggatacccttgacaatatccgaagcttggatcgcatacaggaggttccacacgaaggaccaatgtgcgatttactctggtctgatccagacgaccgttgtggttggggaatatctccccgtggtgctggttacacatttggacaggacattgcaactcagttcaatcataataatggactgagtttgatatcaagagcgcatcaacttgtaatggaaggctttaattggtgtcaggagaagaacgtagtgacggtgtttagtgcaccaaactactgttacagatgtggaaacatggcagcaatacttgagattggagagaagatggagcagaacttccttcagttcgatccagcaccgagacaggtcgaacctgataccactcgcaagactcctgattattttttgtga

SEQ ID NO: 89738 - protein, 306 aa, Brassica napus
MASNGDPDRQIEQLMECKPLAEGDVKILCDQAKAILVEEWNVQPVKCPVTVCGDIHGQFYDLIELFRIGGNPPDTNYLFMGDYVDRGYYSVETVSLLVALKVRYRDRLTILRGNHESRQITQVYGFYDECLRKYGNANVWKHFTDLFDYLPLTALIESQVFCLHGGPSPSLDTLDNIRSLDRIQEVPHEGPMCDLLWSDPDDRCGWGISPRGAGYTFGQDIATQFNHNNGLSLISRAHQLVMEGFNWCQEKNVVTVFSAPNYCYRCGNMAAILEIGEKMEQNFLQFDPAPRQVEPDTTRKTPDYFL

SEQ ID NO: 89739 - DNA, 942 bp, Triticum aestivum
  CDS (1)..(942)
atggagcccatgagcgtggacagcagcggctgcggcggcctggacgcgcagatcgagcagctcttgcagtgccgcccgctcgccgagcaagaggttaaagcactatgcgagaaggctaaggagatattgatggaggaaagcaatgtgcagccagtcaaaagcccagtgacaatctgtggtgatattcacggacaattccatgatcttgttgagcttttccggattggcgggaagtgtccagatactaattatttgtttatgggggattacgtggatcgtggatactactctgttgagactgtttctctcttggtagcactgaaggttcgccacccacatcggattacaatcctccgcggaaaccatgagagtcggcagatcacacaagtatatggattctacgatgaatgcctacgaaagtacggcaatgcaaatgtatggaagatattcacagatctttttgattatttcccattaacagccctggtggaatctgaaattttctgcctgcatggtggtttatctccatcgattgagaatcttgatagtgtgcgtagcttggatcgtgtccaagaggttccacatgagggtcctatgtgtgatcttttatggtctgatccggacgatcgatgtggttggggcatttctcctcgtggtgcaggctacacttttgggcaggacatatctgagcagttcaatcacaccaacaatctcaaacttgttgctcgggctcatcagttagttatggagggatataactgggctcatgaacaaaaagttgttaccatattcagtgctccaaactattgttaccgatgtggcaacatggcatccattttggaagttgatgactgcaacgctcacacctttattcagtttgagccagcccctcggagaggtgagccagatgtgacaaggagaacacctgattatttcctttga

SEQ ID NO: 89740 - protein, 313 aa, Triticum aestivum
MEPMSVDSSGCGGLDAQIEQLLQCRPLAEQEVKALCEKAKEILMEESNVQPVKSPVTICGDIHGQFHDLVELFRIGGKCPDTNYLFMGDYVDRGYYSVETVSLLVALKVRHPHRITILRGNHESRQITQVYGFYDECLRKYGNANVWKIFTDLFDYFPLTALVESEIFCLHGGLSPSIENLDSVRSLDRVQEVPHEGPMCDLLWSDPDDRCGWGISPRGAGYTFGQDISEQFNHTNNLKLVARAHQLVMEGYNWAHEQKVVTIFSAPNYCYRCGNMASILEVDDCNAHTFIQFEPAPRRGEPDVTRRTPDYFL

SEQ ID NO: 89741 - DNA, 921 bp, Triticum aestivum
  CDS (1)..(921)
atgccgccgcacggggatctggaccggcagatcgcgcacctgcgcgagtgcaagcacctcccggaggcggaggtcaaggggctctgcgagcaggccaaggccatcctcatggaggagtggaacgtgcagcccgtccgctgccccgtcaccgtctgcggcgacatccacggccagttctacgacctcatcgagctcttccgcatcggcggcgagtcgcccgacaccaactacctcttcatgggcgactacgtcgatcgtggctactattcggtggagactgtttcactgttagtggctttgaaagttcgctacagagacagaattacgatattgagaggaaatcatgagagcagacaaatcacccaagtatatggcttctatgacgagtgcttgcgaaaatatgggaatgcaaatgtatggaagtactttacagacctgtttgattatttgcctctcacggctcttatagaaaaccaggtgttctgccttcatggtggtctctctccatcattagatacattagataacattcgtgctcttgatcgcatacaagaggttcctcatgaagggcccatgtgtgatctgttgtggtctgatccagatgatcgatgtggatgggggatttcaccaagaggagctggttatacatttgggcaagatattgcgcaacagttcaaccatacaaatggcctctctcttatatcaagggcccatcaacttgtaatggaagggttcaattggtgccaggataagaatgttgtaacggtcttcagtgcaccaaactactgttaccgatgtggtaacatggccgcgattcttgagattggggaaaacatggatcataacttcctccagtttgatccagcgcctcggcaaatcgagcctgacacaacacgcaagacccccgactactttttgtaa

SEQ ID NO: 89742 - protein, 306 aa, Triticum aestivum
MPPHGDLDRQIAHLRECKHLPEAEVKGLCEQAKAILMEEWNVQPVRCPVTVCGDIHGQFYDLIELFRIGGESPDTNYLFMGDYVDRGYYSVETVSLLVALKVRYRDRITILRGNHESRQITQVYGFYDECLRKYGNANVWKYFTDLFDYLPLTALIENQVFCLHGGLSPSLDTLDNIRALDRIQEVPHEGPMCDLLWSDPDDRCGWGISPRGAGYTFGQDIAQQFNHTNGLSLISRAHQLVMEGFNWCQDKNVVTVFSAPNYCYRCGNMAAILEIGENMDHNFLQFDPAPRQIEPDTTRKTPDYFL

SEQ ID NO: 89743 - DNA, 912 bp, Linum usitatissimum
  CDS (1)..(912)
atggatttggatcagtggattgcaaaggtgaaggaagggcagcatctcctggaagacgagctccagctcctgtgcgaatatgtaaaagagatcctaatcgaggaatccaatgtccagcctgttaacagtcctgtgactgtttgtggagatatacatggtcagtttcatgatctaatgaaacttttccagaccggaggtcatgttccagagactaattatatatttatgggggactttgtggaccgaggttataatagtcttgaagttttctctatacttttacttcttaaagcgaggtatccagctcatattacgcttttgcgtgggaatcatgagagccgtcagctaactcaggtttatggtttctatgacgagtgccaacggaagtatgggaataccaatgcatggcgctactgtacagatgttttcgattatctaacgctttcagctattatagatggcactgtgctttgtgttcacggtggtctttctcctgatgttcgaacaattgatcagataagagtaattgatcggaactgtgaaattcctcatgaaggaccattctgtgatcttatgtggagtgatccggaagagatagagacatgggcggttagccccagaggagcaggttggctttttggatcaagggtcacttctgagtttaaccacattaacaacctcgacctggtttgtcgggcgcaccaacttgtacaagaaggcctcaagtacatgtttcaagataaaggtttagtaactgtgtggtctgcaccgaactactgttaccgatgtggtaatgtggcttctatcctaagcttcaatgagaatatggagagagaagtgaagttcttcaccgaaacggaggagaacaatcagatgagaggaccaaggactggagttccttatttcttatga

SEQ ID NO: 89744 - protein, 303 aa, Linum usitatissimum
MDLDQWIAKVKEGQHLLEDELQLLCEYVKEILIEESNVQPVNSPVTVCGDIHGQFHDLMKLFQTGGHVPETNYIFMGDFVDRGYNSLEVFSILLLLKARYPAHITLLRGNHESRQLTQVYGFYDECQRKYGNTNAWRYCTDVFDYLTLSAIIDGTVLCVHGGLSPDVRTIDQIRVIDRNCEIPHEGPFCDLMWSDPEEIETWAVSPRGAGWLFGSRVTSEFNHINNLDLVCRAHQLVQEGLKYMFQDKGLVTVWSAPNYCYRCGNVASILSFNENMEREVKFFTETEENNQMRGPRTGVPYFL

SEQ ID NO: 89745 - DNA, 954 bp, Linum usitatissimum
  CDS (1)..(954)
atggcatcacaaggacagacggcggctatggaccttgccgtcctcgacgacataatcaaacggttgacggaggtccgatcagccaggcccggaaagcaggtacagctctccgagtctgagatcaagcagctatgtgctgcctctcgtgatgtcttccttcaccagcccaacttgctcgagctcgaggctcccatcaaaatttgcggcgacattcatgggcaatacagcgacttgttgaggctttttgagtatggaggttttccaccggaggccaactatttattcctaggagactatgttgatcgtggtaaacagagcttggagaccatatgtctattacttgcctacaagattaagtatcctgagaacttcttccttctgcgaggaaaccatgaatgtgcttctataaaccgcatttatggattctatgatgagtgcaagaggcggttcaatgtgaggctttggaaatctttcactgactcttttaattgccttcctgtcgctgctctcatagatgacaaaatattatgcatgcatggtggtctttcccctgatttgacacatttagatcaaatcagaaacttgcctcgccccaccgctattcccgacactggtttgctgtgcgatctgctttggtcagatccgggtagagacgtcaagggttggggaatgaatgacagaggagtttcatatacctttggccctgataaagtgtctgaagtcttgaacaagcatgacttagaccttgtctgtcgtgctcatcaggttgtggaggatggatatgagttttttgctgataggcaactggtcaccatattctcagctcccaattactgtggtgaattcgataatgccggtgctatgatgagtgttgatgaaaacctgatgtgctcctttcaaattctgaagccagcggagaaaaaggccaagttcatgatgtcaaacaaaatttga

SEQ ID NO: 89746 - protein, 317 aa, Linum usitatissimum
MASQGQTAAMDLAVLDDIIKRLTEVRSARPGKQVQLSESEIKQLCAASRDVFLHQPNLLELEAPIKICGDIHGQYSDLLRLFEYGGFPPEANYLFLGDYVDRGKQSLETICLLLAYKIKYPENFFLLRGNHECASINRIYGFYDECKRRFNVRLWKSFTDSFNCLPVAALIDDKILCMHGGLSPDLTHLDQIRNLPRPTAIPDTGLLCDLLWSDPGRDVKGWGMNDRGVSYTFGPDKVSEVLNKHDLDLVCRAHQVVEDGYEFFADRQLVTIFSAPNYCGEFDNAGAMMSVDENLMCSFQILKPAEKKAKFMMSNKI

SEQ ID NO: 89747 - DNA, 912 bp, Linum usitatissimum
  CDS (1)..(912)
atggatttggatcagtggatttcgaaggtgaaggaagggcagcacctcctggaagacgagctccaacttctatgcgaatatgtaaaagacattctaattgaggaatccaatgttcagcctgtcaacagtcctgtgactgtttgtggggatattcatggtcagtttcatgatctaatgaagcttttccaaaccggaggtcatgttccggagacaaattacatatttatgggggattttgtggaccgtggttacaatagccttgaagttttcactattcttttactgcttaaagccaggtaccctgctaatatcacacttttgcgtgggaatcatgagagcagacaactaactcaggtttatggtttctacgacgaatgccagaggaagtatgggaatgctaatgcatggcgttattgtacagatgtttttgattaccttacactgtcagctattatagatggcacagtgctttgtgtccatggtggtctttctccagatgtccggactattgatcagataagagtaattgaacggaactgtgaaattccacacgaaggaccattttgtgatcttatgtggagtgatcctgaagacatagaaacatgggcagttagtcccagaggagcaggatggctttttggatcaagggttacctctgagtataaccacattaacaatcttgacttggtttgtcgggcgcatcaacttgtacaagaagggctcaagtacatgtttcaagataagggcttagtaactgtgtggtctgcaccaaactactgttaccgatgtgggaatgtggcatccatcctgagcttcaatgagaacatggagagagaagtaaagttcttcactgaaacggaggagaacaatcagatgagaggaccaagaacaggagtgccctatttcctatga

SEQ ID NO: 89748 - protein, 303 aa, Linum usitatissimum
MDLDQWISKVKEGQHLLEDELQLLCEYVKDILIEESNVQPVNSPVTVCGDIHGQFHDLMKLFQTGGHVPETNYIFMGDFVDRGYNSLEVFTILLLLKARYPANITLLRGNHESRQLTQVYGFYDECQRKYGNANAWRYCTDVFDYLTLSAIIDGTVLCVHGGLSPDVRTIDQIRVIERNCEIPHEGPFCDLMWSDPEDIETWAVSPRGAGWLFGSRVTSEYNHINNLDLVCRAHQLVQEGLKYMFQDKGLVTVWSAPNYCYRCGNVASILSFNENMEREVKFFTETEENNQMRGPRTGVPYFL

SEQ ID NO: 89749 - DNA, 921 bp, Linum usitatissimum
  CDS (1)..(921)
atgccgtcccacgccgatctggaccgtcagatcgagcacttgatgcagtgcaagccgctgtctgaggccgaagtgaaggccctctgcgagcaggccagggctgtcctcgttgaggaatggaacgtccagccggtcaagtgtccggtgacggtttgcggcgacatccacggccagtttcacgatcttgtcgagctcttccgaatcggcgggaacgctcctgacacgaactacctcttcatgggcgactatgtagatcgagggtattattcggtggaaacggtcacccttctagtcgccttgaaagtaagatatagagataggatcacaattctgagaggaaatcatgaaagccgtcaaataactcaagtgtatggattctatgatgagtgcttgagaaaatatggaaatgccaatgtgtggaaacattttactgatctctttgattatctaccacttacagctctgattgagagtcaggtcttctgcttacatggtggactttccccttcactagacacgctagaaaacattcgctcccttgatcgtatccaagaggttccacacgagggtcctatgtgtgacctcctatggtcggacccagatgaccgttgcgggtgggggatctctcctcgtggagctggctacacctttgggcaggacatatctcaacagttcaaccacacgaatggcctttctctcatatccagagctcaccagctggtcatggaaggttacaattgggctcaggacaagaacgtagttacagtcttcagcgccccgaactactgctaccggtgtgggaacatggcagccattctcgagatcggagagaacatggagcagaacttcctgcagttcgacccagctcctcgccagattgaacctgagacgactcgcagaacacccgattattttttgtga

SEQ ID NO: 89750 - protein, 306 aa, Linum usitatissimum
MPSHADLDRQIEHLMQCKPLSEAEVKALCEQARAVLVEEWNVQPVKCPVTVCGDIHGQFHDLVELFRIGGNAPDTNYLFMGDYVDRGYYSVETVTLLVALKVRYRDRITILRGNHESRQITQVYGFYDECLRKYGNANVWKHFTDLFDYLPLTALIESQVFCLHGGLSPSLDTLENIRSLDRIQEVPHEGPMCDLLWSDPDDRCGWGISPRGAGYTFGQDISQQFNHTNGLSLISRAHQLVMEGYNWAQDKNVVTVFSAPNYCYRCGNMAAILEIGENMEQNFLQFDPAPRQIEPETTRRTPDYFL

SEQ ID NO: 89751 - DNA, 918 bp, Linum usitatissimum
  CDS (1)..(918)
atgtcagacctagataggcagattgagcagcttaagaagtgcgagcctttgaaagaatcggaagtcaaggctctgtgcttgaaagctatggagattctcgtcgaagagagcaacgttcagcgcgtggacgcccctgtcactatatgtggagacattcatggacagttctatgacctgaaggagcttttcaaagtaggaggagattgcccaaaaactaattacttatttcttggagattttgttgatagaggattctactcggttgagacatttttgcttctgcttgcccttaaggtgcgatatccagatagaataactctcatcagaggaaatcatgagagccgtcagataacacaggtgtatggtttctatgatgagtgcctacgaaaatacggctctgttaatgtttggagatattgcactgacatatttgattacctaagtttgtcagccctcattgagaacaaagttttcagtgtccacggtggcctttctcctgcgatatcaaccttggatcagatccgaaccattgatcgaaagcaagaagtgcctcatgatggtgccatgtgtgacctaatgtggtcagatcctgaagatattgtggatggttggggtttgagcccacgtggtgcagggttcctgtttggtggcagcgtggttagttctttcaaccactcaaataatatagactacatttgtcgcgctcatcagttggttatggaagggtacaaatggatgtttaatgatcaaatcgttactgtttggtcggctccaaactactgttacagatgtggtaatgtcgctgcaatccttgagctggatgagaacctcaacaaacaatttcgtgtgtttgatgctgcccctcaggaatcaagaggagcacctgcgaaaaaggcagcccctgattactttttatga

SEQ ID NO: 89752 - protein, 305 aa, Linum usitatissimum
MSDLDRQIEQLKKCEPLKESEVKALCLKAMEILVEESNVQRVDAPVTICGDIHGQFYDLKELFKVGGDCPKTNYLFLGDFVDRGFYSVETFLLLLALKVRYPDRITLIRGNHESRQITQVYGFYDECLRKYGSVNVWRYCTDIFDYLSLSALIENKVFSVHGGLSPAISTLDQIRTIDRKQEVPHDGAMCDLMWSDPEDIVDGWGLSPRGAGFLFGGSVVSSFNHSNNIDYICRAHQLVMEGYKWMFNDQIVTVWSAPNYCYRCGNVAAILELDENLNKQFRVFDAAPQESRGAPAKKAAPDYFL

SEQ ID NO: 89753 - DNA, 921 bp, Zea mays
  CDS (1)..(921)
atgccgtcgcacggggatctggaccggcagatcgcgcagctgcgcgactgcaagtacctgcccgaggcggaggtcaaggcgctctgcgagcaggccaaggccatccttatggaggagtggaacgtgcagcccgtgcgctgtcctgtcaccgtctgtggcgacatccacggccagttctatgacctcatcgagctcttccgcatcggcggcgacgctcccgacaccaactacctcttcatgggcgactacgtcgatcgtgggtactattcagttgaaacagtttctctgttagtggctttgaaagtccgttacagagatagaattacaatacttagaggaaatcatgagagcagacaaatcactcaagtatatggcttctatgatgaatgcttaagaaagtatggaaatgcaaatgtctggaagtattttacagacttgtttgattttttgcctctcacagctcttatagaaaatcaggtcttctgtcttcacggtggcctctctccgtcattggacacgttggataatattcgttctcttgatcgcgtacaggaggttcctcatgaaggacccatgtgtgatcttttgtggtctgacccagatgaccgatgtggatggggaatttcaccaagaggagcaggttacacatttgggcaagacattgcgcagcagttcaaccatacaaatggtctttctctcatttcaagggcccatcaacttgtaatggaaggatttaattggtgccaggataagaatgtagtcacagtcttcagcgcgcctaattattgttaccgctgtggtaacatggctgctattcttgaaatcgggaaaaacatggaccagaacttccttcaattcgacccggcacctcggcaaattgagccagacacaactcggaaaaccccagactactttttgtaa

SEQ ID NO: 89754 - protein, 306 aa, Zea mays
MPSHGDLDRQIAQLRDCKYLPEAEVKALCEQAKAILMEEWNVQPVRCPVTVCGDIHGQFYDLIELFRIGGDAPDTNYLFMGDYVDRGYYSVETVSLLVALKVRYRDRITILRGNHESRQITQVYGFYDECLRKYGNANVWKYFTDLFDFLPLTALIENQVFCLHGGLSPSLDTLDNIRSLDRVQEVPHEGPMCDLLWSDPDDRCGWGISPRGAGYTFGQDIAQQFNHTNGLSLISRAHQLVMEGFNWCQDKNVVTVFSAPNYCYRCGNMAAILEIGKNMDQNFLQFDPAPRQIEPDTTRKTPDYFL

SEQ ID NO: 89755 - DNA, 912 bp, Zea mays
  CDS (1)..(912)
atggatgtggatctgtggatctccaaggtcaaggaaggccagcacctcgccgagcacgagcttcagtctctctgcgaatacgtaaaggagatcctcatcgaagagtcgaacgttcaaccggtgaatagccctgtgacggtttgcggtgacatccatgggcagttccatgacctgatgaagctcttcgcgacggggggccacgtcccagagacgaactatattttcatgggtgattttgtggaccgtggcttcaacagtctggaggttttcaccatcctattgctactaaaagcgaggtatcctgcacacataacccttctgcgtggaaatcatgaaagtaggcagttgacacaggtgtatggtttctatgatgagtgtcagaggaagtatggcaacgccaatgcatggcggtattgcactgatgtttttgattaccttacgctatcagcaatcattaatggtcaagtcctctgtgttcatggcggtctttctcctgatgtacgtactattgatcagatacgaacaattgatcgcaattgtgaaattccccatgaaggtcctttctgcgaccttatgtggagtgaccctgaggagatagagacatgggctgttagtccccgtggagcaggttggctgtttggatcgcgcgtcacagcagagttcaactttgttaacggtatcgagctagtttgccgggctcaccagctggtccaggaaggcttaaagtacatgttccaggagaagggccttgtcactgtgtggtctgcacctaattattgctacagatgtggcaatgtcgcttctatcttaagcttcgatgagaagatggaaagggatgtcaagttcttcacagagacagaggagaacaaccagatgcgaggcccaaggaccgcagtcccatatttcctatga

SEQ ID NO: 89756 - protein, 303 aa, Zea mays
MDVDLWISKVKEGQHLAEHELQSLCEYVKEILIEESNVQPVNSPVTVCGDIHGQFHDLMKLFATGGHVPETNYIFMGDFVDRGFNSLEVFTILLLLKARYPAHITLLRGNHESRQLTQVYGFYDECQRKYGNANAWRYCTDVFDYLTLSAIINGQVLCVHGGLSPDVRTIDQIRTIDRNCEIPHEGPFCDLMWSDPEEIETWAVSPRGAGWLFGSRVTAEFNFVNGIELVCRAHQLVQEGLKYMFQEKGLVTVWSAPNYCYRCGNVASILSFDEKMERDVKFFTETEENNQMRGPRTAVPYFL

SEQ ID NO: 89757 - DNA, 924 bp, Zea mays
  CDS (1)..(924)
atgagcagtccgcatggcggtctcgacgaccagatcgagcggctcatgcagtgcaagccgctcgctgagcctgaggttagagctctttgtgagaaggcaaaggagattctgatggaggaaagcaatgttcagcctgtaaagagtcctgttactatatgcggtgatattcatggacaatttcatgatcttgctgaactcttccgaatcggtggaaagtgtccagatacgaactacttgtttatgggagattatgttgaccgtggttactactctgtcgaaactgtcacacttttggtggctttaaaagttcgatatcctcagaggatcaccattctcagaggaaaccatgaaagccggcagattactcaagtgtatgggttctatgacgaatgcttaaggaagtatggaaacgcaaatgtctggaaaacctttacagatctatttgattacttccccttgactgcattggtcgagtcagaaatattttgcttgcatggtggattatcgccatccattgagaccctcgacaacatccgcaactttgaccgcgtccaagaagttcctcacgaaggtccaatgtgtgatcttctgtggtctgatccagatgatcggtgtggctggggtatttctcctcgtggtgctggttataccttcggacaggatatatcagagcagttcaaccataccaatagtctaaggctaattgctagagctcaccagttggttatggagggattcaattgggctcatgagcaaaaagtcgtgactatatttagtgcacctaattattgctaccgctgtgggaacatggcatcaatcttagaagtggatgattgcagagagcatactttcatccagtttgagccagccccaagaaggggagagccagatgtaactcgtaggacacctgactatttcctgtga

SEQ ID NO: 89758 - protein, 307 aa, Zea mays
MSSPHGGLDDQIERLMQCKPLAEPEVRALCEKAKEILMEESNVQPVKSPVTICGDIHGQFHDLAELFRIGGKCPDTNYLFMGDYVDRGYYSVETVTLLVALKVRYPQRITILRGNHESRQITQVYGFYDECLRKYGNANVWKTFTDLFDYFPLTALVESEIFCLHGGLSPSIETLDNIRNFDRVQEVPHEGPMCDLLWSDPDDRCGWGISPRGAGYTFGQDISEQFNHTNSLRLIARAHQLVMEGFNWAHEQKVVTIFSAPNYCYRCGNMASILEVDDCREHTFIQFEPAPRRGEPDVTRRTPDYFL

SEQ ID NO: 89759 - DNA, 960 bp, Helianthus annuus
  CDS (1)..(960)
atggagggtatgatggaaaagggtgttttggatgatattattaggagattgttggagggtagaggggggaaacaggtgcagttgtctgagtcagagatccgtcagctgtgcgtcaacgctagacaaatctttctttctcagccgaatttgttgcagcttaaggcgcctattaggatctgtggtgatatccatggacaataccaagacctattgaggctcttcgaatacggtgggtaccccccctctgaaaactacctatttcttggtgattacgttgatcgaggcaggcaaagtttggagaccatatgtttgctacttgcatacaagatacgctatcctgataaagtgttcctcttaaggggaaaccacgaagatgccaagatcaaccgcatatacggcttttacgacgaatgtaaaagaagatttaacgtccgtctttggaagatattcaccgactgcttcaattgtttacccgttgctgcattagtcgatgacaagattctttgcatgcacggaggtctttccccggaacttgagaatttgaaacaaataagggaaattgagaggccgacggagatccccgataacgggcttctttgtgatttattgtgggctgatcctgatcctaccattgagggctggtccgacagtgatcgcggcgtttcgtgtacttttggcgctgataaagttgttgagtttttaaagaagaatgatcttgaccttatttgtagaggtcatcaggtggtagaggacggttacgagttttttgctaaacgaagactcgtgacgatattttcggctccaaattacgggggagagtttgacaacgcaggtgcactattgagtgttgataaatccttggtgtgttcttttgagatattgaagccgcaagattactcaaaaaagcccggaacgtctaagttaccgcttaaaaagccacccaaaattggaacatcctga

SEQ ID NO: 89760 - protein, 319 aa, Helianthus annuus
MEGMMEKGVLDDIIRRLLEGRGGKQVQLSESEIRQLCVNARQIFLSQPNLLQLKAPIRICGDIHGQYQDLLRLFEYGGYPPSENYLFLGDYVDRGRQSLETICLLLAYKIRYPDKVFLLRGNHEDAKINRIYGFYDECKRRFNVRLWKIFTDCFNCLPVAALVDDKILCMHGGLSPELENLKQIREIERPTEIPDNGLLCDLLWADPDPTIEGWSDSDRGVSCTFGADKVVEFLKKNDLDLICRGHQVVEDGYEFFAKRRLVTIFSAPNYGGEFDNAGALLSVDKSLVCSFEILKPQDYSKKPGTSKLPLKKPPKIGTS

SEQ ID NO: 89761 - DNA, 960 bp, Brassica napus
  CDS (1)..(960)
atggacgagaatttgctggacgatataatacggcggctgttggagactaacaacgggaagcaggtgaagctactcgaggctgagatacgccagctctgctctgcttccaaagacgtttttctcagccagcctaatctcctcgagctcgaggctcctatcaagatttgcggagatgttcatggtcagtttccagacctcttgcggttgtttgagtacggcggctaccctccagctgcaaattacttgttcctcggagactacgttgatcgtggtaagcagagcatagagaccatatgccttctccttgcctacaagctcaaatacaagctcaacttctttctcctcagaggcaaccacgaatccgcttctatcaaccgtgtctacggtttctacgatgaatgcaaaagaaaatacaacgtgagactgtggaagagtttcaccgactgcttcaactgtctccctgttgctgctctcattgacgacaagatcctctgtatgcacggtggactttcccctgatctcaagaccttggatgatatcaggcggattcctcgtcctatcgatgttcctgatcagggcgtcctttgtgatttgttatgggctgatcctgaaaaagaaatcaaaggctggggggagaatgacagaggtgtctcatatacatttggtcccgacaaagtggctgagttccttcaaactcatgaccttgatcttgtttgccgagctcatcaggttgtagaagatggatatgagttctttgcaaagagacaactggtgacaatattctctgcacccaactactgtggcgagtttgacaatgctggcgcaatgatgagtgttgatgatagcttgacatgttcgttccaaatcatcaagtcaactgagaagaaaagaagatttggatacaacaacaacgttcatagaccaggaaccccaccacataagggaggaaaaggtggttaa

SEQ ID NO: 89762 - protein, 319 aa, Brassica napus
MDENLLDDIIRRLLETNNGKQVKLLEAEIRQLCSASKDVFLSQPNLLELEAPIKICGDVHGQFPDLLRLFEYGGYPPAANYLFLGDYVDRGKQSIETICLLLAYKLKYKLNFFLLRGNHESASINRVYGFYDECKRKYNVRLWKSFTDCFNCLPVAALIDDKILCMHGGLSPDLKTLDDIRRIPRPIDVPDQGVLCDLLWADPEKEIKGWGENDRGVSYTFGPDKVAEFLQTHDLDLVCRAHQVVEDGYEFFAKRQLVTIFSAPNYCGEFDNAGAMMSVDDSLTCSFQIIKSTEKKRRFGYNNNVHRPGTPPHKGGKGG

SEQ ID NO: 89763 - DNA, 921 bp, Brassica napus
  CDS (1)..(921)
atgccgccgaacggagatctagaccgtcagatcgaccagctgatggagtgcaaaccgctatcggaggacgatgtgaagacgctctgcgatcaagcgaaggccatcctcgtcgaggaatggaacgttcagcccgtgaaatgccccgtcaccgtctgcggcgatatccacggccagttctatgaccttatcgagctctttcgaatcggtggtaacccccccgatacgaactacctcttcatgggagactatgtagaccgtggctactattcagtagaaacagtttctctattggtggcattgaaagtcagatacagggataggattacaatcttgcgagggaaccacgagagtcgtcagatcacccaagtatatggtttctatgacgagtgcttgaggaagtacggaaacgcaaatgtgtggaagtatttcacagaccttttcgattatcttcctcttactgcccttatcgagagtcaggttttctgtttgcatggagggctatcaccttctctggatacacttgataatatccgaagcttggatcgtatacaggaggttccacacgaaggaccaatgtgtgatttactatggtctgatccagatgatcgatgtgggtggggaatatctccacgaggtgctggttatacatttggacaggacatagcaactcagtttaatcacaacaatggactcagtctcatatcaagagcgcatcaacttgtcatggaaggctttaactggtgtcaggacaagaatgtagtgacggtgtttagtgcaccaaactattgctaccggtgtggaaacatggcagctattctagagataggagagaacatggaccagaacttcctccagttcgatccagctcctagacaagtcgaaccagatactacccgcaagacccctgattattttttgtga

SEQ ID NO: 89764 - protein, 306 aa, Brassica napus
MPPNGDLDRQIDQLMECKPLSEDDVKTLCDQAKAILVEEWNVQPVKCPVTVCGDIHGQFYDLIELFRIGGNPPDTNYLFMGDYVDRGYYSVETVSLLVALKVRYRDRITILRGNHESRQITQVYGFYDECLRKYGNANVWKYFTDLFDYLPLTALIESQVFCLHGGLSPSLDTLDNIRSLDRIQEVPHEGPMCDLLWSDPDDRCGWGISPRGAGYTFGQDIATQFNHNNGLSLISRAHQLVMEGFNWCQDKNVVTVFSAPNYCYRCGNMAAILEIGENMDQNFLQFDPAPRQVEPDTTRKTPDYFL

SEQ ID NO: 89765 - DNA, 942 bp, Brassica napus
  CDS (1)..(942)
atgggcgcgaattcgataccgacggacgcaaccattgatctcgatgagcagatctcgcagctcatgcagtgcaagcccctctccgagcaacaggttagagcattatgcgaaaaagccaaggagatcttaatggatgaaagcaacgttcagcctgtgaaaagccctgtgacaatctgcggtgatattcatggacagttccatgatcttgcagagcttttccgtattgggggaatgtgccctgacaccaattacctgtttatgggagattacgttgaccgtggttattattctgttgaaactgttacgctgttagtcgccttaaagctgcgataccctcagcgaatcaccattcttagaggaaaccatgaaagtcgtcagatcactcaggtttatggattttatgatgaatgtctgcgaaagtatggcaatgcaaatgtttggaaaatctttacagacctctttgactatttcccactgacagccttggttgagtcagaaatattttgccttcatggtggattgtctccatctatcgagacacttgacaacataaggaactttgatcgagttcaagaagtgccacatgaagggccgatgtgtgacttattatggtctgatcctgatgacagatgtggttggggaatctctcctcgtggtgccggatatacatttggtcaggacatatccgaacaattcaaccactcaaacagcttaaaactgattgctcgagcgcatcagctggttatggatggattcaactgggcacatgagcaaaaggtggttactatcttcagtgcaccaaactattgttaccgttgtgggaacatggcttcgattcttgaggttgatgactgcaggaaccacaccttcattcagtttgaaccagcaccaaggagaggagaaccagatgttactcggagaacaccagactatttcctgtga

SEQ ID NO: 89766 - protein, 313 aa, Brassica napus
MGANSIPTDATIDLDEQISQLMQCKPLSEQQVRALCEKAKEILMDESNVQPVKSPVTICGDIHGQFHDLAELFRIGGMCPDTNYLFMGDYVDRGYYSVETVTLLVALKLRYPQRITILRGNHESRQITQVYGFYDECLRKYGNANVWKIFTDLFDYFPLTALVESEIFCLHGGLSPSIETLDNIRNFDRVQEVPHEGPMCDLLWSDPDDRCGWGISPRGAGYTFGQDISEQFNHSNSLKLIARAHQLVMDGFNWAHEQKVVTIFSAPNYCYRCGNMASILEVDDCRNHTFIQFEPAPRRGEPDVTRRTPDYFL

SEQ ID NO: 89767 - DNA, 942 bp, Brassica napus
  CDS (1)..(942)
atgggcgcgaattcgattccgacggacgcaaccctcgatcttgatgagcagatctcccagctcatgcagtgcaagcctctctccgagcaacaggttagagcattatgcgagaaagctaaggagatcttgatggatgaaagcaacgttcagcctgtcaaaagtccagtgacaatctgtggtgatattcatggacaattccatgatctcgcagagcttttccgtattggaggaatgtgccccgacaccaactatctatttatgggagactatgtcgaccgtggatattattctgtcgaaactgttacgctgttagttggcttgaaagtacggtatcctcagcgaatcaccattcttagaggaaaccatgaaagtcgtcagattactcaggtttatggattttatgatgaatgcctgcgaaagtatggcaatgccaatgtttggaagatctttactgacctctttgattatttcccactgacagccttggtggagtcagaaatattctgccttcacggtggattgtcaccgtctatcgagacccttgacaacattaggaactttgatagagttcaagaagttccacatgaaggaccgatgtgtgacttattatggtctgatccggatgacagatgtggctggggaatctctcctcgtggtgccggatatacatttggtcaggacatctccgaacaattcaaccacagtaacaacttaaaactgattgctcgagcacatcagctggttatggatggattcaactgggcacacgagcaaaaggtggttactattttcagtgcaccaaactattgctatcgctgtggaaacatggcctccattcttgaggtcgatgactgcaggaaccacaccttcattcagtttgaaccagccccaaggagaggagaaccagatgtgacccgaaggacacctgactacttcctttga

SEQ ID NO: 89768 - protein, 313 aa, Brassica napus
MGANSIPTDATLDLDEQISQLMQCKPLSEQQVRALCEKAKEILMDESNVQPVKSPVTICGDIHGQFHDLAELFRIGGMCPDTNYLFMGDYVDRGYYSVETVTLLVGLKVRYPQRITILRGNHESRQITQVYGFYDECLRKYGNANVWKIFTDLFDYFPLTALVESEIFCLHGGLSPSIETLDNIRNFDRVQEVPHEGPMCDLLWSDPDDRCGWGISPRGAGYTFGQDISEQFNHSNNLKLIARAHQLVMDGFNWAHEQKVVTIFSAPNYCYRCGNMASILEVDDCRNHTFIQFEPAPRRGEPDVTRRTPDYFL

SEQ ID NO: 89769 - DNA, 918 bp, Brassica napus
  CDS (1)..(918)
atgtcagacctagacaggcagatagagcagctgaagcgctgcgaaccgttgagcgaatcggaggtgaagtctctctgcctcaaagccatggagatcctcgttgaagagagtaatgttcagagagtcgatgctcccgtcactctatgtggtgatatccatgggcagttctatgacatgatggagcttttcaaagttggaggtgattgccccaagaccaactacttgtttcttggcgattttgttgatcgtggatactactctgttgagacctttctacttctactcgccctcaaggttagatatccagaccgtataactctcatcagaggaaaccacgaaagcaggcaaatcacacaggtttatggattttatgatgagtgtttgcgtaaatatggctctgtaaatgtctggagatactgcaccgacatttttgactacatgagtctttcagctgttgttgagaacaagatattctgtgttcatggcggtctctctccaactattaatactcttgatcagatcaggacaattgaccggaagcaagaagtgccacatgatggcgccatgtgtgacctcctatggtctgatcctgaagatattgttgagggttggggattgagtcctcgtggagctggattcctttttggcggcagtgttgtcacgacttttaaccacacaaacaacatagactacataggacgagcccatcaactagttatggagggctacaaatggatgttcgatagccagattgtgacagtgtggtcagccccaaattactgttacagatgcggtaatatcgcttcgattctagagctcgacgagaacctaaacaaagagttccgtgtgttcgaggcagcgcagcaggactcgagagggcctcccgctaaaaaacctgcccctgattacttcctataa

SEQ ID NO: 89770 - protein, 305 aa, Brassica napus
MSDLDRQIEQLKRCEPLSESEVKSLCLKAMEILVEESNVQRVDAPVTLCGDIHGQFYDMMELFKVGGDCPKTNYLFLGDFVDRGYYSVETFLLLLALKVRYPDRITLIRGNHESRQITQVYGFYDECLRKYGSVNVWRYCTDIFDYMSLSAVVENKIFCVHGGLSPTINTLDQIRTIDRKQEVPHDGAMCDLLWSDPEDIVEGWGLSPRGAGFLFGGSVVTTFNHTNNIDYIGRAHQLVMEGYKWMFDSQIVTVWSAPNYCYRCGNIASILELDENLNKEFRVFEAAQQDSRGPPAKKPAPDYFL

SEQ ID NO: 89771 - DNA, 912 bp, Brassica napus
  CDS (1)..(912)
atggatttagatcagtggatatccaaggtcaaagacggccaacatctctccgaagacgagcttcacctcctctgcgaatacgtgaaagagattctgattgaggaatcaaacgtacaacctgtcaacagtcctgtcaccgtctgtggtgatatccatggccagtttcacgatcttatgaagcttttccagaccggtggtcatgttcccgacactaactacatttttatgggagatttcgttgatagaggttacaacagtcttgaagttttcactattcttttgcttcttaaagcaagatatccagcccatatcacacttttgcgtggaaatcatgaaagcagacagcttactcaggtctatggtttctatgacgaatgccaaaggaagtacggtaatgctaatgcttggagatattgcacggatgtgtttgactatcttactctttccgctattatagatggcactgttctatgtgttcatggtggcctttcacctgatgtacggacgattgaccagataagattgattgatcgaaattgcgaaatcccgcatgaaggaccattctgtgatcttatgtggagcgatcctgaagacattgaaacatgggctgttagtccacgtggagctggttggcttttcggatcgagggttaccactgagtttaaccatataaacaagcttgatctagtatgccgtgcacaccagctggtacaagaaggtcttaagtacatgttccaagataaaagccttgtaacggtatggtctgcgcctaattactgctatcgctgtgggaatgtagcttctatattgagtttcgatgacaacatggaaaaatcagtgaagtacttcacagagacggaagagaacaatcaaatgagagggccaaggactggagttccatatttcctatga

SEQ ID NO: 89772 - protein, 303 aa, Brassica napus
MDLDQWISKVKDGQHLSEDELHLLCEYVKEILIEESNVQPVNSPVTVCGDIHGQFHDLMKLFQTGGHVPDTNYIFMGDFVDRGYNSLEVFTILLLLKARYPAHITLLRGNHESRQLTQVYGFYDECQRKYGNANAWRYCTDVFDYLTLSAIIDGTVLCVHGGLSPDVRTIDQIRLIDRNCEIPHEGPFCDLMWSDPEDIETWAVSPRGAGWLFGSRVTTEFNHINKLDLVCRAHQLVQEGLKYMFQDKSLVTVWSAPNYCYRCGNVASILSFDDNMEKSVKYFTETEENNQMRGPRTGVPYFL

SEQ ID NO: 89773 - DNA, 912 bp, Brassica napus
  CDS (1)..(912)
atggatttggatcaatggatttcgaaggttaaagacggcgagcatctctccgaagacgagcttcagcttctctgcgaatacgtgaaagaaattctgattgaggagtccaacgttcagcctgtcaacagtccagtcaccgtctgtggtgacatccatggccagtttcatgatctcatgaagctttttcagaccgggggtcatgttcccgacacaaactacatatttatgggggactttgtggatagaggttacaacagccttgaagtcttcactattcttttgcttcttaaagctagacatccagccaatattacacttctgcgtggaaatcatgaaagtaggcagctaacgcaggtatatggtttctatgacgaatgccaaaggaagtatggtaacgccaatgcgtggcgctattgcacagatgtttttgactatcttaccttatcagctataatagatggcacggttctatgtgttcatggcggcctttccccggatgtccggacaattgatcagataagactagtagatcgaaactgtgaaattccccatgaagggcccttttgcgatcttatgtggagcgatcctgaagacattgaaacatgggctgttagtccacgtggagctggttggcttttcggatcgagggttaccactgagtttaaccatataaacaagcttgatctagtatgccgtgcacaccagctggtacaagaaggtcttaagtacatgttccaagataaaagccttgtaacggtatggtctgcgcctaattactgctatcgctgtgggaatgtagcttctatattgagtttcgatgacaacatggaaaaatcagtgaagtacttcacagagacggaagagaacaatcaaatgagagggccaaggactggagttccatatttcctatga

SEQ ID NO: 89774 - protein, 303 aa, Brassica napus
MDLDQWISKVKDGEHLSEDELQLLCEYVKEILIEESNVQPVNSPVTVCGDIHGQFHDLMKLFQTGGHVPDTNYIFMGDFVDRGYNSLEVFTILLLLKARHPANITLLRGNHESRQLTQVYGFYDECQRKYGNANAWRYCTDVFDYLTLSAIIDGTVLCVHGGLSPDVRTIDQIRLVDRNCEIPHEGPFCDLMWSDPEDIETWAVSPRGAGWLFGSRVTTEFNHINKLDLVCRAHQLVQEGLKYMFQDKSLVTVWSAPNYCYRCGNVASILSFDDNMEKSVKYFTETEENNQMRGPRTGVPYFL

SEQ ID NO: 89775 - DNA, 996 bp, Brassica napus
  CDS (1)..(996)
atggaagctggtgctttaaactcagtgatcaatagattgcttgaagctagagagaaaccaggaaagattgttcagttgtttgaaactgagatcaaacagctctgtttcgtctctagagatatcttcttgagacaaccaaatctcttggaactcgaagctcctgtcaagatctgcggggacattcatggacaatacccggatctcttgagactattcgaacacggaggataccctcctcgttcaaactacttgtttcttggagactacgtggaccgtggcaaacaaagccttgaaacgatttgtctcttgctcgcttacaagatcaagttccctgaaaacttcttccttcttagaggaaaccacgagagtgcttcaatcaatcgtatctacggcttctacgacgagtgtaaacgccgtttcagtgtcaagatttggagaatcttcaccgattgcttcaactgtctccccgtggctgcactcatcgacgacaggattctctgtatgcacggtgggctctcccctgagctgcgtagcttgagacagattagggacattcgccgtccaactgatattcctgatcgtggtttactctgtgatctcttgtggtctgatcctgataaagtggttagaggatggggtcctaacgatcgtggagtttcctacacttttggatcggatacagtatccgagtttctcaaaagactcgatcttgacctaatctgtagggctcatcaggttgttgaagatgggtttgagttctttgcgaataagcagctcgtgacgatattctcagcgccgaattactgtggagagttcgacaatgcaggtgcgatgatgagtgtagacgaggatttgatttgctcttttcagatcttaaaacctaatgagaagaaatcaaaattcagcttcggaagtagaggtggtgttaaaactggcttcccttatcctaaagtcaagtcgatcctgagttcgcagagttcgaagcaatacaactag

SEQ ID NO: 89776 - protein, 331 aa, Brassica napus
MEAGALNSVINRLLEAREKPGKIVQLFETEIKQLCFVSRDIFLRQPNLLELEAPVKICGDIHGQYPDLLRLFEHGGYPPRSNYLFLGDYVDRGKQSLETICLLLAYKIKFPENFFLLRGNHESASINRIYGFYDECKRRFSVKIWRIFTDCFNCLPVAALIDDRILCMHGGLSPELRSLRQIRDIRRPTDIPDRGLLCDLLWSDPDKVVRGWGPNDRGVSYTFGSDTVSEFLKRLDLDLICRAHQVVEDGFEFFANKQLVTIFSAPNYCGEFDNAGAMMSVDEDLICSFQILKPNEKKSKFSFGSRGGVKTGFPYPKVKSILSSQSSKQYN

SEQ ID NO: 89777 - DNA, 957 bp, Brassica napus
  CDS (1)..(957)
atggacgagaatttgctggacgatataatacggcggctgttggagactaacaccgggaagcaggtgaagctacttgaggctgagatacgccagctctgctctgcttccaaagacgtttttctcagccagcctaatctcctcgagctcgaggctcctatcaagatttgcggagatgttcatggtcagtttccagacctcttgcggttgtttgagtatggcggctaccctccagctgctaattacttgttcctcggagactatgttgatcgtggtaagcagagcatagagaccatatgccttctccttgcctacaagctcaaatacaagctcaacttctttcttctcagaggcaaccacgaatccgcttctatcaaccgtgtctacggtttctacgatgaatgcaaaagaaaatacaacgtgagactgtggaagagtttcaccgactgcttcaactgtctgcctgttgctgctctcattgacgacaagatcctctgtatgcacggtggactttcccctgatctcaagagcttggatgatatcaggcggattcctcgtcctatcgatgttcctgatcagggtgttctttgtgatttgttgtgggctgatcctgaaaaagaagttaaaggctggggggagaatgagagaggtgtctcatatacttttggtgccgacatagtggctgagttccttcaaactcatgaccttgatcttgtttgccgagctcatcaggttgtggaagatggatatgagttctttgcaaatagacaacttgtgacgatattctctgcacccaattactgtggcgagtttgataatgctggtgcaatgatgagtgttgatgatagcttgacgtgttcgtttcaaatcatcaagtcaactgagaagaagataagatttggattcaacaacgtttctagaccaggaaccccaccacataagggaggaagaggtggttaa

SEQ ID NO: 89778 - protein, 318 aa, Brassica napus
MDENLLDDIIRRLLETNTGKQVKLLEAEIRQLCSASKDVFLSQPNLLELEAPIKICGDVHGQFPDLLRLFEYGGYPPAANYLFLGDYVDRGKQSIETICLLLAYKLKYKLNFFLLRGNHESASINRVYGFYDECKRKYNVRLWKSFTDCFNCLPVAALIDDKILCMHGGLSPDLKSLDDIRRIPRPIDVPDQGVLCDLLWADPEKEVKGWGENERGVSYTFGADIVAEFLQTHDLDLVCRAHQVVEDGYEFFANRQLVTIFSAPNYCGEFDNAGAMMSVDDSLTCSFQIIKSTEKKIRFGFNNVSRPGTPPHKGGRGG

SEQ ID NO: 89779 - DNA, 918 bp, Brassica napus
  CDS (1)..(918)
atgtcagacctagacaggcagatagagcagctgaagcgctgcgaaccgttgagcgaatcggaggtgaagtctctctgcctcaaagccatggagatcctcgttgaagagagtaatgttcagagagtcgatgctcccgtcactctatgtggtgatatccatgggcagttctatgacatgatggagcttttcaaagttggaggtgattgccccaagaccaactacttgtttcttggtgattttgttgatcgtggatactactctgttgagacctttctacttctgctcgccctcaaggttagatatccagaccgtataactctcatcagaggaaaccacgagagcaggcaaatcacacaggtttatggattttatgatgagtgtttgcgtaaatatggctctgttaatgtctggagatactgcaccgacattttcgactacatgagtctttcagctgttgttgagaacaagatattctgtgttcatggcggtctctctccagctatcattactcttgatcagatcaggacaattgaccggaagcaagaagtgccacatgatggtgccatgtgtgacctcctatggtctgatcctgaagatattgttgatggctggggattgagtcctcgtggtgctggcttcctttttggcggcagtgttgtctcctcttttaaccacacaaacaacatagactacatagcccgagcccatcagcttgttatggagggttacaaatggatgttcgatagccagattgtgacagtctggtcagccccaaattactgttacaggtgcggtaatgtggcttcgattctagagctcgatgagaatctaaacaaagagttccgtgtgttcgaggcagcgcagcaggactcgagagggcctcccgctaaaaaacctgcccctgattacttcctataa

SEQ ID NO: 89780 - protein, 305 aa, Brassica napus
MSDLDRQIEQLKRCEPLSESEVKSLCLKAMEILVEESNVQRVDAPVTLCGDIHGQFYDMMELFKVGGDCPKTNYLFLGDFVDRGYYSVETFLLLLALKVRYPDRITLIRGNHESRQITQVYGFYDECLRKYGSVNVWRYCTDIFDYMSLSAVVENKIFCVHGGLSPAIITLDQIRTIDRKQEVPHDGAMCDLLWSDPEDIVDGWGLSPRGAGFLFGGSVVSSFNHTNNIDYIARAHQLVMEGYKWMFDSQIVTVWSAPNYCYRCGNVASILELDENLNKEFRVFEAAQQDSRGPPAKKPAPDYFL

SEQ ID NO: 89781 - DNA, 942 bp, Brassica napus
  CDS (1)..(942)
atgggggcgaattcaataccgacggacgcaacgattggtctcgatgagcagatctcgcagctcatgcagtgcaagcctctctccgagcaacaggttagagcgttatgcgaaaaagccaaggagatcttaatggatgaaagcaacgttcagcctgtgaaaagccctgtgacaatctgcggtgatattcatggacagttccatgatcttgctgagcttttccgtattggcggaatgtgccctgacaccaattacctgtttatgggagattacgttgaccgtggttattattctgttgaaactgttacgctgttagtcgccttaaagctgcgataccctcagcgaatcaccattcttagaggaaaccatgaaagtcgtcagatcactcaggtttatggattttatgatgaatgtctacgaaagtatggcaatgcaaatgtttggaaaatctttacagacctctttgactatttcccactgacagccttggttgagtcagaaatattttgccttcatggtggattgtctccatctatcgagacacttgacaacataaggaactttgatcgagttcaagaagtgccccatgaagggcccatgtgtgacttattatggtctgatcctgatgaccgttgtggttggggcatctctcctcgtggtgctggatatacatttggtcaggacatatccgaacagttcaaccactcaaacagcttaaagctgatcgccagagcccatcagctggttatggatggatacaactgggctcatgagcaaaaggtggtaactatcttcagtgcaccaaactattgttaccgttgtgggaacatggcttcgattcttgaggttgatgactgcaggaaccacaccttcattcagtttgaaccagcaccaaggagaggagaaccagatgttactcggagaacaccagactatttcctgtga

SEQ ID NO: 89782 - protein, 313 aa, Brassica napus
MGANSIPTDATIGLDEQISQLMQCKPLSEQQVRALCEKAKEILMDESNVQPVKSPVTICGDIHGQFHDLAELFRIGGMCPDTNYLFMGDYVDRGYYSVETVTLLVALKLRYPQRITILRGNHESRQITQVYGFYDECLRKYGNANVWKIFTDLFDYFPLTALVESEIFCLHGGLSPSIETLDNIRNFDRVQEVPHEGPMCDLLWSDPDDRCGWGISPRGAGYTFGQDISEQFNHSNSLKLIARAHQLVMDGYNWAHEQKVVTIFSAPNYCYRCGNMASILEVDDCRNHTFIQFEPAPRRGEPDVTRRTPDYFL

SEQ ID NO: 89783 - DNA, 939 bp, Brassica napus
  CDS (1)..(939)
atgacgcagcaagggcagggaagcatggaccctgccgttctcgacgacatcattcgtcgtttgttggattacagaaaccctaagcctggaaccaaacaggtcatgctcaacgagtctgagatccgacagctttgcagcgtgtctagagagattttccttcagcagcctaacctccttgagctcgaggctccaattaagatctgtggtgatattcatggacagtactcagatctactgaggctatttgagtacggaggcttacctcctgcagctaactatctattcctaggagattacgtggatcgcgggaagcagagcctagaaacaatctgccttctccttgcctacaagatcaaataccctgagaacttcttcctcctaagaggcaaccacgaatgcgcttccatcaaccgaatctacggattctacgatgaacgtaaacgcaggttcagtgtcagactctggaaagtgtttacagattctttcaactgcctccctgtagctgctgtaatagacgataagatattgtgtatgcacggtggcctttctcctgatttgaccagcgtggaacagattaagaacattaagcgacctaccgatgttccggactccggtttgttatgtgatctgctttggtctgatccgagcaaagatgtgaaaggctgggggatgaatgaccgtggagtttcttacacgtttgggcctgataaagttgctgagtttttgataaagaatgatatggatctcatctgtcgtgctcaccaggttgtagaggatggttatgagttctttgcggatagacagcttgttactatattttcagctcctaattactgtggtgaattcgataatgctggtgctatgatgagtgttgatgagagtttaatgtgctcttttcaaattcttaagcctgcggatcggaggccccggtttttatga

SEQ ID NO: 89784 - protein, 312 aa, Brassica napus
MTQQGQGSMDPAVLDDIIRRLLDYRNPKPGTKQVMLNESEIRQLCSVSREIFLQQPNLLELEAPIKICGDIHGQYSDLLRLFEYGGLPPAANYLFLGDYVDRGKQSLETICLLLAYKIKYPENFFLLRGNHECASINRIYGFYDERKRRFSVRLWKVFTDSFNCLPVAAVIDDKILCMHGGLSPDLTSVEQIKNIKRPTDVPDSGLLCDLLWSDPSKDVKGWGMNDRGVSYTFGPDKVAEFLIKNDMDLICRAHQVVEDGYEFFADRQLVTIFSAPNYCGEFDNAGAMMSVDESLMCSFQILKPADRRPRFL

SEQ ID NO: 89785 - DNA, 921 bp, Brassica napus
  CDS (1)..(921)
atgccgccgaacggagatctagaccgtcagatcgagcatctgatggagtgcaaacctttatcggaggaggatgtgaggacgctctgcgatcaagctaaggccatcctcgtcgaggaatggaacgtccagcccgtgaaatgccccgtcaccgtctgcggcgatatccacggccagttctatgaccttatcgagcttttccgaatcggtggtaacgcccccgatacgaattacctcttcatgggtgactatgtagaccgtggctactattcagtggaaacggtttctttattggtggcattgaaagtcagatacagggataggattacaatcttgcgagggaaccacgagagtcgtcagatcacccaagtatatggtttttatgacgagtgcttgaggaagtacggaaacgcaaatgtgtggaagtatttcacagaccttttcgattatcttcctcttactgctcttatcgagagtcaggttttctgtttgcatggagggctatcaccttctctggatacacttgataatatccgaagcttggatcgtatacaagaggttccacacgaaggaccaatgtgtgatttactatggtctgatccagatgatcgatgcgggtggggaatatctccaagaggtgctggttatacatttggacaggatatagcaactcagtttaatcacaacaatggactcagtctcatatcaagagcgcatcagcttgtcatggaaggttttaactggtgtcaggataagaatgtggtgacggtgtttagtgcaccaaactattgctaccggtgtggaaacatggcagcgattctagagataagtgagaacatggagcagaacttccttcagtttgatccagctccaagacaagtcgaacctgatactacccgtaagacccctgattattttttgtga

SEQ ID NO: 89786 - protein, 306 aa, Brassica napus
MPPNGDLDRQIEHLMECKPLSEEDVRTLCDQAKAILVEEWNVQPVKCPVTVCGDIHGQFYDLIELFRIGGNAPDTNYLFMGDYVDRGYYSVETVSLLVALKVRYRDRITILRGNHESRQITQVYGFYDECLRKYGNANVWKYFTDLFDYLPLTALIESQVFCLHGGLSPSLDTLDNIRSLDRIQEVPHEGPMCDLLWSDPDDRCGWGISPRGAGYTFGQDIATQFNHNNGLSLISRAHQLVMEGFNWCQDKNVVTVFSAPNYCYRCGNMAAILEISENMEQNFLQFDPAPRQVEPDTTRKTPDYFL

SEQ ID NO: 89787 - DNA, 912 bp, Brassica napus
  CDS (1)..(912)
atgatgacggatcaatggatttcgaaggttaaagacggtcagcatctctccgaggacgagctccagcttctctgcgaatacgtgaaagaaattctgattgaggagtcgaacgttcagcctgtcaacagtccagtcaccgtctgtggtgacatccatggccagtttcatgatctcatgaagctttttcagactggaggtcatgttcccgacaccaactacatatttatgggggactttgtcgatagaggttacaacagccttgaagtcttcactattcttctgcttcttaaagctagacatccagccaatattacacttctgcgtggaaatcatgaaagtaggcagcttacgcaggtatatggtttctatgacgaatgccaaaggaagtatggtaacgccaatgcgtggcgctattgcacagatgtttttgactatcttaccttatcagctattatagatggcacagttctatgtgttcatggcggcctttctccggatgttcggacaattgatcagataagactggtagatcgaaactgtgaaattccccatgaagggcccttttgcgatcttatgtggagcgatcctgaagacattgaaacatgggctgttagtccacgtggagctggttggcttttcggatcgagggttaccactgagtttaaccatatcaacaagcttgatctagtatgccgtgcacaccagctggtacaagaaggtcttaagtacatgttccaagataaaggccttgtaactgtatggtctgcgcctaattactgctatcgctgtgggaatgtagcttctatattgagtttcgatgacaacatggaaaaatcagtgaagtacttcacagagacagaagagaacaatcaaatgagagggccaaggactggagttccatatttcctatga

SEQ ID NO: 89788 - protein, 303 aa, Brassica napus
MMTDQWISKVKDGQHLSEDELQLLCEYVKEILIEESNVQPVNSPVTVCGDIHGQFHDLMKLFQTGGHVPDTNYIFMGDFVDRGYNSLEVFTILLLLKARHPANITLLRGNHESRQLTQVYGFYDECQRKYGNANAWRYCTDVFDYLTLSAIIDGTVLCVHGGLSPDVRTIDQIRLVDRNCEIPHEGPFCDLMWSDPEDIETWAVSPRGAGWLFGSRVTTEFNHINKLDLVCRAHQLVQEGLKYMFQDKGLVTVWSAPNYCYRCGNVASILSFDDNMEKSVKYFTETEENNQMRGPRTGVPYFL

SEQ ID NO: 89789 - DNA, 912 bp, Brassica napus
  CDS (1)..(912)
atggatttagatcagtggatatccaaggtcaaagacggccaacatctctccgaagacgagcttcacctcctctgcgaatacgtgaaagagattctgattgaggaatcaaatgtacaacctgtcaacagtcctgtcaccgtctgtggtgatatccatggccagtttcacgaccttatgaagcttttccagaccggtggtcatgttcccgacactaactacatttttatgggagatttcgttgacagaggttacaacagtcttgaagttttcactattcttttgcttcttaaagcaagatatccagcccatatcacacttttgcgtgggaatcatgaaagcagacagcttactcaggtctatggtttctatgacgaatgccaaaggaagtacggtaatgctaatgcttggagatactgcacggatgtgtttgactatcttactctttccgctattatagatggcactgttctatgtgttcatggtggcctttcaccagatgtacggacaattgaccagataagattgattgatcgaaattgcgaaatcccgcatgaaggaccattctgtgatcttatgtggagcgatcctgaagatattgaaacatgggctgttagtccacgtggagctggttggcttttcggatcgagggttaccactgagttcaaccacataaacaaacttaatctagtatgccgtgcacaccagctggtacaagaaggtcttaagtacatgttccaagataaaagccttgtaacggtatggtctgcacctaattactgctaccgctgtggcaatgtagcttctatattgagtttcgatgaaaacatggaaaaagaagtgaagtacttcaaagagacagaagagaacaatcaaatgagagggccaaggacaggagttccatatttcctgtaa

SEQ ID NO: 89790 - protein, 303 aa, Brassica napus
MDLDQWISKVKDGQHLSEDELHLLCEYVKEILIEESNVQPVNSPVTVCGDIHGQFHDLMKLFQTGGHVPDTNYIFMGDFVDRGYNSLEVFTILLLLKARYPAHITLLRGNHESRQLTQVYGFYDECQRKYGNANAWRYCTDVFDYLTLSAIIDGTVLCVHGGLSPDVRTIDQIRLIDRNCEIPHEGPFCDLMWSDPEDIETWAVSPRGAGWLFGSRVTTEFNHINKLNLVCRAHQLVQEGLKYMFQDKSLVTVWSAPNYCYRCGNVASILSFDENMEKEVKYFKETEENNQMRGPRTGVPYFL

SEQ ID NO: 89791 - DNA, 921 bp, Brassica napus
  CDS (1)..(921)
atgccgccggacggagatctagaccgtcagatcgagcatctgatggagtgcaaacctttgtcggaggaggatgtgaggacgctctgcgatcaagctaaggccatcctcgtcgaggaatggaacgttcagcccgtgaaatgccccgttaccgtctgcggcgatatccacggccagttctatgaccttatcgagctttttcgaatcggtggcaacgcccccgatacgaattacctcttcatgggtgactatgtagaccgtggttactattcagtggaaacagtttctttattggtggcattgaaagtcagatacagggatcggattacaatcttgcgagggaaccacgagagtcgtcagatcacccaagtatatggtttctatgacgagtgcttgaggaagtacggaaacgcaaatgtgtggaagtatttcacagaccttttcgattatcttcctcttactgcccttatcgagagtcaggttttctgtttgcatggagggctatcaccttctctggatacacttgataacatccgaagcttggatcgtatacaggaggttccacacgaaggaccaatgtgtgatttactatggtctgatccagacgaccgatgtgggtggggaatatctccacgaggtgctggttacacatttggacaggacatagcaactcagttcaatcacaacaatggactcagtctcatatcaagagcgcatcaacttgtaatggaaggctttaactggtgtcaggagaagaacgtagtgacggtgtttagtgcaccaaactattgctaccggtgtggaaacatggcagcaattctagagataggagagaacatggagcagaacttccttcagttcgatccagctccaagacaagtcgaaccagatactacccgcaagacccctgattattttttgtga

SEQ ID NO: 89792 - protein, 306 aa, Brassica napus
MPPDGDLDRQIEHLMECKPLSEEDVRTLCDQAKAILVEEWNVQPVKCPVTVCGDIHGQFYDLIELFRIGGNAPDTNYLFMGDYVDRGYYSVETVSLLVALKVRYRDRITILRGNHESRQITQVYGFYDECLRKYGNANVWKYFTDLFDYLPLTALIESQVFCLHGGLSPSLDTLDNIRSLDRIQEVPHEGPMCDLLWSDPDDRCGWGISPRGAGYTFGQDIATQFNHNNGLSLISRAHQLVMEGFNWCQEKNVVTVFSAPNYCYRCGNMAAILEIGENMEQNFLQFDPAPRQVEPDTTRKTPDYFL

SEQ ID NO: 89793 - DNA, 942 bp, Brassica napus
  CDS (1)..(942)
atgggcgcgaattcggttccgacggacgcaacactcgatctagatgagcagatctcccagctcatgcagtgcaagcctctctccgagcaacaggtcagagcattatgcgagaaagctaaggagatcttgatggatgaaagcaacgtccagcctgtcaaaagtccagtaacaatctgtggtgatattcacggacaattccatgatcttgcagagcttttccgtattggaggaatgtgccctgataccaactatctatttatgggagactatgtcgaccgtggatattattctgtcgaaactgttacgctgttagttggcttgaaagtacggtatcctcagcgaatcactattcttagaggaaaccatgaaagtcgtcagattactcaggtttatggattttatgatgaatgcctgcgaaagtatggcaatgcaaatgtttggaagatctttacagacctctttgattatttcccactgacagccttggtggagtcagaaatattctgccttcacggtggattgtcaccgtctatcgagacccttgacaacattaggaactttgatcgagttcaagaagttccccatgaagggccgatgtgtgacttattatggtctgatcctgatgacagatgtggctggggcatctctcctcgtggtgccggatatacatttggccaggacatatccgaacagttcaatcactcaaacagcttaaagctgattgcccgagctcatcagctggttatggatggatacaactgggctcatgagcaaaaggtggtaactatcttcagtgcaccaaactactgttaccgttgtgggaacatggcttcgattcttgaggttgatgactgcaggaaccacagcttcattcagtttgagccagcaccgaggagaggagaaccagacgttactagaagaacaccagattatttcctctga

SEQ ID NO: 89794 - protein, 313 aa, Brassica napus
MGANSVPTDATLDLDEQISQLMQCKPLSEQQVRALCEKAKEILMDESNVQPVKSPVTICGDIHGQFHDLAELFRIGGMCPDTNYLFMGDYVDRGYYSVETVTLLVGLKVRYPQRITILRGNHESRQITQVYGFYDECLRKYGNANVWKIFTDLFDYFPLTALVESEIFCLHGGLSPSIETLDNIRNFDRVQEVPHEGPMCDLLWSDPDDRCGWGISPRGAGYTFGQDISEQFNHSNSLKLIARAHQLVMDGYNWAHEQKVVTIFSAPNYCYRCGNMASILEVDDCRNHSFIQFEPAPRRGEPDVTRRTPDYFL

SEQ ID NO: 89795 - DNA, 942 bp, Brassica napus
  CDS (1)..(942)
atgggcgcgaattcgattccgacggacgcaactctggatctcgatgagcagatctctcagctcatgcagtgcaagcctctctccgagcaacaggttagagcattatgcgagaaagctaaggagatcttgatggatgaaagcaatgttcagcctgtcaaaagccctgtgacaatctgtggtgatattcatggacagttccatgatcttgcagagcttttccgtattggaggaatgtgccctgataccaactatctatttatgggtgattatgtcgatcgtggatattattccgtcgaaactgttacgctgttagttggcttgaaagtacggtatcctcagcgaatcactattcttagaggaaaccatgaaagtcgtcagattactcaggtgtatggattttatgatgaatgcctgcgcaagtatggtaatgcgaatgtttggaagatatttactgatctcttcgactattttccactgacagccttggtggaatcggaaatattctgccttcacggtggattgtcaccgtctatcgagacccttgacaacattaggaactttgaccgagttcaagaagttccacatgaaggaccgatgtgcgacttactatggtctgatcctgatgacagatgtggctggggaatctctcctcgtggtgccggatatacatttggtcaggacatttccgaacaattcaaccacagcaacagcttaaaacttatcgctcgagcgcatcagctggttatggatggattcaactgggcacacgagcaaaaggtggttactattttcagtgcaccaaactattgctatcgctgtggaaacatggcctccattcttgaggtcgatgactgcagaaaccacaccttcattcagtttgaaccagccccaaggagaggagaaccagatgtgacccgaaggacacctgactacttcctataa

SEQ ID NO: 89796 - protein, 313 aa, Brassica napus
MGANSIPTDATLDLDEQISQLMQCKPLSEQQVRALCEKAKEILMDESNVQPVKSPVTICGDIHGQFHDLAELFRIGGMCPDTNYLFMGDYVDRGYYSVETVTLLVGLKVRYPQRITILRGNHESRQITQVYGFYDECLRKYGNANVWKIFTDLFDYFPLTALVESEIFCLHGGLSPSIETLDNIRNFDRVQEVPHEGPMCDLLWSDPDDRCGWGISPRGAGYTFGQDISEQFNHSNSLKLIARAHQLVMDGFNWAHEQKVVTIFSAPNYCYRCGNMASILEVDDCRNHTFIQFEPAPRRGEPDVTRRTPDYFL

SEQ ID NO: 89797 - DNA, 960 bp, Brassica napus
  CDS (1)..(960)
atggacgagaatttgctggacgatataatacggcggctgttggagactaacaacgggaagcaggtgaagctactcgaggctgagatacgccagctctgctctgcttccaaagaggattttctcagccagcctaatctcctcgagctcgaggctcctatcaagatttgcggtgatgttcatggtcagtttccagacctcttgcggttgtttgagtacggcggctaccctccagctgcaaattacttgttcctcggagactacgttgatcgtggtaagcggagcatagagaccatatgccttctccttgcctacaagctcaaatacaagctcaacttctttctcctcagaggcaatcacgaatgcgcttctatcaaccgtgtttacggcttctacgatgagtgcaagagaagatacaacgtgcgcctgtggaagagtttcaccgactgtttcaactgtctccccgttgctgctctcatcgacgacaagatcctctgtatgcacggtggactttctcctgatctcaagaccttggatgatatcaggcggattcctcgtcctgttgatgttcctgatcagggcgtcctttgtgatttgttatgggctgatcctgacaaagaaatccaaggctggggggagaatgacagaggtgtctcttatacttttggtcccgacaaagtggctgagttccttcagactcatgaccttgatcttgtttgccgagctcatcaggttgtagaagatggatatgagttctttgcaaagagacaactggtgacaatattctctgcacccaactactgtggtgagtttgacaatgctggcgcaatgatgagtgttgatgatagtttgacatgttctttccaaatcctcaagtcaactgagaagaaaggaagatttggatacaacaacaacgttcataggccaggaaccccacctcataaggggggaaaaggtggttga

SEQ ID NO: 89798 - protein, 319 aa, Brassica napus
MDENLLDDIIRRLLETNNGKQVKLLEAEIRQLCSASKEDFLSQPNLLELEAPIKICGDVHGQFPDLLRLFEYGGYPPAANYLFLGDYVDRGKRSIETICLLLAYKLKYKLNFFLLRGNHECASINRVYGFYDECKRRYNVRLWKSFTDCFNCLPVAALIDDKILCMHGGLSPDLKTLDDIRRIPRPVDVPDQGVLCDLLWADPDKEIQGWGENDRGVSYTFGPDKVAEFLQTHDLDLVCRAHQVVEDGYEFFAKRQLVTIFSAPNYCGEFDNAGAMMSVDDSLTCSFQILKSTEKKGRFGYNNNVHRPGTPPHKGGKGG

SEQ ID NO: 89799 - DNA, 912 bp, Brassica napus
  CDS (1)..(912)
atggatttagatcagtggatatccaaggtcaaagacggccaacatctctccgaagacgagcttcacctcctctgcgaatacgtgaaagagattctgattgaggaatcaaatgtacaacctgtcaacagtcctgtcaccgtctgtggtgatatccatggccagtttcacgaccttatgaagcttttccagaccggtggtcatgttcccgacactaactacatttttatgggagatttcgttgatagaggttacaacagtcttgaagttttcactattcttttgcttcttaaagcaagatatccagcccatatcacacttttgcgtggaaatcatgaaagcagacagcttactcaggtctatggtttctatgacgaatgccaaaggaagtacggtaatgctaatgcttggagatattgcacggatgtgtttgactatcttaccatatcagctattattgatagcacagttctatgtgttcatggtggcctttccccggatgtccggacaattgatcagataagactggtcgatcgaaattgtgaaattccccatgaaggtcccttttgcgatcttatgtggagcgatcctgaagacattgaaacatgggctgttagtccacgtggagctggttggcttttcggatcgagggttaccactgagtttaaccacataaacaagcttgatctagtatgccgtgcacaccagctggtacaagaaggtcttaagtacatgttccaagataaaagccttgtaacggtatggtctgcgcctaattactgctatcgctgtgggaatgtagcttctatattgagtttcgatgacaacatggaaaaatcagtgaagtacttcacagagacggaagagaacaatcaaatgagagggccaaggactggagttccatatttcctatga

SEQ ID NO: 89800 - protein, 303 aa, Brassica napus
MDLDQWISKVKDGQHLSEDELHLLCEYVKEILIEESNVQPVNSPVTVCGDIHGQFHDLMKLFQTGGHVPDTNYIFMGDFVDRGYNSLEVFTILLLLKARYPAHITLLRGNHESRQLTQVYGFYDECQRKYGNANAWRYCTDVFDYLTISAIIDSTVLCVHGGLSPDVRTIDQIRLVDRNCEIPHEGPFCDLMWSDPEDIETWAVSPRGAGWLFGSRVTTEFNHINKLDLVCRAHQLVQEGLKYMFQDKSLVTVWSAPNYCYRCGNVASILSFDDNMEKSVKYFTETEENNQMRGPRTGVPYFL

SEQ ID NO: 89801 - DNA, 939 bp, Brassica napus
  CDS (1)..(939)
atgacgcagcaagggcagggaagcatggaccctgccgttctcgacgacatcattcgtcgtttgttggattacagaaaccccaagcctggaaccaaacaggtcatgctcaacgagtctgagatccgacagctttgtctcgtctccagagagattttccttcagcagcctaacctccttgagctcgaagctcccatcaagatctgcggtgatattcatggacagtactcagatctactgaggctgtttgagtacggaggcttccctcctacagctaactatctgttcctaggagactacgtggaccgtgggaagcagagcttggagacgatctgtctcctcctcgcctacaaaatcaaataccctgagaacttcttcctcctaagaggaaaccacgagtgcgcttccatcaacagaatctacggattctacgacgaatgcaaacgtcgcttcagcgtgaggctctggaaagtgtttacagattctttcaactgcctcccggtggccgcagtaatagacgataagattctatgtatgcacggtggcctttctcccgatttgaccaacgtggaacagattaagaccatcaagcgacctaccgatgttccggacaccggtttgttatgtgatctgctttggtctgatccgagcaaagatgtcaaaggctgggggatgaatgaccgtggagtttcttacacgtttgggcctgataaagttgctgagtttttgataaagaatgatatggatctcatctgtcgtgctcaccaggttgtagaggatggttatgagttctttgcggatagacagcttgttactatattttcagctcctaattactgtggtgaattcgataatgctggtgctatgatgagtgttgatgagagtttaatgtgctctttccaaattcttaagcctgcggatcggaggccccggtttttatga

SEQ ID NO: 89802 - protein, 312 aa, Brassica napus
MTQQGQGSMDPAVLDDIIRRLLDYRNPKPGTKQVMLNESEIRQLCLVSREIFLQQPNLLELEAPIKICGDIHGQYSDLLRLFEYGGFPPTANYLFLGDYVDRGKQSLETICLLLAYKIKYPENFFLLRGNHECASINRIYGFYDECKRRFSVRLWKVFTDSFNCLPVAAVIDDKILCMHGGLSPDLTNVEQIKTIKRPTDVPDTGLLCDLLWSDPSKDVKGWGMNDRGVSYTFGPDKVAEFLIKNDMDLICRAHQVVEDGYEFFADRQLVTIFSAPNYCGEFDNAGAMMSVDESLMCSFQILKPADRRPRFL

SEQ ID NO: 89803 - DNA, 942 bp, Brassica napus
  CDS (1)..(942)
atgggcgcgaattcgattccgacggacgcaactctcgatctcgatgagcagatctctcagctcatgcagtgcaagcctctctccgagcaacaggttagagccttatgcgagaaagctaaggagattttgatggatgagagcaatgttcagcctgtcaagagcccggtgacaatctgtggtgatattcatggacagttccatgatcttgcagagcttttccgtattggaggaatgtgccctgataccaactatctatttatgggagactatgtcgatcgtggatattattctgtcgaaactgttacgctgttagttggcttgaaagtacggtatcctcagcgaatcactattcttagaggaaaccatgaaagtcgtcagattactcaggtttatggattttatgatgaatgcctgcgaaagtatggcaatgcaaatgtttggaagatctttacagacctctttgactatttcccactgacagccttggtggagtcagaaatattctgccttcacggtggattgtctccgtctatcgagacccttgacaacattaggaactttgatcgagttcaagaagttccccatgaagggccgatgtgtgacttattatggtctgatcctgatgaccgttgtggttggggcatctctcctcgtggtgccggatatacatttggtcaggacatatccgaacagttcaaccactcaaacagcttaaagctgatcgccagagcccatcagctggttatggatggatacaactgggctcatgagcaaaaggtggtaactatcttcagtgcaccaaactattgttaccgttgtgggaacatggcttcgattcttgaggttgatgactgcaggaaccacaccttcattcagtttgaaccagcaccaaggagaggagaaccagatgttactcggagaacaccagactatttcctgtga

SEQ ID NO: 89804 - protein, 313 aa, Brassica napus
MGANSIPTDATLDLDEQISQLMQCKPLSEQQVRALCEKAKEILMDESNVQPVKSPVTICGDIHGQFHDLAELFRIGGMCPDTNYLFMGDYVDRGYYSVETVTLLVGLKVRYPQRITILRGNHESRQITQVYGFYDECLRKYGNANVWKIFTDLFDYFPLTALVESEIFCLHGGLSPSIETLDNIRNFDRVQEVPHEGPMCDLLWSDPDDRCGWGISPRGAGYTFGQDISEQFNHSNSLKLIARAHQLVMDGYNWAHEQKVVTIFSAPNYCYRCGNMASILEVDDCRNHTFIQFEPAPRRGEPDVTRRTPDYFL

SEQ ID NO: 89805 - DNA, 921 bp, Brassica napus
  CDS (1)..(921)
atgccgccggacggagatctagaccgtcagatcgagcatctgatggagtgcaaacctttgtcggaggaggatgtgaggacgctctgcgatcaagctaaggccatcctcgtcgaggaatggaacgttcagcccgtgaaatgccccgttaccgtctgcggcgatatccacggccagttctatgaccttatcgagctttttcgaatcggtggcaacgcccccgatacgaattacctcttcatgggtgactatgtagaccgtggttactattcagtggaaacagtttctttattggtggcattgaaagtcagatacagggatcggattacaatcttgcgagggaaccacgagagtcgtcagatcacccaagtatatggtttctatgacgagtgcttgaggaagtacggaaacgcaaatgtgtggaagtatttcacagaccttttcgattatcttcctcttactgcccttatcgagagtcaggttttctgtttgcatggagggctatcaccttctctggatacacttgataacatccgaagcttggatcgtatacaggaggttccacatgaaggaccaatgtgtgatttattatggtctgatcctgatgatcgatgtgggtggggaatatctccacgaggtgctggttatacatttggacaggatatagcaactcagtttaatcacaacaatggactcagtctcatatcaagagcgcatcagcttgtcatggaaggttttaactggtgtcaggataagaatgtggtgacggtgtttagtgcaccaaactattgctaccggtgtggaaacatggcagcgattctagagataagtgagaacatggagcagaacttccttcagtttgatccagctccaagacaagtcgaaccagatactacccgtaagacccctgattattttttgtga

SEQ ID NO: 89806 - protein, 306 aa, Brassica napus
MPPDGDLDRQIEHLMECKPLSEEDVRTLCDQAKAILVEEWNVQPVKCPVTVCGDIHGQFYDLIELFRIGGNAPDTNYLFMGDYVDRGYYSVETVSLLVALKVRYRDRITILRGNHESRQITQVYGFYDECLRKYGNANVWKYFTDLFDYLPLTALIESQVFCLHGGLSPSLDTLDNIRSLDRIQEVPHEGPMCDLLWSDPDDRCGWGISPRGAGYTFGQDIATQFNHNNGLSLISRAHQLVMEGFNWCQDKNVVTVFSAPNYCYRCGNMAAILEISENMEQNFLQFDPAPRQVEPDTTRKTPDYFL

SEQ ID NO: 89807 - DNA, 921 bp, Zea mays
  CDS (1)..(921)
atgccatcgcacgcggatctggaccgccagatctcgcagctgcgggattgcaagttcctgcctgaggcggaggtcaaaacgctatgcgagcaggccaaggcgatcctcatggaggagtggaacgtgcagcccgtgcgctgccccgtcactgtctgcggcgacatccacggccagttctacgacctcatcgagctctttcgcatcggtggcgacgcgcccgacaccaactacctctttatgggcgactacgtcgaccgtggctactactcagtggagactgtgtccttattggtggctctaaaagtacgttatagagacagaatcacaatattgagaggaaatcatgagagtagacaaataactcaagtgtatggcttctatgatgaatgcttgcggaaatatggaaatgcaaatgtgtggaagtactttacagacttgtttgattatttgcctctcacagctcttatagaaaatcagatcttctgcctacatggtggtctctctccatcactggatactttggataatgtccgctcccttgatcgcatacaagaggtcccgcatgaaggacctatgtgtgatcttttgtggtctgacccggatgacagatgtggatggggaatttcaccaaggggtgctggatacacatttggccaagatattgcacaacaattcaaccatacaaatgggctaagtcttatttcaagagctcatcaacttgtaatggaagggttcaattggtgccaggataagaacgttgtgacagtgttcagcgcgcctaactattgctaccgatgcgggaacatggctgcgatcctcgaaattggcgagaacatggatcagaacttcctccaattcgacccagctccgcggcagattgagccggacatgacgcgcaagaccccagactactttttgtaa

SEQ ID NO: 89808 - protein, 306 aa, Zea mays
MPSHADLDRQISQLRDCKFLPEAEVKTLCEQAKAILMEEWNVQPVRCPVTVCGDIHGQFYDLIELFRIGGDAPDTNYLFMGDYVDRGYYSVETVSLLVALKVRYRDRITILRGNHESRQITQVYGFYDECLRKYGNANVWKYFTDLFDYLPLTALIENQIFCLHGGLSPSLDTLDNVRSLDRIQEVPHEGPMCDLLWSDPDDRCGWGISPRGAGYTFGQDIAQQFNHTNGLSLISRAHQLVMEGFNWCQDKNVVTVFSAPNYCYRCGNMAAILEIGENMDQNFLQFDPAPRQIEPDMTRKTPDYFL

SEQ ID NO: 89809 - DNA, 993 bp, Glycine max
  CDS (1)..(993)
atggaacgtggggttcttgatagtatcattaataggctgcttgaagtcagaggcagaccagggaagcaggtgcaactttctgaggctgagatcaagcagctttgtcttgtctccagggatatattcttgaggcagcccaacctcttggaactcgaggcaccaattaagatatgtggagatgtccacggtcaatattccgaccttctgcgactttttgagtatggtggattgcctcctcgttctaattacttatttttaggggactatgttgatcgtgggaagcaaagtttggagacaatatgtctccttctggcttataaaataaaatatcccaacaactttttccttctgaggggaaaccatgaatgtgcttctataaaccgcatttacggattttatgatgagtgtaaacgaaggtacaatgtgaggctttggaaagtgttcacagagtgtttcaactgcttgccagtggcagctctaattgatgaaaagatactttgtatgcatggtggactctctcctgagttacacaatttaaatcagataaagggtttgccacgtcctattgaagtacctgaaactggtctactatgtgacctcctttggtctgatcctagtagtgacattcggggttggggagaaaatgaacgcggagtttcctatacttttggtgctgacagggtgacagaattccttcagaagcatgatcttgatttgatttgcagggcgcatcaggttgtagaagacggatatgaattctttgctaacagacaacttgtaaccatcttctcggctcctaattactgtggagagtttgacaatgctggtgctatgatgactgttgatgagacacttgtgtgctcttttcaaatattgaagcctgtagaaaataaaaagcctaataagtttgcctttgggagcacaactacagttaagcatagtactccaacaaaaaccaagttccagcaatcattttttggtgctaaagcatga

SEQ ID NO: 89810 - protein, 330 aa, Glycine max
MERGVLDSIINRLLEVRGRPGKQVQLSEAEIKQLCLVSRDIFLRQPNLLELEAPIKICGDVHGQYSDLLRLFEYGGLPPRSNYLFLGDYVDRGKQSLETICLLLAYKIKYPNNFFLLRGNHECASINRIYGFYDECKRRYNVRLWKVFTECFNCLPVAALIDEKILCMHGGLSPELHNLNQIKGLPRPIEVPETGLLCDLLWSDPSSDIRGWGENERGVSYTFGADRVTEFLQKHDLDLICRAHQVVEDGYEFFANRQLVTIFSAPNYCGEFDNAGAMMTVDETLVCSFQILKPVENKKPNKFAFGSTTTVKHSTPTKTKFQQSFFGAKA

SEQ ID NO: 89811 - DNA, 927 bp, Glycine max
  CDS (1)..(927)
atgtcatcatcttcagacctggacaggcaaatagagcagttgaagaggtgtgagcctcttaaggagtctgaagtgaaggtgctctgcctcaaagccatggaaatcctcgtcgaagagagcaacgttcaaagggtcgacgctcctgtcaccatatgtggtgatattcacggtcagttttatgacatgaaggagcttttcaaagtaggaggggattgccccaaaactaactatttattcctgggggattttgttgatagagggttttactcggttgaaacgtttctgcttctgctcgctcttaaggtgaggtatccagatcggataacacttattaggggaaaccatgaaagccgtcagatcactcaggtatatggattctatgatgagtgccttcgaaaatatggttcagtcaatgtctggagatattgtaccgatatatttgactacttaagcttgtctgccctaattgaaaacaagattttcagtgttcatggcggtctttctcctgccatttcaacactggatcagatacgaactattgatcggaagcaagaagtacctcatgatggtgccatgtgtgaccttctatggtcagatcctgaagatattgtggataactggggtcttagtccccgcggtgctggttacttatttggtggcagtgttgttacttcctttaaccactcaaataacattgactatatatgtcgtgcacatcagttggtaatggaaggatataaatggatgttcaataaccagatagttactgtctggtcagctccaaattattgctacagatgtggcaatgtagctgcaattctggagttggatggaaatcttaataagcagttccgggtgtttgaagctgctccacaggaatcaagaggaacacctgctaagaaaccagcaccagattactttttatga

SEQ ID NO: 89812 - protein, 308 aa, Glycine max
MSSSSDLDRQIEQLKRCEPLKESEVKVLCLKAMEILVEESNVQRVDAPVTICGDIHGQFYDMKELFKVGGDCPKTNYLFLGDFVDRGFYSVETFLLLLALKVRYPDRITLIRGNHESRQITQVYGFYDECLRKYGSVNVWRYCTDIFDYLSLSALIENKIFSVHGGLSPAISTLDQIRTIDRKQEVPHDGAMCDLLWSDPEDIVDNWGLSPRGAGYLFGGSVVTSFNHSNNIDYICRAHQLVMEGYKWMFNNQIVTVWSAPNYCYRCGNVAAILELDGNLNKQFRVFEAAPQESRGTPAKKPAPDYFL

SEQ ID NO: 89813 - DNA, 927 bp, Glycine max
  CDS (1)..(927)
atgtcatcatcttcagacctggacaggcaaatagagcagttgaagaggtgtgagcctcttaaggagtctgaagtgaaggcgctttgcctcaaagccatggaaatccttgtcgaagagagcaacgttcaaagggtcgacgcccctgtcaccatatgtggtgatattcacggtcagttttatgacatgaaggagcttttcaaagtaggaggggattgccccaaaactaactatttgtttctgggggattttgttgatagagggttttactcggttgaaacgtttctgcttctgctcgctcttaaggtgaggtatccggatcggataacactcattaggggaaaccatgaaagccgtcagatcacccaggtgtatggattctatgatgagtgccttcgaaaatatggttcagtcaatgtctggagatattgtaccgatatattcgactacttaagcttgtccgctctaattgaaaacaagattttcagtgttcatggtggtctttctcctgccatttcaacactggatcagatacgaactattgatcggaagcaagaagtacctcatgatggtgccatgtgtgaccttctatggtcagatcctgaagatattgtggataactggggtcttagtccccgcggtgctggttacttatttggtggcagtgttgttacttcctttaaccactcaaataacattgactatatatgtcgtgcacatcagttggtaatggaaggatataaatggatgttcaataaccagatagttactgtctggtcagctccaaattattgctacagatgtggcaatgtagctgcaattctggagttggatggaaatcttaataagcagttccgggtgtttgaagctgctccacaggaatcaagaggaacacctgctaagaaaccagcaccagattactttttatga

SEQ ID NO: 89814 - protein, 308 aa, Glycine max
MSSSSDLDRQIEQLKRCEPLKESEVKALCLKAMEILVEESNVQRVDAPVTICGDIHGQFYDMKELFKVGGDCPKTNYLFLGDFVDRGFYSVETFLLLLALKVRYPDRITLIRGNHESRQITQVYGFYDECLRKYGSVNVWRYCTDIFDYLSLSALIENKIFSVHGGLSPAISTLDQIRTIDRKQEVPHDGAMCDLLWSDPEDIVDNWGLSPRGAGYLFGGSVVTSFNHSNNIDYICRAHQLVMEGYKWMFNNQIVTVWSAPNYCYRCGNVAAILELDGNLNKQFRVFEAAPQESRGTPAKKPAPDYFL

SEQ ID NO: 89815 - DNA, 936 bp, Glycine max
  CDS (1)..(936)
atggattcggtgccttcgaattcgcatggaaacctcgatgagcagatttctcagctcatgcagtgcaaacccttgtccgagcaagaggtaagggtcttgtgtgataaggcaaaagaaattttgatggaagagagcaatgtccagcctgtgaaaagtcctgttacaatttgtggtgatattcatgggcaattccatgatcttgcagagctttttcgcattggagggaagtgtccagatacaaattacttgtttatgggagattatgttgatcgtggctattattctgttgaaactgttacgcttttggttgcccttaaagtgcgttatcgtcagcgtatcactattctgaggggaaatcatgaaagtcgccagattactcaagtttatgggttttatgatgagtgcctgcggaagtatggtagtgctaatgtttggaagatctttactgatttgtttgactactttccgttgacagcattggttgaatctgaaatattttgtcttcatggtgggttgtcgccatctattgaaaccctggataacatacgtaattttgatcgcgtacaagaagttcctcatgagggacccatgtgtgatcttctatggtctgatccagatgatcgttgtggttggggcatctctcctagaggtgctggatatacctttggccaggacatatctgagcaatttaaccataccaataacttgaagctgattgctagagctcaccagctggttatggaaggatataactggggacatgatcaaaaggtggttactatatttagtgcacctaactattgttatcgttgtgggaatatggcatcaattcttgaggttgatgactgcaaaggacacacattcattcagtttgagccagctccaaggaggggagagccagatgtaaccaggagaacgcctgattacttcctatga

SEQ ID NO: 89816 - protein, 311 aa, Glycine max
MDSVPSNSHGNLDEQISQLMQCKPLSEQEVRVLCDKAKEILMEESNVQPVKSPVTICGDIHGQFHDLAELFRIGGKCPDTNYLFMGDYVDRGYYSVETVTLLVALKVRYRQRITILRGNHESRQITQVYGFYDECLRKYGSANVWKIFTDLFDYFPLTALVESEIFCLHGGLSPSIETLDNIRNFDRVQEVPHEGPMCDLLWSDPDDRCGWGISPRGAGYTFGQDISEQFNHTNNLKLIARAHQLVMEGYNWGHDQKVVTIFSAPNYCYRCGNMASILEVDDCKGHTFIQFEPAPRRGEPDVTRRTPDYFL

SEQ ID NO: 89817 - DNA, 948 bp, Glycine max
  CDS (1)..(948)
atgagcacacaaggacaagtgattgatgaggcggttctggatgacataatccggcgcctaacggaggtccgattggcccgacccggaaagcaggttcagctctccgagtctgagatcaagcaactttgcgtcgcttccagagacatcttcattaaccagcccaatttgcttgaactcgaagcccccatcaagatttgtggtgacattcatgggcagtacagtgatttgttaaggctatttgaatatgggggtttgcctcctactgccaattatctctttttgggggactatgtggaccgtgggaagcagagcttagaaaccatatgtcttttgcttgcgtataaaatcaaatatccagaaaactttttcctgttgagggggaatcatgagtgtgcttccattaataggatttatgggttttatgatgaatgtaagcgaaggtttaatgtgaggctttggaaagcctttaccgactgttttaacttccttcctgtggcagcccttatagatgataaaatattgtgcatgcatggtggtctttcccctgaactcacaaacttggatgaaatcaggaatctacctcgtcctactgcaattcccgacaccggcttgctttgtgatttgctttggtctgatcctggtagggatgtgaagggttggggtatgaatgacagaggagtgtcctacacctttggccctgataaggtcgctgaattcttgacaaagcatgacttggaccttgtttgtcgtgctcaccaggttgtagaggatgggtatgaattctttgctgataggaaacttgttacgatattttcagctccaaactattgtggtgaatttgacaatgctggtgcgatgatgagtgtggatgaaaacttgatgtgctcatttcagattcttaagcctgcagagaaaaaatcaaagtttgtgatgtcaaacaagatgtga

SEQ ID NO: 89818 - protein, 315 aa, Glycine max
MSTQGQVIDEAVLDDIIRRLTEVRLARPGKQVQLSESEIKQLCVASRDIFINQPNLLELEAPIKICGDIHGQYSDLLRLFEYGGLPPTANYLFLGDYVDRGKQSLETICLLLAYKIKYPENFFLLRGNHECASINRIYGFYDECKRRFNVRLWKAFTDCFNFLPVAALIDDKILCMHGGLSPELTNLDEIRNLPRPTAIPDTGLLCDLLWSDPGRDVKGWGMNDRGVSYTFGPDKVAEFLTKHDLDLVCRAHQVVEDGYEFFADRKLVTIFSAPNYCGEFDNAGAMMSVDENLMCSFQILKPAEKKSKFVMSNKM

SEQ ID NO: 89819 - DNA, 993 bp, Glycine max
  CDS (1)..(993)
atggaacgtggggttcttgatagtatcattaataggctgcttgaagtcagaggcagaccagggaagcaggtgcaactttctgaggctgagatcaagcagctttgtcttgtctccagggatatatttatgaggcagcccaacctcttggaactcgaggcaccaattaagatatgtggagatatccacggtcaatattccgaccttctgcgactttttgagtatggtggattgcctcctcgttataactacttatttttaggggactatgttgatcgtgggaagcaaagtttggagacaatatgtctccttctgtcttataaaataaaatatcccaacaactttttccttctgaggggaaaccatgaatgtgcttctataaaccgcatttacggattttatgatgagtgtaaacgaaggtacaatgtgaggctttggaaagtgttcacagaatgtttcaactgcttgccagtggcagctctaattgatgaaaagatactttgtatgcatggtggactctctcctgagttacacaatctgaatcagataaagagtttgccgcgtcctattgaagtgcctgaaactggtctactatgtgacctcctttggtctgatcctagtagtgacattcggggttggggagagaatgaccgcggagtttcctatacttttggtgctgatagggtgacagaattccttcagaagcatgatcttgatttgatttgcagggcccatcaggtcatggaagacggatatgaattctttgctaacaggcaacttgtaaccatcttctcggctcctaattactgtggagagtttgacaatgctggtgctatgatgactgttgatgagacacttgtgtgctcttttcaaatattgaagcctgtagaaaataaaaagcctaataagtttgcctttgggagcacaactacagttaagcatagtactccaacaaaaaccaagttccagcaatcattttttggtgctaaagcatga

SEQ ID NO: 89820 - protein, 330 aa, Glycine max
MERGVLDSIINRLLEVRGRPGKQVQLSEAEIKQLCLVSRDIFMRQPNLLELEAPIKICGDIHGQYSDLLRLFEYGGLPPRYNYLFLGDYVDRGKQSLETICLLLSYKIKYPNNFFLLRGNHECASINRIYGFYDECKRRYNVRLWKVFTECFNCLPVAALIDEKILCMHGGLSPELHNLNQIKSLPRPIEVPETGLLCDLLWSDPSSDIRGWGENDRGVSYTFGADRVTEFLQKHDLDLICRAHQVMEDGYEFFANRQLVTIFSAPNYCGEFDNAGAMMTVDETLVCSFQILKPVENKKPNKFAFGSTTTVKHSTPTKTKFQQSFFGAKA

SEQ ID NO: 89821 - DNA, 912 bp, Glycine max
  CDS (1)..(912)
atggatttggaccagtggatctccaaggtcaaagatggccagcatcttcttgaagacgagcttcaacttctctgcgaatatgtaaaagagatccttattgaggagtccaatgtgcagcctgtcaatagtccagtgactgtttgtggtgatattcatggtcaattccatgatctaatgaaacttttccagactgggggtcatgtgcctgagacaaattatatttttatgggagactttgttgatcgaggttacaatagtcttgaagttttcaccatccttttacttctaaaagctagatacccagctaatattacccttttacgtggaaatcatgaaagtagacaattaacccaggtctatggattttatgatgaatgccagaggaagtatggcaatgccaatgcttggcggtattgtacagatgtgtttgactatctaacactttctgcaattattgatggaactgtgctttgtgttcatgggggcctttctcctgacattcgaacaattgatcagataagggtcattgaccggaactgtgaaattcctcatgagggtcctttctgtgatctaatgtggagtgatcctgaagatattgaaacatgggcagtcagtccccgtggagcaggttggctttttggatccagggtcacttcggagttcaatcacataaataaccttgatcttgtttgtcgagcgcaccaactcgttcaggaaggccttaagtatatgttccaagataaaggccttgtaactgtatggtctgcacctaattactgttaccgatgtggaaatgtagcttctattctgagtttcaatgaaaatatggaaagagaagttaaatttttcaccgaaacagaggagaacaatcagatgagagggcccaggacaggcgttccatatttcttataa

SEQ ID NO: 89822 - protein, 303 aa, Glycine max
MDLDQWISKVKDGQHLLEDELQLLCEYVKEILIEESNVQPVNSPVTVCGDIHGQFHDLMKLFQTGGHVPETNYIFMGDFVDRGYNSLEVFTILLLLKARYPANITLLRGNHESRQLTQVYGFYDECQRKYGNANAWRYCTDVFDYLTLSAIIDGTVLCVHGGLSPDIRTIDQIRVIDRNCEIPHEGPFCDLMWSDPEDIETWAVSPRGAGWLFGSRVTSEFNHINNLDLVCRAHQLVQEGLKYMFQDKGLVTVWSAPNYCYRCGNVASILSFNENMEREVKFFTETEENNQMRGPRTGVPYFL

SEQ ID NO: 89823 - DNA, 981 bp, Glycine max
  CDS (1)..(981)
atggaccaagctcttctggacgacataatcaatcgccttctcgaagttcgcagccggccggggaagcaggtgcagctgtcggagtcggagatccgccatctctgtgccgcttccagagagattttcttgcagcaacctaatttgttggagcttgaagcacccattaagatttgcggtgatgtacatggtcaatattctgatcttttaaggctttttgagtatggtggactacctcccgaggccaactacttatttttgggggattatgtagatcgagggaagcagagtttggaaacaatatgccttctcctagcatataaaataaaatatcccgagaattttttccttttgaggggtaaccatgaatgtgcttctattaaccgtatatatgggttttatgacgagtgtaaaagaaggttcaatgtaaggttatggaagacatttacagaatgcttcaattgccttcctgtggcagcactaattgatgaaaagattttgtgcatgcatgggggtctttctcctgacatacttaatctggatcagattagaaatctacagcggcccactgatgtgcctgatacaggtttgctttgtgatctcctctggtcagacccaagcaaagaggtccaaggttggggaatgaatgacaggggagtttcatatacatttggtgctgataaggtctcagagtttcttcagaaacatgatttggatcttatttgtcgtgctcatcaggtggtggaggatgggtacgagttctttgctaaccggcagcttgtaacaatattttcagcacctaattattgtggagagtttgacaatgctggcgctatgatgagtgttgatgagacactaatgtgctctttccaaatattaaagccagctgataaaaaagcaaagctcaactttggaagtactactactactaagccaggaaactctccagcaggcataaagtccttcctgggtacaaaagtatga

SEQ ID NO: 89824 - protein, 326 aa, Glycine max
MDQALLDDIINRLLEVRSRPGKQVQLSESEIRHLCAASREIFLQQPNLLELEAPIKICGDVHGQYSDLLRLFEYGGLPPEANYLFLGDYVDRGKQSLETICLLLAYKIKYPENFFLLRGNHECASINRIYGFYDECKRRFNVRLWKTFTECFNCLPVAALIDEKILCMHGGLSPDILNLDQIRNLQRPTDVPDTGLLCDLLWSDPSKEVQGWGMNDRGVSYTFGADKVSEFLQKHDLDLICRAHQVVEDGYEFFANRQLVTIFSAPNYCGEFDNAGAMMSVDETLMCSFQILKPADKKAKLNFGSTTTTKPGNSPAGIKSFLGTKV

SEQ ID NO: 89825 - DNA, 981 bp, Glycine max
  CDS (1)..(981)
atggaacaatcggttttggatgatataatcaatcgcctcctcgaagttcgtacccgaccggggaagcaggttcagctatcggagtccgagatccgtcaactctgcgtagtttccagagagattttcttgcaacaacctaatttattagagcttgaagcacctattaagatttgtggtgatgtacatgggcaatattctgatcttttaaggctttttgagtacggtggattacctccagaagccaactacttgtttttgggggattatgtggatcgagggaagcaaagtttagaaacaatttgccttctccttgcttataaaataaaatatcctgagaactttttcctgttaaggggaaaccatgaatgtgcttctataaaccggatatatggattttatgatgagtgcaagagaaggttcaatgtaaggttatggaagacatttacagactgcttcaattgcctgcctgtggcagcccgtgttgatgaaaagattttgtgtatgcatggaggactttctcccgacttaaataatttggatcagattagaaatttacagcggcccacagatgttcctgatacaggtttgctttgtgatctcctttggtctgacccgagcagagatgttcaaggatggggaatgaatgacagaggagtttcatttacatttggtgctgataaggtctcagagtttcttcagaaacatgatcttgatcttatttgtcgtgctcatcaggttgtggaagatggatatgagttctttgctaatcgacaacttgtaacaatattttcagcacctaattattgtggggaatttgacaatgctggtgctatgatgagtgttgatgagacactaatgtgctctttccaaatattaaagccagctgataaaaaagcaaagctcaattttggaagtacaaccactgctaagcctggaaactccccagctggtgtaaagtgcttcctgggtgcgaaagtatga

SEQ ID NO: 89826 - protein, 326 aa, Glycine max
MEQSVLDDIINRLLEVRTRPGKQVQLSESEIRQLCVVSREIFLQQPNLLELEAPIKICGDVHGQYSDLLRLFEYGGLPPEANYLFLGDYVDRGKQSLETICLLLAYKIKYPENFFLLRGNHECASINRIYGFYDECKRRFNVRLWKTFTDCFNCLPVAARVDEKILCMHGGLSPDLNNLDQIRNLQRPTDVPDTGLLCDLLWSDPSRDVQGWGMNDRGVSFTFGADKVSEFLQKHDLDLICRAHQVVEDGYEFFANRQLVTIFSAPNYCGEFDNAGAMMSVDETLMCSFQILKPADKKAKLNFGSTTTAKPGNSPAGVKCFLGAKV

SEQ ID NO: 89827 - DNA, 960 bp, Glycine max
  CDS (1)..(960)
atggaacggggggttctcgatggtatcatcaataccctgattcaagtcagacgcagacctgggaaacaggttcagctttcagaggcagaaatcaggcaactttgtgcggtttccagagatatctttttgaagcagcccaatctattggaactggagccaccaattaagatatgcggagacatccatggtcaatattctgaccttctgagactatttgagcatggtggattgcctcctcgctccaactacttattcttaggcgattatgtcgaccgtggaaagcaaagccttgagacaatatgtcttcttttggcatacaagataaagtaccctgagaacttcttcctccttagaggcaatcatgaatgtgcttccataaaccgcgtctacggcttctacgacgaatgtaaacggcgattcaacgtcaggctatggaaaatatttgcagattgcttcaactgcatgcctgtggcagctatcattgaggaaaagattttctgtatgcatggtggactctctccagaattgcacaatctaagtcagataagtagtttgccgcgtccaaccgaagtacccgagagtggtctactatgtgatctcttgtggtctgatcctagtaaagacattgagggttggggagacaatgagcgcggagtttcttatacttttggtgctagcagggtgacagaatttcttggaaagcatgatctagacctgatttgtagagcacaccaggttgttgaagatggatatgaattttttgccaatagacaacttgtgactatcttttctgcacctaactactgtggagaatttgacaatgctggagcaatgatgactgttgatgagacactcatgtgctcttttcagatactaaggcctgcggaacacagaaagcctaagtttgcttttgggagcaaaactacattcaaggcaattcttgatgctgctagagtatga

SEQ ID NO: 89828 - protein, 319 aa, Glycine max
MERGVLDGIINTLIQVRRRPGKQVQLSEAEIRQLCAVSRDIFLKQPNLLELEPPIKICGDIHGQYSDLLRLFEHGGLPPRSNYLFLGDYVDRGKQSLETICLLLAYKIKYPENFFLLRGNHECASINRVYGFYDECKRRFNVRLWKIFADCFNCMPVAAIIEEKIFCMHGGLSPELHNLSQISSLPRPTEVPESGLLCDLLWSDPSKDIEGWGDNERGVSYTFGASRVTEFLGKHDLDLICRAHQVVEDGYEFFANRQLVTIFSAPNYCGEFDNAGAMMTVDETLMCSFQILRPAEHRKPKFAFGSKTTFKAILDAARV

SEQ ID NO: 89829 - DNA, 966 bp, Glycine max
  CDS (1)..(966)
atggacgagaacctgctcgacgatattatccggaggctcgtcgcggcgaagaacggtagaacgacgaagcaggtgcagcttacggaggcagaaattcgacaactctgtgtttcctccaaagagatctttctcagtcaacctaatcttctcgaactcgaggctcctattaagatttgtggagatgttcatggccaatactcagatcttttaaggttgttcgaatatgggggatacccacctgaagcaaattatttatttctcggagattatgttgatcgtggtaagcagagcatagagacaatatgtttactcctcgcctacaagatcaaatacaaggagaatttctttcttctcaggggcaaccatgagtgtgcatccatcaatcgtatatatggtttctatgatgagtgtaagaggaggtttaatgttcgcctctggaagacatttactgattgctttaattgcctacctgtcgctgctctgatagatgagaagatcctttgcatgcatggtggactatcgcctgatcttaaacacttggatcagattcggagtattgctcgtcctattgatgtgccagatcatggccttctctgtgaccttctatgggctgatcccgataaagatctagatgggtggggagaaaatgaccgaggtgtgtcatttacatttggggctgataaggttgctgagtttcttgaacatcatgatctcgatctgatttgccgagctcaccaggttgtagaggatggatacgagttttttgccaagcgtcagctggtgacgatattctccgcaccaaattactgcggtgaatttgataatgctggtgctatgatgagtgtggatgacaccttgacatgctctttccaaatacttaaatcttctgaaaagaaagggaaatgtggatttggcaacaacacatcaagaccaggaactccaccacataagggtgggaagaattaa

SEQ ID NO: 89830 - protein, 321 aa, Glycine max
MDENLLDDIIRRLVAAKNGRTTKQVQLTEAEIRQLCVSSKEIFLSQPNLLELEAPIKICGDVHGQYSDLLRLFEYGGYPPEANYLFLGDYVDRGKQSIETICLLLAYKIKYKENFFLLRGNHECASINRIYGFYDECKRRFNVRLWKTFTDCFNCLPVAALIDEKILCMHGGLSPDLKHLDQIRSIARPIDVPDHGLLCDLLWADPDKDLDGWGENDRGVSFTFGADKVAEFLEHHDLDLICRAHQVVEDGYEFFAKRQLVTIFSAPNYCGEFDNAGAMMSVDDTLTCSFQILKSSEKKGKCGFGNNTSRPGTPPHKGGKN

SEQ ID NO: 89831 - DNA, 945 bp, Glycine max
  CDS (1)..(945)
atgggcgccaattcgttgtcatcggcggaatcaaccctcgatctcgacgagcagatatcgcagctcatgcaatgcaagccactctccgaacaccaggttagagttttatgtgagaaggctaaggagattttgatggatgaaagtaatgtccagcctgtgaaaagccccgtgacaatttgtggtgatatccatgggcagtttcatgatcttgctgaactatttcgaattggagggaagtgtccagatactaattacttgtttatgggtgattatgtggaccggggttattattcagttgaaactgtaacacttcttgtgtcactgaaagtgcgatatcctcagcgaattactattcttagaggaaaccatgaaagccgtcagatcactcaagtatatggatgttacgatgaatgcctcagaaaatatggtaatgctagtgtttggaagatctttactgacctttttgatttttttccattgactgcattggttgaatcagaaatattctgtttgcatggtggactgtcaccttcaattgagacccttgataacataaggaactttgatcgtgttcaagaagttcctcatgaaggccccatgtgtgatctattgtggtctgacccagatgacagatgtggctggggaatttctcctcgtggtgctggatatacttttggccaggatatatctgaacaattcaatcacacaaacagccttaagttgattgctagagctcatcagcttgttatggatggatttaactgggctcatgaacaaaaggtggttaccatttttagtgcacctaactactgttaccgatgtgggaacatggcttccatattggaggttgatgattgcaagggccacacatttatccagtttgaacctgctcctaggagaggagaacctgatgtcactcgtagaacgcctgattacttcttataa

SEQ ID NO: 89832 - protein, 314 aa, Glycine max
MGANSLSSAESTLDLDEQISQLMQCKPLSEHQVRVLCEKAKEILMDESNVQPVKSPVTICGDIHGQFHDLAELFRIGGKCPDTNYLFMGDYVDRGYYSVETVTLLVSLKVRYPQRITILRGNHESRQITQVYGCYDECLRKYGNASVWKIFTDLFDFFPLTALVESEIFCLHGGLSPSIETLDNIRNFDRVQEVPHEGPMCDLLWSDPDDRCGWGISPRGAGYTFGQDISEQFNHTNSLKLIARAHQLVMDGFNWAHEQKVVTIFSAPNYCYRCGNMASILEVDDCKGHTFIQFEPAPRRGEPDVTRRTPDYFL

SEQ ID NO: 89833 - DNA, 927 bp, Glycine max
  CDS (1)..(927)
atgtcatcatcttcagacctggacaggcaaatagagcagttgaagaggtgtgagcctcttaaggagtctgaagtgaaggtgctctgcctcaaagccatggaaatcctcgtcgaagagagcaacgttcaaagggtcgacgctcctgtcaccatatgtggtgatattcacggtcagttttatgacatgaaggagcttttcaaagtaggaggggattgccccaaaactaactatttattcctgggggattttgttgatagagggttttactcggttgaaacgtttctgcttctgctcgctcttaaggtgaggtatccagatcggataacacttattaggggaaaccatgaaagccgtcagatcactcaggtatatggattctatgatgagtgccttcgaaaatatggttcagtcaatgtctggagatattgtaccgatatatttgactacttaagcttgtctgccctaattgaaaacaagattttcagtgttcatggcggtctttctcctgccatttcaacactggatcagatacgaaccattgatcggaagcaagaagtacctcatgatggtgccatgtgtgaccttctatggtcagatcctgaagatattgtggatagctggggtcttagtccccgtggtgctggttacttatttggtggcagtgttgttacttcctttaaccactccaataacattgactatatatgtcgtgcacatcagttggtaatggaaggatataaatggatgttcaataaccagatagttactgtctggtcagctccaaattattgctacagatgtggcaatgtagctgcaattctggagttggatggaaatcttactaagcaattccgggtgtttgaagctgctccacaggaatcaagaggaacacctgctaagaaaccagcaccagattactttttatga

SEQ ID NO: 89834 - protein, 308 aa, Glycine max
MSSSSDLDRQIEQLKRCEPLKESEVKVLCLKAMEILVEESNVQRVDAPVTICGDIHGQFYDMKELFKVGGDCPKTNYLFLGDFVDRGFYSVETFLLLLALKVRYPDRITLIRGNHESRQITQVYGFYDECLRKYGSVNVWRYCTDIFDYLSLSALIENKIFSVHGGLSPAISTLDQIRTIDRKQEVPHDGAMCDLLWSDPEDIVDSWGLSPRGAGYLFGGSVVTSFNHSNNIDYICRAHQLVMEGYKWMFNNQIVTVWSAPNYCYRCGNVAAILELDGNLTKQFRVFEAAPQESRGTPAKKPAPDYFL

SEQ ID NO: 89835 - DNA, 942 bp, Glycine max
  CDS (1)..(942)
atgggcgccaattccatgctcgccgagtcctctcacgatctcgacgaccagatctcccagctcatgcagtgcaagccactctccgagcaacaggtcagaggtttatgtgagaaggctaaggagattttaacggatgaaagtaatgttcagcctgttaaaagccctgtgacaatttgtggcgatattcatgggcagtttcatgatcttgctgaactgtttcgaattggagggaagtgtccagatactaactacttgtttatgggtgattatgtggaccggggttattattcagttgagactgtatcgctccttgtggcactgaaagttcggtatccccagcgaattactattcttagaggaaaccatgaaagccgtcagattactcaagtatatggattttatgatgaatgccttagaaagtatggtaatgctaatgtttggaagacctttacagacctttttgatttttttccattgactgcattggttgaatcagaaatattctgtttgcatggtggactgtcaccttcaattgagacccttgataacataaggaactttgatcgtgttcaagaggttcctcatgaaggccccatgtgtgatctattgtggtctgacccagatgacagatgtggctggggaatttctcctcgtggtgctggatatacttttggccaggatatatctgaacaattcaatcacacaaacagccttaaattgattgctagagctcatcagcttgttatggatggatttaactgggctcatgaacaaaaggtggttaccatttttagtgcacctaactactgttaccgatgtgggaacatggcttccatattggaggttgatgattgcaagggtcacacattcatccagtttgaacctgctcctaggagaggagaacctgatgtcactcgtagaacgcctgattacttcttataa

SEQ ID NO: 89836 - protein, 313 aa, Glycine max
MGANSMLAESSHDLDDQISQLMQCKPLSEQQVRGLCEKAKEILTDESNVQPVKSPVTICGDIHGQFHDLAELFRIGGKCPDTNYLFMGDYVDRGYYSVETVSLLVALKVRYPQRITILRGNHESRQITQVYGFYDECLRKYGNANVWKTFTDLFDFFPLTALVESEIFCLHGGLSPSIETLDNIRNFDRVQEVPHEGPMCDLLWSDPDDRCGWGISPRGAGYTFGQDISEQFNHTNSLKLIARAHQLVMDGFNWAHEQKVVTIFSAPNYCYRCGNMASILEVDDCKGHTFIQFEPAPRRGEPDVTRRTPDYFL

SEQ ID NO: 89837 - DNA, 981 bp, Glycine max
  CDS (1)..(981)
atggaccaagctcttgtggacgacataatcaaccgccttctcgaagttcgcggccgcccgggcaagcaggtgcaactgtcggagtcggagatccgccagctctgtgccgcttccagagagattttcctgcagcaacctaatttgttggagcttgaagcacccattaagatttgcggtgatgtacatggtcaatattctgatcttttaaggctttttgagtatggcggactacctcctgaggccaactacttatttttgggggattatgtggatcgagggaagcagagtttggaaacaatatgccttctcctagcatataaaataaaatatcccgagaattttttccttttgaggggtaaccatgaatgtgcttctattaaccgtatatatggattttatgatgagtgtaaacgaaggttcaatgtaaggttatggaagacatttacagaatgcttcaattgccttcctgtggcagcactgattgatgaaaagattttgtgcatgcatgggggtctttctcctgacttgcttaatttggatcagattagaaatctacaacggcccactgatgtgcctgatacaggtttgctttgtgatctcctctggtcagacccaagcaaagaggtccaaggttggggaatgaatgacaggggagtttcatatacatttggtgctgataaggtctcagagtttcttcaaaaacatgatttggatcttatttgtcgtgctcatcaggtggtggaagatgggtatgagttctttgctaaccggcagcttgtaacaatattttcagcacctaattattgtggagagtttgacaatgctggcgctatgatgagtgtcgatgagacactaatgtgctctttccaaatattaaagccagctgataaaaaagcaaagctcaactttggaagtactactactactaagccaggaaactctccagcaggcataaagtccttcctgggtacaaaagtatga

SEQ ID NO: 89838 - protein, 326 aa, Glycine max
MDQALVDDIINRLLEVRGRPGKQVQLSESEIRQLCAASREIFLQQPNLLELEAPIKICGDVHGQYSDLLRLFEYGGLPPEANYLFLGDYVDRGKQSLETICLLLAYKIKYPENFFLLRGNHECASINRIYGFYDECKRRFNVRLWKTFTECFNCLPVAALIDEKILCMHGGLSPDLLNLDQIRNLQRPTDVPDTGLLCDLLWSDPSKEVQGWGMNDRGVSYTFGADKVSEFLQKHDLDLICRAHQVVEDGYEFFANRQLVTIFSAPNYCGEFDNAGAMMSVDETLMCSFQILKPADKKAKLNFGSTTTTKPGNSPAGIKSFLGTKV

SEQ ID NO: 89839 - DNA, 981 bp, Glycine max
  CDS (1)..(981)
atggaccaagctcttgtggacgacataatcaaccgccttctcgaagttcgcggccgcccgggcaagcaggtgcagctgtcggagtcggagatccgccagctctgtgccgcttccagagagattttcctgcagcaacctaatttgttggagcttgaagcacccattaagatttgcggtgatgtacatggtcaatattctgatcttttaaggctttttgagtatggcggactacctcctgaggccaactacttatttttgggggattatgtggatcgagggaagcagagtttggaaacaatatgccttctcctagcatataaaataaaatatcccgagaattttttccttttgaggggtaaccatgaatgtgcttctattaaccgtatatatggattttatgatgagtgtaaacgaaggttcaatgtaaggttatggaagacatttacagaatgcttcaattgccttcctgtggcagcactgattgatgaaaagattttgtgcatgcatgggggtctttctcctgacatgcttaatctggatcagattagaaatctacaacggcccactgatgtgcctgatacaggtttgctttgtgatctcctctggtcagacccaagcaaagaggtccaaggttggggaatgaatgacaggggagtttcatatacatttggtgctgataaggtctcagagtttcttcaaaaacatgatttggatcttatttgtcgtgctcatcaggtggtggaggatgggtacgagttctttgctaaccggcagcttgtaacaatattttcagcacctaattattgtggagagtttgacaatgctggcgctatgatgagtgttgatgagacactaatgtgctctttccaaatattaaagccagctgataaaaaagcaaagctcaactttggaagtactactactactaagccaggaaactctccagcaggcataaagtccttcctgggtacaaaagtatga

SEQ ID NO: 89840 - protein, 326 aa, Glycine max
MDQALVDDIINRLLEVRGRPGKQVQLSESEIRQLCAASREIFLQQPNLLELEAPIKICGDVHGQYSDLLRLFEYGGLPPEANYLFLGDYVDRGKQSLETICLLLAYKIKYPENFFLLRGNHECASINRIYGFYDECKRRFNVRLWKTFTECFNCLPVAALIDEKILCMHGGLSPDMLNLDQIRNLQRPTDVPDTGLLCDLLWSDPSKEVQGWGMNDRGVSYTFGADKVSEFLQKHDLDLICRAHQVVEDGYEFFANRQLVTIFSAPNYCGEFDNAGAMMSVDETLMCSFQILKPADKKAKLNFGSTTTTKPGNSPAGIKSFLGTKV

SEQ ID NO: 89841 - DNA, 945 bp, Glycine max
  CDS (1)..(945)
atgggcgccaattcgttgccatcggcggaatcaaacttcgatctcgacgagcagatctcgcagctcatgcaatgcaagccactttccgagcaccaggttagagttttatgtgagaaggctaaggagattttgatggaagaaagtaatgtccagcctgtgaaaagccctgtgacaatttgtggtgatattcatgggcagtttcatgaccttgctgaactatttcgaattggagggaagtgtccagatactaattacttgtttatgggtgattatgtggaccggggttattattcagttgaaactgtaacacttcttgtgtcactgaaagtgcgatatcctcagcgaattactattcttagaggaaaccatgaaagccgtcagatcactcaagtatacggattttacgatgaatgcctcagaaaatatggtaatgctagtgtttggaagatctttacagaccttttcgatttctttccattgactgcattggttgagtctgaaatattttgtttgcatggtgggctttcaccttcaattgagactcttgataacataaggaacttcgatcgtgttcaagaggttcctcatgaagggcccatgtgcgatctgttgtggtctgatccagatgataggtgtggctggggaatttctcctcgtggtgctggatatacatttggccaggatatatccgaacaatttaatcacacaaacaagcttaagttaattgctagagctcatcagctggttatggatggatttaactgggctcatgaacaaaaggtggttaccatttttagtgcacctaactactgttatcgatgtgggaacatggcctccattttggaggttgatgattccatgggccacacatttatccagtttgatcctgctcccaggagaggagaacctgatgtcacccgtagaacgcctgattacttcttatga

SEQ ID NO: 89842 - protein, 314 aa, Glycine max
MGANSLPSAESNFDLDEQISQLMQCKPLSEHQVRVLCEKAKEILMEESNVQPVKSPVTICGDIHGQFHDLAELFRIGGKCPDTNYLFMGDYVDRGYYSVETVTLLVSLKVRYPQRITILRGNHESRQITQVYGFYDECLRKYGNASVWKIFTDLFDFFPLTALVESEIFCLHGGLSPSIETLDNIRNFDRVQEVPHEGPMCDLLWSDPDDRCGWGISPRGAGYTFGQDISEQFNHTNKLKLIARAHQLVMDGFNWAHEQKVVTIFSAPNYCYRCGNMASILEVDDSMGHTFIQFDPAPRRGEPDVTRRTPDYFL

SEQ ID NO: 89843 - DNA, 921 bp, Glycine max
  CDS (1)..(921)
atgccgtctcacgcggatctggaccggcagatcgagcatctgatggagtgcaagcctctgccggaggccgaggtgaaggcgctgtgcgatcaggcgagggcgattctcgtcgaagagtggaacgttcagccggtgaagtgccccgtcaccgtctgcggcgacattcacggccagttctacgatctcatcgagctctttcggataggaggaaacgctcccgatactaattacctctttatgggcgattatgtagatcgtgggtactattcagtggagactgtcacgcttttggtggccttgaaagttcgttatagagatagaattacaatccttaggggaaatcatgagagccgtcaaatcactcaagtgtatggcttctacgatgaatgcttgagaaagtatggaaatgccaatgtctggaaattctttaccgatttgtttgattatttacctctgaccgcccttattgagagtcagattttctgtttgcatggaggtctctcaccatctttggatacacttgataatatccgtgccttggatcgcatacaggaggttccacacgaaggaccaatgtgtgacctcttgtggtctgatccagatgatcgctgtggttggggaatatctccacgtggtgctggatatacatttggacaggatatagctgctcagttcaatcataccaatggtctatcgctgatatctagagctcaccaacttgtaatggaaggattcaattggtgccaggacaagaatgtggtgactgtttttagtgcacctaattactgttaccgatgtgggaacatggctgccatactggaaattggagagaacatggatcagaattttctgcagtttgatccagctcccagacaaattgagcccgacactacacgaaagacgccagattattttttgtaa

SEQ ID NO: 89844 - protein, 306 aa, Glycine max
MPSHADLDRQIEHLMECKPLPEAEVKALCDQARAILVEEWNVQPVKCPVTVCGDIHGQFYDLIELFRIGGNAPDTNYLFMGDYVDRGYYSVETVTLLVALKVRYRDRITILRGNHESRQITQVYGFYDECLRKYGNANVWKFFTDLFDYLPLTALIESQIFCLHGGLSPSLDTLDNIRALDRIQEVPHEGPMCDLLWSDPDDRCGWGISPRGAGYTFGQDIAAQFNHTNGLSLISRAHQLVMEGFNWCQDKNVVTVFSAPNYCYRCGNMAAILEIGENMDQNFLQFDPAPRQIEPDTTRKTPDYFL

SEQ ID NO: 89845 - DNA, 912 bp, Helianthus annuus
  CDS (1)..(912)
atggatttggatctctggatatcgaaagtcaaagagggacagcacttgtccgaagatgaattgcagctgctctgtgaatacgtaaaagatatcttgattgaggaatcaaatgttcagccggtgaatagtccagttactgtttgtggtgatattcatggccagtttcatgatcttatgaagctttttcagactggaggtcatgtacctgagacaaattacattttcatgggggattttgttgaccgtggttacaacagtttggaagtttttactatacttttacttttaaaagcaagataccctgcaaacattactcttctgcgtgggaatcatgaaagtaggcaattaacacaggtttatgggttctacgatgaatgccaaaggaagtatgggaatgctaatgcatggagatattgcacagatgttttcgattatctcactttgtcagctataatagatggaactgttttatgtgttcatggtggtctttcacctgatattaggactgttgaccagattagagttattgaacggaactgtgagatcccccatgaaggaccattttgtgatctaatgtggagtgaccctgaggatattgaaacatgggccgtgagtccccgaggggccggctggctttttggatccagagttacatctgagttcaatcacatcaacaagcttgatttagtatgccgggcccaccaacttgtccaagaaggtttaaagtacatgtttcaggataaaggacttgtaactgtttggtctgcaccaaattactgctatcgctgtggcaatgtagcttcaatattgagtttcagtgagaacatggagagagaggtgaagttcttcacagaaacagaggaaaacaatcagatgagaggtccaagaacaggggtaccttattttttgtga

SEQ ID NO: 89846 - protein, 303 aa, Helianthus annuus
MDLDLWISKVKEGQHLSEDELQLLCEYVKDILIEESNVQPVNSPVTVCGDIHGQFHDLMKLFQTGGHVPETNYIFMGDFVDRGYNSLEVFTILLLLKARYPANITLLRGNHESRQLTQVYGFYDECQRKYGNANAWRYCTDVFDYLTLSAIIDGTVLCVHGGLSPDIRTVDQIRVIERNCEIPHEGPFCDLMWSDPEDIETWAVSPRGAGWLFGSRVTSEFNHINKLDLVCRAHQLVQEGLKYMFQDKGLVTVWSAPNYCYRCGNVASILSFSENMEREVKFFTETEENNQMRGPRTGVPYFL

SEQ ID NO: 89847 - DNA, 942 bp, Helianthus annuus
  CDS (1)..(942)
atgagctcggatccagttatgcagggggtgaatcacaatgttgatgaatatatctcccagctcatgcagtgcaaacccttgtctgaaccagaggttaagtcgttatgtgacaaggcaaaagagatcctgatgcaagaaagcaatgtgcagcctgttaaaagccctgtgacaatctgcggggatattcacgggcaatttcatgatctcgcagagcttttccggatcggagggaagtgcccggacacaaattatttattcatgggagattacgttgaccgtggttattactcggttgaaacagtgtctctcttggtggcccttaaagtgcgttatccgcaaaggcttactattctaagaggaaaccatgaaagtcgccagatcactcaagtgtacgggttttatgacgaatgcttaagaaaatacggaactgctaacgtgtggaagacatttaccgatctatttgattatttaccactcaccgcattggttgaatctgaaatcttttgtcttcatggtggattgtctccgtcaattgaaacactcgataatataagaaattttgaccgtgttcaagaagtgccccatgaggggcccatgtgtgatcttttatggtccgaccctgatgaccgttgcggttggggtatttcacctcggggcgctggatatacatttggtcaagatatatccgagcaatataatcatacaaacggcttaaagctaattgctagagcacaccagctggttatggagggattcaattggggacatgaacgaaaagttgtgacaatttttagcgcgcctaattattgttaccgttgtggaaatatggcttcaattcttgaagtggatgattgcaagggtcacacgttcattcagtttgaaccagctccaaggaggggagagcctgacgtgacacgtagaacacccgattatttcttatga

SEQ ID NO: 89848 - protein, 313 aa, Helianthus annuus
MSSDPVMQGVNHNVDEYISQLMQCKPLSEPEVKSLCDKAKEILMQESNVQPVKSPVTICGDIHGQFHDLAELFRIGGKCPDTNYLFMGDYVDRGYYSVETVSLLVALKVRYPQRLTILRGNHESRQITQVYGFYDECLRKYGTANVWKTFTDLFDYLPLTALVESEIFCLHGGLSPSIETLDNIRNFDRVQEVPHEGPMCDLLWSDPDDRCGWGISPRGAGYTFGQDISEQYNHTNGLKLIARAHQLVMEGFNWGHERKVVTIFSAPNYCYRCGNMASILEVDDCKGHTFIQFEPAPRRGEPDVTRRTPDYFL

SEQ ID NO: 89849 - DNA, 921 bp, Helianthus annuus
  CDS (1)..(921)
atgccgtcgcaatcggatctggaccgtcagatcgagcacttgatggactgtaaaccgctgccggaggcggaggtgcggacgttgtgtgatcaggcgaggacgattttggtcgaggagtggaatgtgcagccggtgaagtgtccggtgactgtttgcggtgatattcatgggcagtttcatgatttgcttgagctgtttcggatcggaggaagtgctccggacacgaattacttgtttatgggagattatgttgatcgaggctattactcggtggagactgttacgcttcttgtggcattgaaagttcgttacagagataggattactattctcagaggaaaccatgagagcaggcagataactcaagtgtatggattttacgatgaatgcttgaggaagtacggaaacgcaaatgtatggaaacatttcactgacctttttgattatctacctctcactgcccttatcgagagtcagatattctgtctccatggtggcttgtctccatctttggatacactagataacatacgtgctttagatcgcatacaagaggttcctcatgaggggccaatgtgtgaccttttgtggtctgatcctgatgaccggtgtggttggggaatatctcctcgtggagccggttacactttcgggcaggatatagccgcacagtttaaccatacaaacgggctctcgcttatttctcgggctcaccagcttgtcatggaaggttacaattggtctcaggagaacaacgttgtaaccatatttagtgcaccaaactactgctatagatgcgggaatatggctgcgatacttgaggttggagagaatatggaccagaatttcttacaatttgacccagcccctcgtcaggttgagcccgatgttgcacgaagaactccggattacttcctgtaa

SEQ ID NO: 89850 - protein, 306 aa, Helianthus annuus
MPSQSDLDRQIEHLMDCKPLPEAEVRTLCDQARTILVEEWNVQPVKCPVTVCGDIHGQFHDLLELFRIGGSAPDTNYLFMGDYVDRGYYSVETVTLLVALKVRYRDRITILRGNHESRQITQVYGFYDECLRKYGNANVWKHFTDLFDYLPLTALIESQIFCLHGGLSPSLDTLDNIRALDRIQEVPHEGPMCDLLWSDPDDRCGWGISPRGAGYTFGQDIAAQFNHTNGLSLISRAHQLVMEGYNWSQENNVVTIFSAPNYCYRCGNMAAILEVGENMDQNFLQFDPAPRQVEPDVARRTPDYFL

SEQ ID NO: 89851 - DNA, 963 bp, Hordeum vulgare
  CDS (1)..(963)
atggagaaggggatggatccggcgctgctggacaacatcatcgccaggctgctggaggtgaagagcctcaagcccgggaagaacgcgcagctgtccgagtcggagatcaagcagctctgcgccgcctccaaggagatcttcctcgcgcagcccaacctcctggagctcgaggcccccatcaaaatctgcggtgatgttcatggtcaatattctgatctcctgaggctctttgaatatggtggatatcctcctcagtccaactatcttttcttgggcgattacgtggaccgaggaaagcagagccttgagacaatatgccttcttttggcttataaggtcaagtatcctgagaacttctttcttctaaggggcaaccatgaatgtgcatcagtaaaccgcatctatggattctatgatgagtgcaagcgcagattcagtgtaaaactctggaaaacgtttacagactgttttaactgcttaccggtatcagcattgatagatgaaaagattctatgcatgcatggaggtctttctccagagttgaacaagctggatcaaatactcaacctcaatcgccccacagatgttcctgataccgggctactttgtgaccttctttggtccgatccttccaatgaagcgcaagggtgggctatgaatgatcgaggtgtctcatatacatttggacctgataaagtggctgaattccttgagaagcatgatttagacctcatctgccgagcccatcaggttgttgaggatggttacgagttctttgctgatcgtcagctagttacaatattttcagcgcctaattactgtggggaattcgataatgccggtgccatgatgagtgtagacgagacgctgatgtgctccttccaaatactcaaacctgcaaggaaaatgttgcctggttcgactaataacaagtctggcttcaagtcaatgagaggatggtga

SEQ ID NO: 89852 - protein, 320 aa, Hordeum vulgare
MEKGMDPALLDNIIARLLEVKSLKPGKNAQLSESEIKQLCAASKEIFLAQPNLLELEAPIKICGDVHGQYSDLLRLFEYGGYPPQSNYLFLGDYVDRGKQSLETICLLLAYKVKYPENFFLLRGNHECASVNRIYGFYDECKRRFSVKLWKTFTDCFNCLPVSALIDEKILCMHGGLSPELNKLDQILNLNRPTDVPDTGLLCDLLWSDPSNEAQGWAMNDRGVSYTFGPDKVAEFLEKHDLDLICRAHQVVEDGYEFFADRQLVTIFSAPNYCGEFDNAGAMMSVDETLMCSFQILKPARKMLPGSTNNKSGFKSMRGW

SEQ ID NO: 89853 - DNA, 966 bp, Hordeum vulgare
  CDS (1)..(966)
atggacgcggcggcgctcgacgacgtgatccggcggctcctggaggcgcgcggcgggcggacggtgcgccccgtgcagctctccgacgcggagatccgccgcctctgcacctccgccaaggacgtcttcctcagccagcccaacctcctcgagctcgaggcccccatcaaagtctgcggggacatccatggccaatattctgatcttcttcgattattcgagtatggtgggttcccaccggaggcgaactacttgtttctgggtgactatgttgatcgtggcaaacagagtattgaaacaatatgccttctccttgcttacaagattaagtacccggagaacttctttctccttaggggaaaccatgaatgtgcctctatcaacagaatctatggattctttgatgaatgcaagaggaggtttaatgttcgtctctggaaggtttttactgactgtttcaactgcctccctgtggctgcacttattgatgacaagatcttgtgcatgcatgggggtttatcgcctgatttaaagaacatggaccagatacgtaacattgcccgtcctgtggatattccggaccatggtctcctctgtgatctgctatggtcagaccctgataaagatgttgatggctggggtgagaatgacaggggcgtgtcatacactttcggagctgataaggttgcagagttccttgagaaacatgatctagatttggtctgcagggctcaccaggtggtggaggatggatatgaattctttgcaaagcgtcagctcgtaaccatattctctgcacccaactattgtggcgagttcgacaatgctggtgccatgatgagcatagatgattcactaacatgctcattccagatccttaaaccttctgaaaagaaagggaaagctggaacaggcaactcaaaacctggaacaccgcctaggaagataaagattaatattatttag

SEQ ID NO: 89854 - protein, 321 aa, Hordeum vulgare
MDAAALDDVIRRLLEARGGRTVRPVQLSDAEIRRLCTSAKDVFLSQPNLLELEAPIKVCGDIHGQYSDLLRLFEYGGFPPEANYLFLGDYVDRGKQSIETICLLLAYKIKYPENFFLLRGNHECASINRIYGFFDECKRRFNVRLWKVFTDCFNCLPVAALIDDKILCMHGGLSPDLKNMDQIRNIARPVDIPDHGLLCDLLWSDPDKDVDGWGENDRGVSYTFGADKVAEFLEKHDLDLVCRAHQVVEDGYEFFAKRQLVTIFSAPNYCGEFDNAGAMMSIDDSLTCSFQILKPSEKKGKAGTGNSKPGTPPRKIKINII

SEQ ID NO: 89855 - DNA, 921 bp, Hordeum vulgare
  CDS (1)..(921)
atgccgccgcacggggatctggaccggcagatcgcgcacctgcgggagtgcaagcacctcccggaggcggaggtcaagggactctgcgagcaggccaaggccatcctcatggaggagtggaacgtgcagcccgtccgctgccccgtcaccgtctgcggcgacatccacggccagttctacgacctcatcgagctcttccgcatcggcggcgagtcgcccgacaccaactatctcttcatgggcgactacgtcgatcgtggctactattcggtggagactgtttcgctgttagtggctttgaaagttcgctacagagacagaattacgatattgagaggaaatcatgagagcagacaaatcacgcaagtatatggcttctatgatgagtgcttgcgaaaatatgggaatgcaaatgtatggaagtactttacagacttgtttgattatttgcctctcacggctcttatagaaaaccaggtgttctgccttcatggtggtctctctccatcattggatacattagacaacattcgtgctcttgatcgcatacaagaggttcctcatgaagggcccatgtgcgatcttttgtggtctgatccagacgatcgatgtggatgggggatttcaccaagaggagcaggttatacgtttgggcaagatattgcacaacagttcaatcatacaaatggtctctctctcatatcaagggcccatcaacttgtaatggaaggattcaattggtgccaggatcagaatgttgtaacagtcttcagtgcgccaaactactgttaccggtgtggtaacatggctgcgattctcgagattggggaaaacatggatcgtaacttcctccagtttgatccagcgcctcggcaaatcgagcctgacacaacacgcaagacccccgactactttttgtaa

SEQ ID NO: 89856 - protein, 306 aa, Hordeum vulgare
MPPHGDLDRQIAHLRECKHLPEAEVKGLCEQAKAILMEEWNVQPVRCPVTVCGDIHGQFYDLIELFRIGGESPDTNYLFMGDYVDRGYYSVETVSLLVALKVRYRDRITILRGNHESRQITQVYGFYDECLRKYGNANVWKYFTDLFDYLPLTALIENQVFCLHGGLSPSLDTLDNIRALDRIQEVPHEGPMCDLLWSDPDDRCGWGISPRGAGYTFGQDIAQQFNHTNGLSLISRAHQLVMEGFNWCQDQNVVTVFSAPNYCYRCGNMAAILEIGENMDRNFLQFDPAPRQIEPDTTRKTPDYFL

SEQ ID NO: 89857 - DNA, 924 bp, Hordeum vulgare
  CDS (1)..(924)
atggggaacccgcgtggcggcgtcgacgagcagatcgagcagctcctgcagtgcaagcccctcgtcgagcccgagctgaaagcactatgtgagaaagctaaagagattttgatggaggaaagcaatgttcagcctgtgagaagccctgtgacgatatgtggtgatattcatggtcagtttcatgatcttgcagaactattccgaattggtgggaagtgtccggatacaaactacctattcatgggagattatgtggaccgtggttactattctgttgaaactgtatcgcttctggtggctttgaaagttcgttatccacatcgaattacaattcttagaggaaaccatgagagccggcagatcactcaagtttatggattttatgacgagtgcctacggaagtatggaagtgctaatgtatggaaaaccttcacggatctttttgactatttaccgttgacagcattggttgaatcggaaatattttgcctgcatggtggactgtcaccatccatcgagacactagataacgtccgtagcttcgaccgtgtccaagaagtccctcacgaggggcccatgtgtgaccttctatggtctgatcctgatgatcgatgtggttggggcatttcaccacgtggtgctggatacacatttggccaggatatttcagaacagtttaaccataccaatagccttaagctaatagcaagagctcatcagttagttatggagggtttcaactgggcacatgagcaaaaggtcgtgacaatatttagtgcacctaactactgttaccgctgcggtaacatggcctcgatcttggaggtggatgactgcagggagcatactttcatccagtttgaacctgccccgaggagaggggaacctgacgtgacccgaaggacgcctgactatttcttgtaa

SEQ ID NO: 89858 - protein, 307 aa, Hordeum vulgare
MGNPRGGVDEQIEQLLQCKPLVEPELKALCEKAKEILMEESNVQPVRSPVTICGDIHGQFHDLAELFRIGGKCPDTNYLFMGDYVDRGYYSVETVSLLVALKVRYPHRITILRGNHESRQITQVYGFYDECLRKYGSANVWKTFTDLFDYLPLTALVESEIFCLHGGLSPSIETLDNVRSFDRVQEVPHEGPMCDLLWSDPDDRCGWGISPRGAGYTFGQDISEQFNHTNSLKLIARAHQLVMEGFNWAHEQKVVTIFSAPNYCYRCGNMASILEVDDCREHTFIQFEPAPRRGEPDVTRRTPDYFL

SEQ ID NO: 89859 - DNA, 912 bp, Hordeum vulgare
  CDS (1)..(912)
atggatttggatctgtggatcgtcaaggtcaaggaggggcagcacctcgccgagcacgagctccagtccctctgcgaatacgtgaaggagatcctcatcgaggagtcgaacgtgcagccggtcaacagccccgtgacggtgtgcggcgacatccacggccagttccacgacctcatgaagctcttcgccaccggcggccatgtccccgacaccaactacatattcatgggcgactttgtcgaccgcgggttcaacagcctcgaggtcttcaccattcttctgcttctgaaagctaggtatcctggccacataacccttctgcgtggaaaccatgaaagcagacagttgacgcaggtttatggtttttatgacgagtgtcagaggaagtatgggaatgcaaatgcatggcggtattgcactgatgtttttgattaccttactctttcagcaatcattaatggcacagtcctctgtgttcatggtggcctttcacctgatgtacgcacagttgatcagatgcgtacaattgatcgcaactgtgaaattcctcatgaaggacctttttgtgatctgatgtggagtgacccagaagagattgagacatggggtgttagtccccgtggagcaggttggctttttggatcacgggtgacaaccgagttcaaccatgttaacaatcttgagttagtttgccgggctcaccaactagtccaggaaggcctaaagtacatgttccaagacaagggtcttgtaactgtgtggtctgcacctaattattgttacagatgtgggaatgttgcttctatactaagcttcagcgaaactatggaaagagacgtcaaaatcttcacagagacggacgagaataaccaaatgcgagggcctagaagttctgtcccgtacttcctttga

SEQ ID NO: 89860 - protein, 303 aa, Hordeum vulgare
MDLDLWIVKVKEGQHLAEHELQSLCEYVKEILIEESNVQPVNSPVTVCGDIHGQFHDLMKLFATGGHVPDTNYIFMGDFVDRGFNSLEVFTILLLLKARYPGHITLLRGNHESRQLTQVYGFYDECQRKYGNANAWRYCTDVFDYLTLSAIINGTVLCVHGGLSPDVRTVDQMRTIDRNCEIPHEGPFCDLMWSDPEEIETWGVSPRGAGWLFGSRVTTEFNHVNNLELVCRAHQLVQEGLKYMFQDKGLVTVWSAPNYCYRCGNVASILSFSETMERDVKIFTETDENNQMRGPRSSVPYFL

SEQ ID NO: 89861 - DNA, 921 bp, Hordeum vulgare
  CDS (1)..(921)
atgccgtcgcactcggatctggaccggcagatctcgcagctgcgggactgcaagttcctgccggacgccgaggtcaaggccctctgcgagcaggccaaggcgatcctcatggaggagtggaacgtgcagcccgtgcgctgcccggtcaccgtctgcggcgacatccacggccagttctacgacctcatcgagctattccgcatcggcggcgacacccccgacacgaactaccttttcatgggcgactacgtcgaccgtggctactattcagtggagactgtttcattattagtggctctcaaagttcgttacagagacagaatcacaatattgagaggaaatcacgagagccgacaaatcactcaagtgtatggcttctacgatgaatgcttacggaagtacggaaacgcaaatgtctggaagtacttcacggatttgtttgattatttgcctctcacagctcttatagaaaaccaggtattttgcctccatggtggtctctctccatcattagatacattggacaacattcgttctcttgatcgcatacaagaggtcccgcatgaaggacctatgtgtgatcttttgtggtctgatccggatgaccgatgcgggtggggaatttcaccaagaggtgcaggctacacatttggacaagatatagcacaacaatttaaccatacgaatggtcttagtcttatttcaagggcccatcaacttgtgatggaaggtttcaattgggcacaggagaagaatgttgtcacagttttcagtgcgccaaactactgttaccggtgtggtaacatggctgcgattctcgaaattggggagaacatggatcagaacttcctccaattcgatccagcgccgcggcaaatcgagccagacacaacgcgcaagacccccgactactttttgtaa

SEQ ID NO: 89862 - protein, 306 aa, Hordeum vulgare
MPSHSDLDRQISQLRDCKFLPDAEVKALCEQAKAILMEEWNVQPVRCPVTVCGDIHGQFYDLIELFRIGGDTPDTNYLFMGDYVDRGYYSVETVSLLVALKVRYRDRITILRGNHESRQITQVYGFYDECLRKYGNANVWKYFTDLFDYLPLTALIENQVFCLHGGLSPSLDTLDNIRSLDRIQEVPHEGPMCDLLWSDPDDRCGWGISPRGAGYTFGQDIAQQFNHTNGLSLISRAHQLVMEGFNWAQEKNVVTVFSAPNYCYRCGNMAAILEIGENMDQNFLQFDPAPRQIEPDTTRKTPDYFL

SEQ ID NO: 89863 - DNA, 912 bp, Hordeum vulgare
  CDS (1)..(912)
atggatttggatctgtggatctccaaggtcaaggagggccagcacctcgccgagcacgagctccagaccctctgcgaatacgttaaggagatactcatcgaggagtccaacgtgcagccagtcaacagcccggtcacggtgtgcggcgacatccacgggcagttccatgaccttatgaagctcttcgccaccggagggcatgtgcctgagaccaactatattttcatgggtgattttgtcgaccgcggcttcaacagtctcgaggttttcaccatccttttgctactaaaagcaaggtatcctgcccacataaccctcctgcgcgggaaccacgaaagtaggcagctgacacaggtatatggtttctatgatgagtgccagaggaagtatgggaatgccaatgcatggcggtactgcactgatgtttttgattaccttactctttcagcaatcattaatggcaccgtcctttgtgttcacggtggtctgtctcctgatgtacgtactgttgaccagatacggacaattgatcggaattgtgaaattccccacgaaggtcctttctgtgatcttatgtggagtgaccctgaagagatagagacatgggccgttagtcctcgtggagcaggttggctttttggatcacgagtgacaacagagttcaaccatgtgaacaatcttgacctagtgtgccgggctcaccagctggtccaggaaggcttaaaatacatgtttcaggacaagggtcttgtaactgtgtggtctgcacctaattattgctacagatgtggcaatgttgcttctatactaagctttgatgagaacatggaccgcgacgtcaagttcttcacagagacagaggagaacaaccagatgcgtggcccaaggactgccgtcccgtattttctctga

SEQ ID NO: 89864 - protein, 303 aa, Hordeum vulgare
MDLDLWISKVKEGQHLAEHELQTLCEYVKEILIEESNVQPVNSPVTVCGDIHGQFHDLMKLFATGGHVPETNYIFMGDFVDRGFNSLEVFTILLLLKARYPAHITLLRGNHESRQLTQVYGFYDECQRKYGNANAWRYCTDVFDYLTLSAIINGTVLCVHGGLSPDVRTVDQIRTIDRNCEIPHEGPFCDLMWSDPEEIETWAVSPRGAGWLFGSRVTTEFNHVNNLDLVCRAHQLVQEGLKYMFQDKGLVTVWSAPNYCYRCGNVASILSFDENMDRDVKFFTETEENNQMRGPRTAVPYFL

SEQ ID NO: 89865 - DNA, 978 bp, Hordeum vulgare
  CDS (1)..(978)
atgatgatgacacgggcctccatgggggccatggagggcgcggcggtggacgaggtggtgcggcggctggtcgagggcggccgcggcggtcggcaggtgcagctgtccgaggcggagatccgagggctctgcgtcgacgccaagcgggtgctcctgtcccagcccaacctcctccgcatccaggcccccgtcaagatctgcggtgatatccatggtcagtttgttgatcttctgaggttgtttgatttgggtggttatcctccaacctcaacctatgtattccttggagactacgtagatagaggcaaacagagcttggaaactatatgcttactgctggcgtacaaaataaggtaccctgacaaggttttcctgttaagggggaaccatgaagatgcaaaaataaacagagtttatggtttctatgatgaatgcaagaggaggttcaatgttcgcctgtggaagatattctctgattgcttcaactgcctgcctattgcagcactcattgacgacaagatactgtgcatgcatggtggcctttcacctgaactgactaacctggaccaaataaaggatattgagaggccggctgagattcctgattatggtctcctgtgtgatttgctttggtctgatcctagcccggaaggagaagggtggggggagagtgacagaggtgtttcatgtacgtttggtgcagataagcttatagagtttttggaaaaaaatgatcttgatcttatctgccgagcccatcaggtggtagaagatggttacgagttcttcgcacagcggagattagtcacaatcttctcagctccaaattattgtggggaatttgataatgtaggtgctttgttgagcatagatgaaaatctaatgtgctcatttcaaatcttgaagccaaatgaaacaggcacaccacgtgtaaaaagacaaattccaaataagccagcaactgggggaagtgcctga

SEQ ID NO: 89866 - protein, 325 aa, Hordeum vulgare
MMMTRASMGAMEGAAVDEVVRRLVEGGRGGRQVQLSEAEIRGLCVDAKRVLLSQPNLLRIQAPVKICGDIHGQFVDLLRLFDLGGYPPTSTYVFLGDYVDRGKQSLETICLLLAYKIRYPDKVFLLRGNHEDAKINRVYGFYDECKRRFNVRLWKIFSDCFNCLPIAALIDDKILCMHGGLSPELTNLDQIKDIERPAEIPDYGLLCDLLWSDPSPEGEGWGESDRGVSCTFGADKLIEFLEKNDLDLICRAHQVVEDGYEFFAQRRLVTIFSAPNYCGEFDNVGALLSIDENLMCSFQILKPNETGTPRVKRQIPNKPATGGSA

SEQ ID NO: 89867 - DNA, 942 bp, Linum usitatissimum
  CDS (1)..(942)
atgagcttcgattcggtcccttccagcacccatggcaaccttgacgagcagattagtcagcttatgcagtgcaagcccttatccgaacaagatgttcgggggctatgtgaaaaggcaaaggaaattctgatggacgaaagcaatgtccagcccgtgaaaagcccggttacaatctgtggtgacatccatggacaattccatgatcttgcagagctatttcgcattggaggaaagtgcccggatacaaattacttgttcatgggagactatgtggatcgtgggtactactctgttgaaactgtgacactgctggtttccttgaaagtacgttatcctcaaagaattaccattttaagaggaaaccatgagagtcgtcagattactcaagtttatggattttacgatgagtgcctgaggaagtatgggaatgcaaatgtgtggaagatctttacagatctttttgattattttccgctcacagcactggtcgagtccgagattttttgtcttcatggtggtttgtccccttccattgaaacattggacaacattcggaactttgaccgcgtgcaagaagttccgcacgagggtcccatgtgtgatcttttgtggtccgaccctgatgaccgatgtggttggggtatttcacctcggggagcagggtatacctttggtcaggatatttctgagcagttcaaccatactaacaacctaaagctgattgcaagagctcatcagctggtcatggaaggctacaactggggtcatgatcaaaaggtggttaccatattcagtgcaccaaattattgctaccgctgtggaaacatggcgtctattttggaagttgacgattgcaagggtcatacgttcatccagttcgagccggctcctagaaggggagaacccgacgtaaccaggagaacgcctgattacttcctataa

SEQ ID NO: 89868 - protein, 313 aa, Linum usitatissimum
MSFDSVPSSTHGNLDEQISQLMQCKPLSEQDVRGLCEKAKEILMDESNVQPVKSPVTICGDIHGQFHDLAELFRIGGKCPDTNYLFMGDYVDRGYYSVETVTLLVSLKVRYPQRITILRGNHESRQITQVYGFYDECLRKYGNANVWKIFTDLFDYFPLTALVESEIFCLHGGLSPSIETLDNIRNFDRVQEVPHEGPMCDLLWSDPDDRCGWGISPRGAGYTFGQDISEQFNHTNNLKLIARAHQLVMEGYNWGHDQKVVTIFSAPNYCYRCGNMASILEVDDCKGHTFIQFEPAPRRGEPDVTRRTPDYFL

SEQ ID NO: 89869 - DNA, 954 bp, Linum usitatissimum
  CDS (1)..(954)
atggcatcacaaggacagacggcggctatggaccttgccgtcctcgacgacataatcaaacggttgacggaggtccgatcagccaggcccggaaagcaggtacagctctccgagtctgagatcaagcagctatgtgctgcctctcgtgatgtcttccttcaccagcccaacttgctcgagctcgaggctcccatcaaaatttgcggcgacattcatgggcaatacagcgacttgttgaggctttttgagtatggaggttttccaccggaggccaactatttattcctaggagactatgttgatcgtggtaaacagagcttggagaccatatgtctattacttgcctacaagattaagtatcctgagaacttcttccttctgcgaggaaaccatgaatgtgcttctataaaccgcatttatggattctatgatgagtgcaagaggcggttcaatgtgaggctttggaaatctttcactgactcttttaattgccttcctgtcgctgctctcatagatgacaaaatattatgcatgcatggtggtctttcccctgatttgacacatttagatcaaatcagaaacttgcctcgccccaccgctattcccgacactggtttgctgtgcgatctgctttggtcagatcccggtagagacgtcaagggttggggaatgaatgacagaggagtttcatatacctttggccctgataaagtatctgaagtcttgaacaagcatgacttagaccttgtctgccgtgctcatcaggttgtggaggatggatatgagttttttgctgataggcaactggtcaccatattctcagctcccaattactgtggtgaattcgataatgccggtgctatgatgagtgttgatgaaaacctgatgtgctcctttcaaattctgaagccagcggagaaaaaggccaagttcatgatgtcaaacaaaatgtga

SEQ ID NO: 89870 - protein, 317 aa, Linum usitatissimum
MASQGQTAAMDLAVLDDIIKRLTEVRSARPGKQVQLSESEIKQLCAASRDVFLHQPNLLELEAPIKICGDIHGQYSDLLRLFEYGGFPPEANYLFLGDYVDRGKQSLETICLLLAYKIKYPENFFLLRGNHECASINRIYGFYDECKRRFNVRLWKSFTDSFNCLPVAALIDDKILCMHGGLSPDLTHLDQIRNLPRPTAIPDTGLLCDLLWSDPGRDVKGWGMNDRGVSYTFGPDKVSEVLNKHDLDLVCRAHQVVEDGYEFFADRQLVTIFSAPNYCGEFDNAGAMMSVDENLMCSFQILKPAEKKAKFMMSNKM

SEQ ID NO: 89871 - DNA, 912 bp, Linum usitatissimum
  CDS (1)..(912)
atggatttggatcagtggattgcaaaggtgaaggaagggcagcacctcctggaagacgagctccaactcctatgcgaatatgtaaaagacatcctaatcgaggaatccaatgtccagcctgtcaacagtcctgtgactgtttgtggagatatacatggtcagtttcatgatctaatgaaacttttccaaaccggaggtcatgttccagagacaaattacatatttatgggggactttgtggaccgaggttacaatagccttgaagttttcactatacttttacttcttaaagcgaggtatccagctcatattacgcttttgcgtgggaatcatgagagccgtcagctaactcaggtttatggtttctatgacgagtgccaacggaagtatgggaataccaatgcatggcgctactgtacagatgttttcgattatctaacgctttcagctattatagatggcactgtgctttgtgttcacggtggtctttctcctgatgttcgaacaattgatcagataagagtaattgatcggaactgtgaaattcctcatgaaggaccattctgtgatcttatgtggagtgatccggaagagatagagacatgggcggttagccccagaggagcaggttggctttttggatcaagggtcacttctgagtttaaccacattaacaacctcgacctggtttgtcgggcgcaccaacttgtacaagaaggcctcaagtacatgtttcaagataaaggtttagtaactgtgtggtctgcaccgaactactgttaccgatgtggtaatgtggcttctatcctaagcttcaatgagaatatggagagagaagtgaagttcttcaccgaaacggaggagaacaatcagatgagaggaccaaggactggagttccttatttcttatga

SEQ ID NO: 89872 - protein, 303 aa, Linum usitatissimum
MDLDQWIAKVKEGQHLLEDELQLLCEYVKDILIEESNVQPVNSPVTVCGDIHGQFHDLMKLFQTGGHVPETNYIFMGDFVDRGYNSLEVFTILLLLKARYPAHITLLRGNHESRQLTQVYGFYDECQRKYGNTNAWRYCTDVFDYLTLSAIIDGTVLCVHGGLSPDVRTIDQIRVIDRNCEIPHEGPFCDLMWSDPEEIETWAVSPRGAGWLFGSRVTSEFNHINNLDLVCRAHQLVQEGLKYMFQDKGLVTVWSAPNYCYRCGNVASILSFNENMEREVKFFTETEENNQMRGPRTGVPYFL

SEQ ID NO: 89873 - DNA, 921 bp, Linum usitatissimum
  CDS (1)..(921)
atgccgtcccacgccgatctggaccgtcagatcgagcacttgatgcagtgcaagccgctgtctgaggccgaagtgaaggccctctgcgagcaggccagggctgtcctcgttgaggaatggaacgtccagccggtcaagtgtccggtgacggtttgcggcgacatccacggccagtttcacgatcttgtcgagctctttcgaatcggaggaaacgctcctgacacgaactacctcttcatgggcgactatgtagatcgaggatattactcggtggaaactgtcacccttctagtcaccttgaaagtaagatatagagataggatcacaattctaagaggaaatcatgaaagccgtcaaataactcaagtgtatggattctacgatgagtgcctgagaaaatatggaaatgccaatgtgtggaaacatttcaccgatctctttgattatctaccacttacagctctgattgagagccaggtcttctgcttacatggtggactttccccttcactagacacactagacaacatccgctcccttgatcgtatccaagaggttccacacgagggtcctatgtgcgacctcctatggtcggacccggatgaccgttgcgggtgggggatctctcctcgtggagctggctacacctttggacaggacatatctcaacagttcaaccacacgaacggcctttctctcatatccagagctcaccagctggtcatggaaggttacaattgggcccaggacaagaatgtggtgacggtgttcagcgccccgaactactgctaccggtgtgggaacatggcggccattctcgagatcggagagaacatggagcagaacttcctgcagttcgacccagctcctcgacagatcgaaccggagacgactcgcagaacacccgattattttttgtga

SEQ ID NO: 89874 - protein, 306 aa, Linum usitatissimum
MPSHADLDRQIEHLMQCKPLSEAEVKALCEQARAVLVEEWNVQPVKCPVTVCGDIHGQFHDLVELFRIGGNAPDTNYLFMGDYVDRGYYSVETVTLLVTLKVRYRDRITILRGNHESRQITQVYGFYDECLRKYGNANVWKHFTDLFDYLPLTALIESQVFCLHGGLSPSLDTLDNIRSLDRIQEVPHEGPMCDLLWSDPDDRCGWGISPRGAGYTFGQDISQQFNHTNGLSLISRAHQLVMEGYNWAQDKNVVTVFSAPNYCYRCGNMAAILEIGENMEQNFLQFDPAPRQIEPETTRRTPDYFL

SEQ ID NO: 89875 - DNA, 921 bp, Linum usitatissimum
  CDS (1)..(921)
atgccgtcccacgccgatctggaccgtcagatcgagcacttgatgcagtgcaagccactttctgaggccgaagtgaaggctctctgcgagcaggccagggccgtcctcgtcgaggaatggaacgtccagccggtcaagtgtccggtgactgtctgcggcgacatccacggccagtttcacgatcttgtcgagctctttcgaatcggaggaaacgcccctgacacgaactacctcttcatgggcgactatgtagatcgagggtattattcggtggagactgtcacccttctagtcgccttgaaagtaagatatagagataggatcacaattctgagaggaaatcatgaaagtcgtcaaataactcaagtgtatggattctatgatgagtgcttgagaaaatatggaaatgccaatgtgtggaaacattttaccgatctctttgattatctaccacttacagctctgattgagagtcaggtcttctgcttacatggtggactttccccttcactagacacgctagacaacattcgctcccttgatcgtatccaagaggttccgcacgagggtcctatgtgcgacctcctatggtcggacccggatgaccgttgcgggtgggggatctctcctcgtggagctggctacacctttggacaggacatatctcaacagttcaaccacacgaacggcctttctctcatatccagagctcaccagctggtcatggaaggttacaattgggcccaggacaagaatgtggtgacggtgttcagcgccccgaactactgctaccggtgtgggaacatggcggccattctcgagatcggagagaacatggagcagaacttcctgcagttcgacccagctcctcgacagatcgaaccggagacgactcgcagaacacccgattattttttgtga

SEQ ID NO: 89876 - protein, 306 aa, Linum usitatissimum
MPSHADLDRQIEHLMQCKPLSEAEVKALCEQARAVLVEEWNVQPVKCPVTVCGDIHGQFHDLVELFRIGGNAPDTNYLFMGDYVDRGYYSVETVTLLVALKVRYRDRITILRGNHESRQITQVYGFYDECLRKYGNANVWKHFTDLFDYLPLTALIESQVFCLHGGLSPSLDTLDNIRSLDRIQEVPHEGPMCDLLWSDPDDRCGWGISPRGAGYTFGQDISQQFNHTNGLSLISRAHQLVMEGYNWAQDKNVVTVFSAPNYCYRCGNMAAILEIGENMEQNFLQFDPAPRQIEPETTRRTPDYFL

SEQ ID NO: 89877 - DNA, 942 bp, Zea mays
  CDS (1)..(942)
atggagcccatgagcgtggacagcggcggctgcggtggccttgacgcgcagatcgaacagctgatgcagtgccgcccgctcgccgagcaagaggttaaggcactgtgcgagaaggccaaggagatattgatggaggaaagcaacgttcagcctgtcaagagtccagtgacaatatgtggtgatatacatggacaattccatgatcttgtagagcttttccgaattggcgggaagtgtccagacaccaattacttatttatgggagattatgtagatcgtggctactattctgttgagactgtcacgatgctagtagcactaaaagtgaggtatccacatcgaattacaatccttcgtggaaaccacgagagtcggcagatcacacaggtgtatggattctacgacgaatgcctacgaaagtatggcaatgcaaatgtatggaagacatttacggatctttttgattattttcctctgacagctctggtggaatctgagattttctgccttcatggtggtttatctccatcaattgaaaatcttgatagtgtgcgcagcttagatcgagtccaagaggttcctcatgagggacctatgtgcgatcttttatggtcagatccggacgatcgatgtggttggggcatttcccctcgtggtgctggctacacttttgggcaggacatatctgagcagtttaatcacacaaacaatctcaaacttgtagctcgggctcatcaattagttatggagggatataactgggctcatgagcagaaggttgtcaccatattcagtgctccaaattattgctatcgatgcggcaatatggcatccattttggaagttgacgactgcaatagtcacacattcatccagtttgacccagcccctaggagaggtgagccagatgtgacgcgaagaacaccggattatttcctttga

SEQ ID NO: 89878 - protein, 313 aa, Zea mays
MEPMSVDSGGCGGLDAQIEQLMQCRPLAEQEVKALCEKAKEILMEESNVQPVKSPVTICGDIHGQFHDLVELFRIGGKCPDTNYLFMGDYVDRGYYSVETVTMLVALKVRYPHRITILRGNHESRQITQVYGFYDECLRKYGNANVWKTFTDLFDYFPLTALVESEIFCLHGGLSPSIENLDSVRSLDRVQEVPHEGPMCDLLWSDPDDRCGWGISPRGAGYTFGQDISEQFNHTNNLKLVARAHQLVMEGYNWAHEQKVVTIFSAPNYCYRCGNMASILEVDDCNSHTFIQFDPAPRRGEPDVTRRTPDYFL

SEQ ID NO: 89879 - DNA, 924 bp, Triticum aestivum
  CDS (1)..(924)
atggggaatccgcgtggcggcctcgacgagcagatcgagcagctcctgcagtgcaagccactcgtcgagcccgagttgaaagcactgtgtgagaaagctaaagagattttgatggaggagagcaatgttcagcctgtgagaagccctgtcacgatatgtggtgatattcatggtcagtttcatgatcttgcggaactattcagaattggtgggaagtgtcctgatacaaactacctatttatgggagattatgtggaccgtggttactattctgttgaaactgtatcgcttctggtagctttgaaagttcgttatccgcatcgacttacaattcttagaggaaaccacgagagccggcagatcactcaagtttatggattttatgatgagtgcctacggaagtatgggagtgctaatgtatggaaaaccttcacggatctttttgactatttaccattgacagcattggttgagtcggaaatattttgcctgcatggtggactatcaccatccatcgagacacttgataatgtccgcggcttcgaccgcatccaagaagtccctcacgaggggccaatgtgtgaccttctatggtctgatcctgatgatcgatgtggttggggcatttcaccacgtggtgccggatacacatttggccaggatatttcagaacagtttaaccataccaatagccttaagctaatagcaagagctcatcagttagttatggagggattcaactgggcacatgagcaaaaggttgtgacaatatttagtgcacctaactactgttaccggtgcggtaacatggcctcgatcttggaggtggatgactgcagggagcatactttcatccagtttgagcctgccccaaggagaggcgagcctgacgtgacccgaaggacgccagactatttcttgtaa

SEQ ID NO: 89880 - protein, 307 aa, Triticum aestivum
MGNPRGGLDEQIEQLLQCKPLVEPELKALCEKAKEILMEESNVQPVRSPVTICGDIHGQFHDLAELFRIGGKCPDTNYLFMGDYVDRGYYSVETVSLLVALKVRYPHRLTILRGNHESRQITQVYGFYDECLRKYGSANVWKTFTDLFDYLPLTALVESEIFCLHGGLSPSIETLDNVRGFDRIQEVPHEGPMCDLLWSDPDDRCGWGISPRGAGYTFGQDISEQFNHTNSLKLIARAHQLVMEGFNWAHEQKVVTIFSAPNYCYRCGNMASILEVDDCREHTFIQFEPAPRRGEPDVTRRTPDYFL

SEQ ID NO: 89881 - DNA, 912 bp, Triticum aestivum
  CDS (1)..(912)
atggatttggatctgtggatcgtcaaggtcaaggaggggcagcacctcgccgagcacgagctccagtccctctgcgaatacgtgaaggagatcctcatcgaggagtccaacgtgcagccggtcaacagccccgtgacggtgtgcggcgacatccacggccagttccacgacctcatgaagctcttcgccaccgggggccatgtcccggacaccaactacatattcatgggcgactttgtggaccgcgggttcaacagccttgaagtcttcaccattcttctgcttctaaaagctaggtatcctggccacataacccttctgcgtgggaaccatgaaagcagacagttgacacaggtgtatggcttttatgacgagtgtcagaggaagtacgggaatgcgaatgcatggcggtattgcactgatgtttttgattaccttactctttcagcaatcattaatggcacagtcctctgtgttcatggtgggctttcacctgatgtacgcacagttgatcagatgcggacaattgatcgcaactgcgaaattcctcatgaaggacctttttgtgatctaatgtggagtgacccagaagagatagagacatggggtgttagtccccgtggagcaggttggctttttggatcacgggtgacaaccgagtttaaccatgttaacaatcttgagttagtttgtcgggctcatcaactagtccaggaaggcctaaagtacatgttcccagacaagggtcttgtaactgtgtggtctgcacctaattattgttacagatgtgggaatgttgcttctatactaagcttcagcgaaactatggaaagagatgtcaagatcttcacagagacggatgagaacaaccagatgcgagggccgagaagtgcggtcccgtatttcctttga

SEQ ID NO: 89882 - protein, 303 aa, Triticum aestivum
MDLDLWIVKVKEGQHLAEHELQSLCEYVKEILIEESNVQPVNSPVTVCGDIHGQFHDLMKLFATGGHVPDTNYIFMGDFVDRGFNSLEVFTILLLLKARYPGHITLLRGNHESRQLTQVYGFYDECQRKYGNANAWRYCTDVFDYLTLSAIINGTVLCVHGGLSPDVRTVDQMRTIDRNCEIPHEGPFCDLMWSDPEEIETWGVSPRGAGWLFGSRVTTEFNHVNNLELVCRAHQLVQEGLKYMFPDKGLVTVWSAPNYCYRCGNVASILSFSETMERDVKIFTETDENNQMRGPRSAVPYFL

SEQ ID NO: 89883 - DNA, 924 bp, Triticum aestivum
  CDS (1)..(924)
atggggacgtcggatctggaccggcagatcgagcagctcaagcggtgcgagccgctggcggaggcggaggtcaaggcgctctgcctcaaggccatggagatcctcgtcgaggagagcaacgtccagcgcgtcgacgcccccgtcacgatatgtggagacattcatggacagttctacgacatgaaagaacttttcaaagttggaggtgactgcccaaagacaaactacctgttccttggggattttgttgaccgaggattttattctgttgaaacatttttgcttcttttggccttaaaggttaggtacccagatcgtataactttaatacgaggaaatcatgagagcaggcagatcacacaagtttatggcttctatgatgagtgtcttcgtaaatatggctcggtgaatgtctggagatattgcacagaaatatttgactatttaagtttgtctgcacttattgagaacaaaatcttcagtgtccatggaggcctttcccctgctattacgacactggatcagatcagagtaatagatcgcaagcaagaagtgcctcatgatggtgccatgtgtgaccttctttggtctgatccagaggatgctgtagacggctggggattaagtcctcgaggcgcagggttcctctttggtggaaacgttgtctcttcatttaaccactcaaacaacatagattatatttgccgtgctcatcaactagtcatggaaggattcaagtggatgttcaataacaagattgttactgtatggtctgctcctaactattgctacaggtgtggcaatgttgctgcaatcctagagcttgatgagaacctgaataagcagttccgtgtatttgaagctgctccacatgaatcaagaggtgttcctgccaagaggcctgccccagattactttctttga

SEQ ID NO: 89884 - protein, 307 aa, Triticum aestivum
MGTSDLDRQIEQLKRCEPLAEAEVKALCLKAMEILVEESNVQRVDAPVTICGDIHGQFYDMKELFKVGGDCPKTNYLFLGDFVDRGFYSVETFLLLLALKVRYPDRITLIRGNHESRQITQVYGFYDECLRKYGSVNVWRYCTEIFDYLSLSALIENKIFSVHGGLSPAITTLDQIRVIDRKQEVPHDGAMCDLLWSDPEDAVDGWGLSPRGAGFLFGGNVVSSFNHSNNIDYICRAHQLVMEGFKWMFNNKIVTVWSAPNYCYRCGNVAAILELDENLNKQFRVFEAAPHESRGVPAKRPAPDYFL

SEQ ID NO: 89885 - DNA, 966 bp, Triticum aestivum
  CDS (1)..(966)
atggacgcggcggcgctcgacgacgtgatccggcgactcctggaggcgcgcggcggccggacggtgcgccccgcgcagctctccgacgcggagatccgccgcctctgcgccgccgccaaggacgtcttcctcagccagcccaacctcctcgagctcgaggcccccatcaaagtctgcggggacatccatggccaatattctgatcttcttcgattatttgagtatggtggtttcccaccagaggcgaactatttgtttctgggtgactatgttgatcgtggcaaacagagtattgaaacgatatgccttctccttgcttacaagattaagtacccggagaacttctttctccttaggggaaaccatgaatgtgcctctatcaacagaatctatggattctttgatgaatgcaagaggaggttcaatgttcgtctctggaaggtttttactgactgttttaactgccttcctgtggctgcacttattgatgacaagatcctgtgcatgcatgggggtttatcacctgatttaaagaacatggaccagatacgtaacattgcccgtcctgtggatattccggaccatggtctcctctgtgatctgctatggtcagaccctgataaagatgttgatggctggggtgagaatgacaggggcgtgtcatacactttcggagctgataaggttgcagagttccttgagaaacatgatctagatttggtctgcagggctcaccaggtggtggaggatggatatgaattctttgcaaagcgtcagctcgtaaccatattctctgcacccaactattgtggcgagttcgacaatgctggtgccatgatgagcatagatgattcactaacatgctcattccagatccttaaaccttctgataagaaagggaaagctggaaccggcaactcaaaacctggaacaccgcctaggaagataaagattaatattatttag

SEQ ID NO: 89886 - protein, 321 aa, Triticum aestivum
MDAAALDDVIRRLLEARGGRTVRPAQLSDAEIRRLCAAAKDVFLSQPNLLELEAPIKVCGDIHGQYSDLLRLFEYGGFPPEANYLFLGDYVDRGKQSIETICLLLAYKIKYPENFFLLRGNHECASINRIYGFFDECKRRFNVRLWKVFTDCFNCLPVAALIDDKILCMHGGLSPDLKNMDQIRNIARPVDIPDHGLLCDLLWSDPDKDVDGWGENDRGVSYTFGADKVAEFLEKHDLDLVCRAHQVVEDGYEFFAKRQLVTIFSAPNYCGEFDNAGAMMSIDDSLTCSFQILKPSDKKGKAGTGNSKPGTPPRKIKINII

SEQ ID NO: 89887 - DNA, 966 bp, Triticum aestivum
  CDS (1)..(966)
atggcggcggcgccggcggcgggagggcagggaggcggcatggacgccgcgctcctcgacgacatcatccgccgtctgctcgaggtgcggacggcgcgccccggcaagcaggtgcagctctccgagtcggagatccgccaactctgcaccgcctcccgcgacatcttcctcacccagcccaacctcctcgagctcgaggcgcccattaaaatctgcggtgatatccatggtcagtacagtgatcttttaaggctatttgagtatggaggttttcccccagaagccaactatctattcttaggcgattatgttgatcgaggcaaacagagtctggagactatatgcctcctccttgcatacaaaatcaagtaccccgagaacttttttcttctgagaggcaaccatgagtgtgcttcaataaacagaatatatggattttatgatgaatgcaagcgtcgcttcaatgtgcggctatggaaggtcttcaccgactgttttaattgtctccctgtggccgctctaatcgatgataaaatattatgcatgcatggtggcctttctcctgatctgggacacctagatgagataaaaaacttgccccgtcctgccgatgtgccagatacaggtctactatgcgatcttctttggtctgatccaggaaaagatgtccaagggtggggcatgaatgataggggcgtttcatacacatttggccatgacaaagttacggagttccttctaaagcatgatcttgatcttatttgccgtgcccaccaggttgtcgaggatgggtatgaattctttgctgacagacagctggtcaccatattttcggctcccaactattgtggtgaatttgataatgctggagcaatgatgagtgttgatgaaactttgatgtgttcatttcaaattctcaaacctgctgagagaaaaatcaaatttatggcgtcaaacaaaatgtga

SEQ ID NO: 89888 - protein, 321 aa, Triticum aestivum
MAAAPAAGGQGGGMDAALLDDIIRRLLEVRTARPGKQVQLSESEIRQLCTASRDIFLTQPNLLELEAPIKICGDIHGQYSDLLRLFEYGGFPPEANYLFLGDYVDRGKQSLETICLLLAYKIKYPENFFLLRGNHECASINRIYGFYDECKRRFNVRLWKVFTDCFNCLPVAALIDDKILCMHGGLSPDLGHLDEIKNLPRPADVPDTGLLCDLLWSDPGKDVQGWGMNDRGVSYTFGHDKVTEFLLKHDLDLICRAHQVVEDGYEFFADRQLVTIFSAPNYCGEFDNAGAMMSVDETLMCSFQILKPAERKIKFMASNKM

SEQ ID NO: 89889 - DNA, 924 bp, Triticum aestivum
  CDS (1)..(924)
atggggaatccgcgtggcggcctcgacgagcagatcgagcagctcctgcagtgcaagcccctcgtcgagcccgagttgaaagcactgtgtgagaaagctaaagagattttgatggaggagagcaatgttcagcctgtgagaagccctgtcacgatatgtggtgatattcatggtcagtttcatgatcttgcggaactattcagaattggtgggaagtgtcctgatacaaactacctatttatgggagattatgtggaccgtggttactattctgttgaaactgtatcgcttctggtagctttgaaagttcgttatccgcatcgacttacaattcttagaggaaaccacgagagccggcagatcactcaagtttatggattttatgatgagtgcctacggaagtatgggagtgctaatgtatggaaaaccttcacggatctttttgactatttaccgttgacagcattggttgagtcggaaatattttgcctgcatggcggactatcaccatccatcgagacacttgataatgtccgcggcttcgaccgcatccaagaagtccctcacgaggggccaatgtgtgaccttctatggtctgatcctgatgatcgatgtggttggggcatttcaccacgtggtgccggatacacatttggccaggatatttcagaacagtttaaccataccaatagccttaagctaatagcaagagctcatcagttagttatggagggattcaactgggcacatgagcaaaaggtcgtgacaatttttagtgcacctaactactgctaccggtgcggtaacatggcctcgatcttggaggtcgatgactgcaaggagcatactttcatccagtttgagcctgccccgaggagaggggagcctgacgtgacccgaaggacgcccgactatttcttgtaa

SEQ ID NO: 89890 - protein, 307 aa, Triticum aestivum
MGNPRGGLDEQIEQLLQCKPLVEPELKALCEKAKEILMEESNVQPVRSPVTICGDIHGQFHDLAELFRIGGKCPDTNYLFMGDYVDRGYYSVETVSLLVALKVRYPHRLTILRGNHESRQITQVYGFYDECLRKYGSANVWKTFTDLFDYLPLTALVESEIFCLHGGLSPSIETLDNVRGFDRIQEVPHEGPMCDLLWSDPDDRCGWGISPRGAGYTFGQDISEQFNHTNSLKLIARAHQLVMEGFNWAHEQKVVTIFSAPNYCYRCGNMASILEVDDCKEHTFIQFEPAPRRGEPDVTRRTPDYFL

SEQ ID NO: 89891 - DNA, 924 bp, Triticum aestivum
  CDS (1)..(924)
atggggaatccgcgtggcggcctcgacgagcagatcgagcagctcctgcagtgcaagccactcgtcgagcccgagttgaaagcactgtgtgagaaagctaaagagattttgatggaggagagcaatgttcagcctgtgagaagccctgtcacgatatgtggtgatattcatggtcagtttcatgatcttgcggaattattcagaattggtgggaagtgtcctgatacaaactacctatttatgggagattatgtggaccgtggttactattctgttgaaactgtatcgcttctggtagctttgaaagttcgttatccgcatcggcttacaattcttagaggaaaccacgagagccggcagatcactcaagtttatggattttatgatgagtgcctacggaagtatgggagtgctaatgtatggaaaaccttcacggatctttttgactatttaccgttgacagcattggttgagtcggaaatattttgcctgcatggtggactatcaccatccatcgagacacttgataatgtccgtagctttgaccgtatccaagaagtccctcacgaggggccaatgtgtgaccttctatggtctgatcctgatgatcgatgtggttggggcatttcaccgcgtggtgccggatacacatttggccaggatatttcagaacagtttaaccataccaatagccttaagctaatagcaagagctcatcagttagttatggagggattcaactgggcacatgagcaaaaggttgtgacaatatttagtgcacctaactactgttaccggtgcggtaacatggcctcgatcttggaggtggatgactgcagggagcatactttcatccagtttgagcctgccccaaggagaggggagcctgacgtgacccgaaggacgcccgactatttcttgtaa

SEQ ID NO: 89892 - protein, 307 aa, Triticum aestivum
MGNPRGGLDEQIEQLLQCKPLVEPELKALCEKAKEILMEESNVQPVRSPVTICGDIHGQFHDLAELFRIGGKCPDTNYLFMGDYVDRGYYSVETVSLLVALKVRYPHRLTILRGNHESRQITQVYGFYDECLRKYGSANVWKTFTDLFDYLPLTALVESEIFCLHGGLSPSIETLDNVRSFDRIQEVPHEGPMCDLLWSDPDDRCGWGISPRGAGYTFGQDISEQFNHTNSLKLIARAHQLVMEGFNWAHEQKVVTIFSAPNYCYRCGNMASILEVDDCREHTFIQFEPAPRRGEPDVTRRTPDYFL

SEQ ID NO: 89893 - DNA, 963 bp, Triticum aestivum
  CDS (1)..(963)
atggagaaggggatggatccggcgctgctggacaacatcatcgccaggctgctggaggtgaagagcctcaagcccgggaagaacgcgcagctgtccgagtcggagatcaagcagctctgcgccgcctccaaggagatcttcctcgcgcagcccaacctcctggagctcgaggcccccatcaaaatctgcggtgatgtccatggccaatattctgatctcctgaggctctttgaatatggtggatatcctcctcagtccaactatcttttcttgggcgattatgtggaccggggaaagcagagccttgagacaatatgccttcttttggcatataaggtcaagtatcctgagaacttctttcttctaaggggcaaccatgaatgtgcatcagtaaaccgcatctatgggttctatgatgagtgcaagcgcagattcagtgtaaaactctggaaaacatttacagactgttttaactgcttaccggtatcagcgttgatagatgaaaagattctatgtatgcatggaggtctttccccagagttgaacaagctggatcaaatactcaacctcaatcgccccacagatgtgcctgatactgggttactttgtgatcttctttggtccgatccttcgaatgaagcgcaagggtgggctatgaatgatcgaggtgtctcatatacatttggacctgataaagtggctgaatttcttgagaagcatgatttagacctcatctgccgagcccatcaggttgttgaggatgactacgagttctttgctgatcgtcagctagtaacaatattttcggcacctaattactgtggagaattcgataatgctggtgccatgatgagtgtagacgagacgctgatgtgctccttccaaatactcaaacctgcaaggaaaatgttgcctggttcaactaataacaagtctggcttcaagtcaatgagaggatggtga

SEQ ID NO: 89894 - protein, 320 aa, Triticum aestivum
MEKGMDPALLDNIIARLLEVKSLKPGKNAQLSESEIKQLCAASKEIFLAQPNLLELEAPIKICGDVHGQYSDLLRLFEYGGYPPQSNYLFLGDYVDRGKQSLETICLLLAYKVKYPENFFLLRGNHECASVNRIYGFYDECKRRFSVKLWKTFTDCFNCLPVSALIDEKILCMHGGLSPELNKLDQILNLNRPTDVPDTGLLCDLLWSDPSNEAQGWAMNDRGVSYTFGPDKVAEFLEKHDLDLICRAHQVVEDDYEFFADRQLVTIFSAPNYCGEFDNAGAMMSVDETLMCSFQILKPARKMLPGSTNNKSGFKSMRGW

SEQ ID NO: 89895 - DNA, 924 bp, Triticum aestivum
  CDS (1)..(924)
atgagcagcccccatggcggcctcgacgaccagatcgagcgcctcatgcagtgcaagcccctccccgaggccgaggttagagcactgtgcgagaaggccaaggagattttgatggaggagagcaatgttcagcctgtaaggagtcctgttacaatctgtggtgatattcatgggcagtttcacgatcttgcggaactgttccgaattggtggaaagtgtccggatacaaattacttgtttatgggagattatgtagatcgtggctactattctgtcgaaactgtcacgctgttggtgtccttgaaagttcgttatcctcagcgaatcaccattcttagaggaaaccatgaaagccgacagatcactcaagtttatggattctatgacgagtgcttaaggaagtatggaaatgcaactgtgtggaaaacctttacggatctgtttgactacttccccttgacagcattggtcgagtcagaaatattttgcttgcatggtggattatcaccatccattgagacacttgataacatacgtaactttgaccgcacccaagaagttcctcatgaagggcccatgtgtgatcttctgtggtctgaccccgatgatcgatgcggttggggtatttctcctcgaggcgctggatataccttcggacaggatatatcagagcagttcaatcataccaataacttacgacttattgctagagctcaccagttggtgatggagggattcaactgggctcatgagcaaaaagtggtcaccatatttagtgcacctaattattgctaccgctgtggaaacatggcatcaatcttggaagttgatgattgccgggagcatactttcatccagttcgagccggccccgagaaggggagaaccagacgtaactcgtagaacgccagactacttcctgtga

SEQ ID NO: 89896 - protein, 307 aa, Triticum aestivum
MSSPHGGLDDQIERLMQCKPLPEAEVRALCEKAKEILMEESNVQPVRSPVTICGDIHGQFHDLAELFRIGGKCPDTNYLFMGDYVDRGYYSVETVTLLVSLKVRYPQRITILRGNHESRQITQVYGFYDECLRKYGNATVWKTFTDLFDYFPLTALVESEIFCLHGGLSPSIETLDNIRNFDRTQEVPHEGPMCDLLWSDPDDRCGWGISPRGAGYTFGQDISEQFNHTNNLRLIARAHQLVMEGFNWAHEQKVVTIFSAPNYCYRCGNMASILEVDDCREHTFIQFEPAPRRGEPDVTRRTPDYFL

SEQ ID NO: 89897 - DNA, 981 bp, Glycine max
  CDS (1)..(981)
atggaccaagctcttgtggacgacataatcaaccgccttctcgaagttcgcggccgcccgggcaagcaggtgcaactgtcggagtcggagatccgccagctctgtgccgcttccagagagattttcctgcagcaacctaatttgttggagcttgaagcacccattaagatttgcggtgatgtacatggtcaatattctgatcttttaaggctttttgagtatggcggactacctcctgaggccaactacttatttttgggggattatgtggatcgagggaagcagagtttggaaacaatatgccttctcctagcatataaaataaaatatcccgagaattttttccttttgaggggtaaccatgaatgtgcttctattaaccgtatatatggattttatgatgagtgtaaacgaaggttcaatgtaaggttatggaagacatttacagaatgcttcaattgccttcctgtggcagcactgattgatgaaaagattttgtgcatgcatgggggtctttctcctgacttgcttaatttggatcagattagaaatctacaacggcccactgatgtgcctgatacaggtttgctttgtgatctcctctggtcagacccaagcaaagaggtccaaggttggggaatgaatgacaggggagtttcatatacatttggtgctgataaggtctcagagtttcttcaaaaacatgatttggatcttatttgtcgtgctcatcaggtggtggaagatgggtatgagttctttgctaaccggcagcttgtaacaatattttcagcacctaattattgtggagagtttgacaatgctggcgctatgatgagtgtcgatgagacactaatgtgctctttccaaatattaaagccagctgataaaaaagtaaagctcaacttcggaagtactactactactaagccaggaaactctccagcaggcgtaaagtccttcctgggtacaaaagtatga

SEQ ID NO: 89898 - protein, 326 aa, Glycine max
MDQALVDDIINRLLEVRGRPGKQVQLSESEIRQLCAASREIFLQQPNLLELEAPIKICGDVHGQYSDLLRLFEYGGLPPEANYLFLGDYVDRGKQSLETICLLLAYKIKYPENFFLLRGNHECASINRIYGFYDECKRRFNVRLWKTFTECFNCLPVAALIDEKILCMHGGLSPDLLNLDQIRNLQRPTDVPDTGLLCDLLWSDPSKEVQGWGMNDRGVSYTFGADKVSEFLQKHDLDLICRAHQVVEDGYEFFANRQLVTIFSAPNYCGEFDNAGAMMSVDETLMCSFQILKPADKKVKLNFGSTTTTKPGNSPAGVKSFLGTKV

SEQ ID NO: 89899 - DNA, 924 bp, Zea mays
  CDS (1)..(924)
atgagcagcccccatggcggcctcgacgaccagatcgagcggctcatgcagtgcaagccgctcgctgagcccgaggtaagagctctgtgtgagaaggcaaaggagattctgatggaggaaagcaatgttcagcctgtaaagagtcctgttactatatgcggtgatattcatggacaatttcatgatcttgctgaactcttccgaattggtggaaagtgtccagatacgaactacctgtttatgggagattatgttgaccgtggttactactctgtcgaaactgtcacacttttggtgtctttaaaagttcgatatcctcagaggatcaccattctcagaggaaaccatgaaagccgacagattactcaagtttatgggttctatgacgaatgcttaaggaagtatggaaacgcaaatgtctggaaaacctttacagatctatttgattacttccccttgactgcattggtcgagtcagaaatattttgtttgcatggtggattatcgccatccattgagaccctcgacaacatccgcaacttcgaccgtgtccaagaagttcctcatgaaggtccaatgtgtgatcttctgtggtctgatccagatgatcgatgtggttggggtatttctccacgtggtgctgggtatacctttggacaggatatatcagagcagttcaaccataccaatagcctaaggcttattgctagagctcaccaattggttatggagggtttcaattgggctcatgagcaaaaggtcgtgactatatttagtgcacctaattattgctaccgctgtgggaacatggcatcaatcctagaagtggatgattgcagggaacatactttcatccagttcgagccagccccgagaaggggagagccagatgtaacccgtaggacacctgactattttctgtga

SEQ ID NO: 89900 - protein, 307 aa, Zea mays
MSSPHGGLDDQIERLMQCKPLAEPEVRALCEKAKEILMEESNVQPVKSPVTICGDIHGQFHDLAELFRIGGKCPDTNYLFMGDYVDRGYYSVETVTLLVSLKVRYPQRITILRGNHESRQITQVYGFYDECLRKYGNANVWKTFTDLFDYFPLTALVESEIFCLHGGLSPSIETLDNIRNFDRVQEVPHEGPMCDLLWSDPDDRCGWGISPRGAGYTFGQDISEQFNHTNSLRLIARAHQLVMEGFNWAHEQKVVTIFSAPNYCYRCGNMASILEVDDCREHTFIQFEPAPRRGEPDVTRRTPDYFL

SEQ ID NO: 89901 - DNA, 912 bp, Zea mays
  CDS (1)..(912)
atggatttggatctgtggatctccaaggtcaaggagggtcagcacctcgccgagcacgagcttcagtccctctgcgaatatgtgaaggagatcctcatcgaagagtcgaacgtgcaaccagtgaacagccccgtgacggtttgcggtgatatccatgggcagttccatgacctaatgaagctcttcgcgacgggtggccacgtcccagagacgaactatattttcatgggtgattttgtggaccgtggcttcaatagtctagaggttttcaccatcctattgctactaaaagcgaggtatcctgcacacattacccttctgcgtggaaatcatgaaagtaggcagttgacacaggtgtatggtttctatgatgagtgtcagagaaagtatggcaacgccaatgcatggaggtactgcactgatgtttttgattaccttacgctatcagcaatcattaatggccaagtcctctgtgttcatggtggtctttctcctgatgtacgcactattgaccagatacgaacgattgatcgcaattgtgaaattccccatgaaggccctttctgcgatcttatgtggagtgaccctgaggagatagagacatgggctgttagtccccgtggagcaggttggctgtttggatcgcgagtaacagcagagttcaactttgttaatggtatcgagctagtttgccgggctcaccagctggtccaggaaggcttaaagtacatgttccaggagaagggccttgtaactgtgtggtctgcacccaattattgctacagatgtggcaatgtagcttctatattaagcttcgatgagaagatggaaagagatgtcaagttcttcacagagacagaggaaaacaaccagatgcgaggcccaaggactgcagtcccatatttcctctga

SEQ ID NO: 89902 - protein, 303 aa, Zea mays
MDLDLWISKVKEGQHLAEHELQSLCEYVKEILIEESNVQPVNSPVTVCGDIHGQFHDLMKLFATGGHVPETNYIFMGDFVDRGFNSLEVFTILLLLKARYPAHITLLRGNHESRQLTQVYGFYDECQRKYGNANAWRYCTDVFDYLTLSAIINGQVLCVHGGLSPDVRTIDQIRTIDRNCEIPHEGPFCDLMWSDPEEIETWAVSPRGAGWLFGSRVTAEFNFVNGIELVCRAHQLVQEGLKYMFQEKGLVTVWSAPNYCYRCGNVASILSFDEKMERDVKFFTETEENNQMRGPRTAVPYFL

SEQ ID NO: 89903 - DNA, 972 bp, Zea mays
  CDS (1)..(972)
atgtcggcggcgccagcggcgggagggcagggtggcgggggcattgacgccgcgctcctcgacgacatcatccgccgcctgctcgaggtgcggaccgcgcgcccagggaagcaggtgcagctctctgagtcggagatccgccagctgtgcaccgtctcccgcgccatcttcctcagccagcccaacctcctcgagctcgaggcgcccatcaagatctgcggtgacatccatggtcaatacagtgatcttctaaggctttttgaatatggaggttttcctcctgaagccaattatctattcttaggtgattatgttgatcgaggcaaacaaagtttggagactatatgccttcttcttgcttacaaaatcaagtaccctgagaacttttttcttctgaggggcaatcatgaatgtgcctcaataaacagaatatatggattttatgatgaatgcaagcgtcgatttaatgtgcggctatggaaggtcttcacagaatgttttaacactctacctgtggctgctcttatcgatgataaaatattatgtatgcacggtggactttctcccgatctagcacacttggatgagataaagaacttgcaacgtccaaccgatgtaccagatcaaggtctactgtgtgacttactttggtcagatccaggaaaagatgttcaagggtggggcatgaatgatagaggggtctcatatacctttggtgctgacaaggtttcagaattcctgcaaaggcatgatcttgatcttatttgtcgtgctcatcaggttgtcgaggatgggtatgaattctttgctgacagacagcttgtcaccatattctcggctcccaattattgtggtgaatttgataatgctggcgcaatgatgagcgttgacgaaactttgatgtgttccttccaaattctgaaacctgctgagagaaaacaaatttatggggccaaacaaaatgtgagatag

SEQ ID NO: 89904 - protein, 323 aa, Zea mays
MSAAPAAGGQGGGGIDAALLDDIIRRLLEVRTARPGKQVQLSESEIRQLCTVSRAIFLSQPNLLELEAPIKICGDIHGQYSDLLRLFEYGGFPPEANYLFLGDYVDRGKQSLETICLLLAYKIKYPENFFLLRGNHECASINRIYGFYDECKRRFNVRLWKVFTECFNTLPVAALIDDKILCMHGGLSPDLAHLDEIKNLQRPTDVPDQGLLCDLLWSDPGKDVQGWGMNDRGVSYTFGADKVSEFLQRHDLDLICRAHQVVEDGYEFFADRQLVTIFSAPNYCGEFDNAGAMMSVDETLMCSFQILKPAERKQIYGAKQNVR

SEQ ID NO: 89905 - DNA, 975 bp, Zea mays
  CDS (1)..(975)
atggacgaggcggcgattgacgacttgatccggcggctcctcgaggcccgcggcgggcgcaccccgcgcaacgcgcaggtgactgacgccgagatccggcgcctctgcgccaccgccaaggacgttttcctctcccagcccaacctcctggagctcgaggcccccattaagatatgcggggatgtccatggccagtattcagacctccttcgattatttgagtatggtggctatccaccagatgcaaattatctgttcctgggtgactatgttgatcgggggaaacagagcatagaaacaatatgccttctcttggcgtacaagataaagtacccagaaaacttctttcttctcaggggaaaccatgaatgtgcctcgatcaaccggatatatgggttttttgatgagtgtaagaggagattcaatgtgcgtatctggaagatattcactgagtgttttaactgcctcccagtggctgcacttattgacgataagatcttttgcatgcatggggggttgtctcctgagctaaagaacatggatcaaatacgtaacatttctcgtcctgtggatgttcctgacgttggtcttctatgtgatctgttatggtcggaccctgataaagagattgttgggtggggtgagaatgacaggggtgtttcctacacctttggagctgacatagttgctgagtttcttcagaaacatgatctagatttgatctgcagggctcaccaggtcgtagaggatggctatgagtttttcgcaaatcgtcggcttgtaacaatattctcagcaccgaactactgtggagagtttgacaatgctggtgcactgatgagcatcgacgactccctagtatgctcgttccagatactcaagccttctgaaaagaaaagaaaagcaggagctgagaacatgccaaagcccggtacacctcccaggaagataaaaataagtgttacccgcatttag

SEQ ID NO: 89906 - protein, 324 aa, Zea mays
MDEAAIDDLIRRLLEARGGRTPRNAQVTDAEIRRLCATAKDVFLSQPNLLELEAPIKICGDVHGQYSDLLRLFEYGGYPPDANYLFLGDYVDRGKQSIETICLLLAYKIKYPENFFLLRGNHECASINRIYGFFDECKRRFNVRIWKIFTECFNCLPVAALIDDKIFCMHGGLSPELKNMDQIRNISRPVDVPDVGLLCDLLWSDPDKEIVGWGENDRGVSYTFGADIVAEFLQKHDLDLICRAHQVVEDGYEFFANRRLVTIFSAPNYCGEFDNAGALMSIDDSLVCSFQILKPSEKKRKAGAENMPKPGTPPRKIKISVTRI

SEQ ID NO: 89907 - DNA, 969 bp, Zea mays
  CDS (1)..(969)
atgatgatgacgcgggcaccgatgggaccgatggagggcgcggcggtggacgagatggtgcgccgcctcgtggagggcggccgaggcgggcgccaggtgcagctgtccgaggcggagatccggcagctctgcgtagagggcaagcgggtgctcctctcccagcccaatctcctccgaatccacgccccagtcaagatctgcggtgatatccatggccagtttgtcgaccttctgagattattcgatttgggtggttatcctccagcttcaacttacgtattcctcggagactatgtcgatagaggcaaacagagcctggagactatatgcttgctgctggcgtacaaaatccggtaccccgaaaatattttcctgttgaggggtaaccacgaggatgcaaagatcaacagagtctatggtttctatgacgaatgtaagaggaggttcaatgttcggctgtggaagatattctctgattgcttcaactgcctgcccatcgcagcgctcatcgatgacaagatactgtgcatgcatggtggcctctcgcccgaattgactagtttggaccagataaaagatattgagcgacctgctgagattcctgattatggtctcctgtgtgatctgctttggtctgatcctagccccgatggagaagggtggggggagagtgacaggggtgtctcgtgtacgtttggtgcagataaacttgtagagtttttggagaagaatgatctcgatcttatatgccgagctcatcaggtggttgaagatggctatgagttctttgcacaacgaagattagtgacaatcttttcagctccaaattattgtggagagtttgataatgttggcgctcttttaagcatagatgagagcctaatgtgttcatttcagatcctgaagccaactgatatgggtccaccgcatgcaagaaaacaaattccaaataagccaacaagagggtga

SEQ ID NO: 89908 - protein, 322 aa, Zea mays
MMMTRAPMGPMEGAAVDEMVRRLVEGGRGGRQVQLSEAEIRQLCVEGKRVLLSQPNLLRIHAPVKICGDIHGQFVDLLRLFDLGGYPPASTYVFLGDYVDRGKQSLETICLLLAYKIRYPENIFLLRGNHEDAKINRVYGFYDECKRRFNVRLWKIFSDCFNCLPIAALIDDKILCMHGGLSPELTSLDQIKDIERPAEIPDYGLLCDLLWSDPSPDGEGWGESDRGVSCTFGADKLVEFLEKNDLDLICRAHQVVEDGYEFFAQRRLVTIFSAPNYCGEFDNVGALLSIDESLMCSFQILKPTDMGPPHARKQIPNKPTRG

SEQ ID NO: 89909 - DNA, 969 bp, Zea mays
  CDS (1)..(969)
atgtcggcggcgccagcggcgggagggcagggtggcgggggcattgacgccgcgctcctcgacgacatcatccgccgcctgctcgaggtgcggaccgcgcgcccagggaagcaggtgcagctctctgagtcggagatccgccagctgtgcaccgtctcccgcgccatcttcctcagccagcccaacctcctcgagctcgaggcgcccatcaagatctgcggtgacatccatggtcaatacagtgatcttctaaggctttttgaatatggaggttttcctcctgaagccaattatctattcttaggtgattatgttgatcgaggcaaacaaagtttggagactatatgccttcttcttgcttacaaaatcaagtaccctgagaacttttttcttctgaggggcaatcatgaatgcgcctcaataaacagaatatatggattctatgatgaatgcaagcgtcgatttaatgtgcggctatggaaggtcttcacagaatgttttaacactctacctgtggctgctcttatcgatgataaaatattatgtatgcacggtggactctctcctgatctagcacacttggatgagataaagaacttgcagcgtccaactgatgtaccagatcaaggtctactgtgtgacttgctttggtcagatccaggaaaagatgctcaagggtggggcatgaatgatagaggggtctcatatacctttggtgctgacaaggtttcagaattcttgcaaaagcatgatcttgatcttatctgtcgtgctcaccaggttgtcgaggatgggtatgaattttttgctgacagacagcttgtcaccatattctcggcccccaattattgtggtgaatttgataatgctggtgcaatgatgagtgtcgatgaaactttgatgtgctcattccaaattctgaaacctgctgagagaaaaaacaaatttatggggtccaacaaaatgtga

SEQ ID NO: 89910 - protein, 322 aa, Zea mays
MSAAPAAGGQGGGGIDAALLDDIIRRLLEVRTARPGKQVQLSESEIRQLCTVSRAIFLSQPNLLELEAPIKICGDIHGQYSDLLRLFEYGGFPPEANYLFLGDYVDRGKQSLETICLLLAYKIKYPENFFLLRGNHECASINRIYGFYDECKRRFNVRLWKVFTECFNTLPVAALIDDKILCMHGGLSPDLAHLDEIKNLQRPTDVPDQGLLCDLLWSDPGKDAQGWGMNDRGVSYTFGADKVSEFLQKHDLDLICRAHQVVEDGYEFFADRQLVTIFSAPNYCGEFDNAGAMMSVDETLMCSFQILKPAERKNKFMGSNKM

SEQ ID NO: 89911 - DNA, 975 bp, Zea mays
  CDS (1)..(975)
atggacgaggcggcggtcgacgacctcatccggcggctcctcgaggcccgcggcgggcgcaccccgcgcaacgcgcaggtgaccgacgctgagatccggcgcctctgcgccgccgccaaggatgtgttcctctcccagcccaacctcctggagctcgaggcccccatcaagatatgcggggatgtccatggtcagtattcagaccttcttcgattatttgagtatggtggctatccaccagatgcaaattatctgttcctcggtgactatgttgatagggggaaacagagcatagaaacaatatgccttctcttggcatacaagataaagtacccagaaaacttctttcttctcaggggaaaccatgaatgcgcctcaatcaaccgaatatatgggttttttgatgagtgtaagaggagattcaatgttcgtatctggaagatattcaccgagtgttttaactgcctcccagtggctgcgcttattgatgacaagatcttttgcatgcatggagggttgtctcctgagctaaagagcatggaccaaatacgtaacatttctcgtcctgtggatgttcctgatgttggtctcctatgtgatctgttatggtcggaccctgataaggagattgataggtggggtgagaatgacaggggtgtttcctacacctttggagctgacgtagttgccgagtttcttcagaaacatgatctagatttgatctgcagggcccaccaggtcgtagaggatggttatgaatttttcgcaaaacgccagcttgtaacaatattctcagcaccgaactactgtggagagttcgacaatgctggtgcactgatgagcattgacaactccctagtatgctcgttccagaaactcaagccttctgagaagaaaggaaaagcaggaaatgggaacatgccaaagcccggtacacctcccaggaagataaaaataagtgttacccatatttag

SEQ ID NO: 89912 - protein, 324 aa, Zea mays
MDEAAVDDLIRRLLEARGGRTPRNAQVTDAEIRRLCAAAKDVFLSQPNLLELEAPIKICGDVHGQYSDLLRLFEYGGYPPDANYLFLGDYVDRGKQSIETICLLLAYKIKYPENFFLLRGNHECASINRIYGFFDECKRRFNVRIWKIFTECFNCLPVAALIDDKIFCMHGGLSPELKSMDQIRNISRPVDVPDVGLLCDLLWSDPDKEIDRWGENDRGVSYTFGADVVAEFLQKHDLDLICRAHQVVEDGYEFFAKRQLVTIFSAPNYCGEFDNAGALMSIDNSLVCSFQKLKPSEKKGKAGNGNMPKPGTPPRKIKISVTHI

SEQ ID NO: 89913 - DNA, 975 bp, Zea mays
  CDS (1)..(975)
atggacgaggcggcgattgacgacttgatccggcggctcctcgaggcccgcggcgggcgcaccccgcgcaacgcgcaggtgaccgacgctgagatccggcgcctctgcgccgccgccaaggatgtgttcctctcccagcccaacctcctggagctcgaggcccccatcaagatatgcggggatgtccatggtcagtattcagaccttcttcgattatttgagtatggtggctatccaccagatgcaaattatctgttcctcggtgactatgttgatagggggaaacagagcatagaaacaatatgccttctcttggcatacaagataaagtacccagaaaacttctttcttctcaggggaaaccatgaatgcgcctcaatcaaccgaatatatgggttttttgatgagtgtaagaggagattcaatgttcgtatctggaagatattcaccgagtgttttaactgcctcccagtggctgcgcttattgatgacaagatcttttgcatgcatggagggttgtctcctgagctaaagagcatggaccaaatacgtaacatttctcgtcctgtggatgttcctgatgttggtctcctatgtgatctgttatggtcggaccctgataaggagattgataggtggggtgagaatgacaggggtgtttcctacacctttggagctgacatagttgctgagtttcttcagaaacatgatctagatttgatctgcagggctcaccaggtcgtagaggatggctatgagtttttcgcaaatcgtcggcttgtaacaatattctcagcaccgaactactgtggagagtttgacaatgctggtgcactgatgagcatcgacgactccctagtatgctcgttccagatactcaagccttctgaaaagaaaagaaaagcaggagctgagaacatgccaaagcccggtacacctcccaggaagataaaaataagtgttacccgcatttag

SEQ ID NO: 89914 - protein, 324 aa, Zea mays
MDEAAIDDLIRRLLEARGGRTPRNAQVTDAEIRRLCAAAKDVFLSQPNLLELEAPIKICGDVHGQYSDLLRLFEYGGYPPDANYLFLGDYVDRGKQSIETICLLLAYKIKYPENFFLLRGNHECASINRIYGFFDECKRRFNVRIWKIFTECFNCLPVAALIDDKIFCMHGGLSPELKSMDQIRNISRPVDVPDVGLLCDLLWSDPDKEIDRWGENDRGVSYTFGADIVAEFLQKHDLDLICRAHQVVEDGYEFFANRRLVTIFSAPNYCGEFDNAGALMSIDDSLVCSFQILKPSEKKRKAGAENMPKPGTPPRKIKISVTRI

SEQ ID NO: 89915 - DNA, 921 bp, Zea mays
  CDS (1)..(921)
atgccgtcgcacggggatctggaccggcagatcgcgcagctgcgcgactgcaagtacctgcccgaggcggaggtcaaggtgctctgcgagcaggccaaggccatcctcatggaggaatggaacgtgcagcccgtgcgctgccccgtcaccgtctgcggcgacatccacggccagttctatgacctcatcgagctcttccgcatcggcggcgactctcccgacaccaactacctcttcatgggcgactacgtcgatcgtggctattattcagttgaaacggtttctctgttagtggctttgaaagtccgttacagagatagaattacaatacttcgaggaaatcatgagagcagacaaatcactcaagtgtacggcttctatgatgaatgcttaagaaaatatggaaatgcaaatgtatggaagtattttacagacttgtttgattatttgcctctcacagctcttatagaaaatcaggtcttctgtcttcatggaggcctctctccgtcattggacacattggataacattcgttctcttgatcgcatacaggaggtacctcatgaaggacccatgtgtgatcttttgtggtctgacccagatgaccgatgtgggtggggaatttcacccagaggagcaggttacacatttgggcaagacattgcacagcagttcaaccatacaaatggtctctctctcatttcaagggcccatcaacttgtaatggaaggatttaattggtgccaggataagaatgtagtcacagtcttcagtgcgcctaattactgttaccgctgtggtaacatggctgctattcttgaaatcggggaaaacatggaccagaacttccttcaattcaaccccgcacctcggcaaattgagccagacacaactcgcaaaaccccagactactttctgtaa

SEQ ID NO: 89916 - protein, 306 aa, Zea mays
MPSHGDLDRQIAQLRDCKYLPEAEVKVLCEQAKAILMEEWNVQPVRCPVTVCGDIHGQFYDLIELFRIGGDSPDTNYLFMGDYVDRGYYSVETVSLLVALKVRYRDRITILRGNHESRQITQVYGFYDECLRKYGNANVWKYFTDLFDYLPLTALIENQVFCLHGGLSPSLDTLDNIRSLDRIQEVPHEGPMCDLLWSDPDDRCGWGISPRGAGYTFGQDIAQQFNHTNGLSLISRAHQLVMEGFNWCQDKNVVTVFSAPNYCYRCGNMAAILEIGENMDQNFLQFNPAPRQIEPDTTRKTPDYFL

SEQ ID NO: 89917 - DNA, 921 bp, Zea mays
  CDS (1)..(921)
atgccgtcgcacggggatctggaccggcagatcgcgcagctgcgcgactgcaagtacctgcccgaggcggaggtcaaggcgctctgcgagcaggccaaggccatccttatggaggagtggaacgtgcagcccgtgcgctgtcctgtcaccgtctgtggcgacatccacggccagttctatgacctcatcgagctcttccgcatcggcggcgacgctcccgacaccaactacctcttcatgggcgactacgtcgatcgtgggtactattcagttgaaacagtttctctgttagtggctttgaaagtccgttacagagatagaattacaatacttagaggaaatcatgagagcagacaaatcactcaagtatatggcttctatgatgaatgcttaagaaagtatggaaatgcaaatgtctggaagtattttacagacttgtttgattttttgcctctcacagctcttatagaaaatcaggtcttctgtcttcacggtggcctctctccgtcattggacacgttggataatattcgttctcttgatcgcgtacaggaggttcctcatgaaggacccatgtgtgatcttttgtggtctgacccagatgaccgatgtggatggggaatttcaccaagaggagcaggttacacatttgggcaagacattgcgcagcagttcaaccatacaaatggtctttctctcatttcaagggcccatcaacttgtaatggaaggatttaattggtgccaggataagaatgtagtcacagtcttcagcgcgcctaattattgttaccgctgtggtaacatggctgctattcttgaaatcggggaaaacatggaccagaacttccttcaattcgacccggcacctcggcaaattgagccagacacaactcggaaaaccccagactactttttgtaa

SEQ ID NO: 89918 - protein, 306 aa, Zea mays
MPSHGDLDRQIAQLRDCKYLPEAEVKALCEQAKAILMEEWNVQPVRCPVTVCGDIHGQFYDLIELFRIGGDAPDTNYLFMGDYVDRGYYSVETVSLLVALKVRYRDRITILRGNHESRQITQVYGFYDECLRKYGNANVWKYFTDLFDFLPLTALIENQVFCLHGGLSPSLDTLDNIRSLDRVQEVPHEGPMCDLLWSDPDDRCGWGISPRGAGYTFGQDIAQQFNHTNGLSLISRAHQLVMEGFNWCQDKNVVTVFSAPNYCYRCGNMAAILEIGENMDQNFLQFDPAPRQIEPDTTRKTPDYFL

SEQ ID NO: 89919 - DNA, 942 bp, Zea mays
  CDS (1)..(942)
atggatcccatgaacgtagacaacggcggctgcggcggccttgacgcgcagatcgagcagctgatgcagtgccgcccgctcgccgagcaggaggttaaggccctgtgcgagaaggccaaggagatattgatggaggaaagcaacgttcagcctgtcaagagtccagttacaatatgtggtgatatacatggacaattccatgatcttgtagagcttttccgaattggtgggaagtgtccagacaccaattacttatttatgggggattatgtagatcgtggctactattctgttgagactgtcactctgctagtagcactaaaagtgaggtacccacatcgaattacaatccttcgtggaaaccatgagagtcggcagatcacacaggtgtatggattctatgacgaatgtctacgcaagtatggcaatgcaaatgtatggaagacatttacggatctttttgattattttcctctgacagctctggtggaatctgagattttctgccttcatggtggcttatccccatcaattgaaaatcttgatagtgtgcgcagcttagatcgagtccaagaggttcctcatgagggacctatgtgcgatcttttatggtcagatccggacgatcgatgtggttggggcatatccccacgtggtgctggctacacttttggccaggacatatcggagcagtttaatcacacaaacaatctcaaacttgtagctcgggctcatcaattagttatggagggatataactgggctcatgaacagaaggttgtcaccatattcagtgctccaaactattgctaccgatgcggcaatatggcatccattttggaagttgacgactgcaatagtcacacattcatacagtttgacccagcccctaggagaggcgagccagatgtgacacgaagaacaccggactatttcctttga

SEQ ID NO: 89920 - protein, 313 aa, Zea mays
MDPMNVDNGGCGGLDAQIEQLMQCRPLAEQEVKALCEKAKEILMEESNVQPVKSPVTICGDIHGQFHDLVELFRIGGKCPDTNYLFMGDYVDRGYYSVETVTLLVALKVRYPHRITILRGNHESRQITQVYGFYDECLRKYGNANVWKTFTDLFDYFPLTALVESEIFCLHGGLSPSIENLDSVRSLDRVQEVPHEGPMCDLLWSDPDDRCGWGISPRGAGYTFGQDISEQFNHTNNLKLVARAHQLVMEGYNWAHEQKVVTIFSAPNYCYRCGNMASILEVDDCNSHTFIQFDPAPRRGEPDVTRRTPDYFL

SEQ ID NO: 89921 - DNA, 924 bp, Zea mays
  CDS (1)..(924)
atgggggcgtcggatctagaccggcagatcgagcagctgaagcggtgcgagccgctcacggaggcggaggtcaaggcactgtgcctcaaggccatggagatcctcatcgaggagagtaacgtgcagcgcgtcgacgcccccgtcaccatttgtggagacatacatggacagttctatgacatgaaggagctgttcaaagttggaggtgactgcccaaagacaaactatttgttccttggggattttgttgaccgaggattttattctgttgaaacttttttgcttcttttggctttaaaggttaggtatccagaccgtattaccttaatacgaggaaaccatgagagcagacagatcacacaggtttatggattctatgatgagtgccttcgcaaatatggctcagtcaatgtctggagatattgcactgatatattcgactatttaagtttgtctgcacttattgagaacaaaatatttagtgtccatggaggcctttctcctgctatcacgacactggatcagataagagtaatagaccgcaagcaagaagtacctcatgatggggctatgtgtgaccttctatggtctgatccagaggacactgtagatggttggggactaagtcctcggggtgcaggattcctctttggtggaaatgtggtctcatcatttaaccattcaaacaacatagattacatttgtcgtgcacatcaacttgtcatggaagggtataaatggatgttcaatagcaagattgtaactgtatggtctgctcctaattactgctacaggtgtggcaatattgctgcaatcctagagctggatgagaacctgaataagcagttccgcgtatttgaagctgctccacatgaatcaagaggtgttcctgctaagaggccagcaccagattactttctgtga

SEQ ID NO: 89922 - protein, 307 aa, Zea mays
MGASDLDRQIEQLKRCEPLTEAEVKALCLKAMEILIEESNVQRVDAPVTICGDIHGQFYDMKELFKVGGDCPKTNYLFLGDFVDRGFYSVETFLLLLALKVRYPDRITLIRGNHESRQITQVYGFYDECLRKYGSVNVWRYCTDIFDYLSLSALIENKIFSVHGGLSPAITTLDQIRVIDRKQEVPHDGAMCDLLWSDPEDTVDGWGLSPRGAGFLFGGNVVSSFNHSNNIDYICRAHQLVMEGYKWMFNSKIVTVWSAPNYCYRCGNIAAILELDENLNKQFRVFEAAPHESRGVPAKRPAPDYFL

SEQ ID NO: 89923 - DNA, 942 bp, Zea mays
  CDS (1)..(942)
atggagcccatgaacgtagacaacggcggcagcggtggccttgacgcgcagatcgaacagctgatgcagtgccgcccgctcgccgagcaagaggttaaggcactgtgcgagaaggccaaggagatattgatggaggaaagcaacgttcagcctgtcaagagtccagtgacaatatgtggtgatatacatggacaattccacgatcttgtagagcttttccgaattggcgggaagtgtccagacaccaattacttatttatgggagattatgtagatcgtggctactattctgttgagactgtcactatgctagtagcactaaaagtgaggtatccacatcgaattacaatccttcgtggaaaccacgagagtcggcagatcacacaggtgtatggattctacgacgaatgcctacgaaagtatggcaatgcaaatgtatggaagacatttacggatctttttgattattttcctctgacagctctggtggaatctgagattttctgccttcatggtggtctatctccatcaattgaaaatcttgatagtgtgcgcagcttagatcgagtccaagaggttccccatgagggacctatgtgcgatctcttatggtcagatccagacgaccgatgtggttggggcatctcccctcgcggtgctggctacactttcgggcaggacatatcagagcagtttaatcacacaaacaatctcaaactcgtagctcgggctcatcaattagttatggagggatataactgggctcatgagcaaaaggttgtcaccatattcagtgctccaaattactgctatcgatgcggcaatatggcatccattttggaagttgacgactgcaacagccacacattcatccagtttgaaccagcccctaggagaggtgagccagatgtgacgcgaagaacaccggattatttcctttga

SEQ ID NO: 89924 - protein, 313 aa, Zea mays
MEPMNVDNGGSGGLDAQIEQLMQCRPLAEQEVKALCEKAKEILMEESNVQPVKSPVTICGDIHGQFHDLVELFRIGGKCPDTNYLFMGDYVDRGYYSVETVTMLVALKVRYPHRITILRGNHESRQITQVYGFYDECLRKYGNANVWKTFTDLFDYFPLTALVESEIFCLHGGLSPSIENLDSVRSLDRVQEVPHEGPMCDLLWSDPDDRCGWGISPRGAGYTFGQDISEQFNHTNNLKLVARAHQLVMEGYNWAHEQKVVTIFSAPNYCYRCGNMASILEVDDCNSHTFIQFEPAPRRGEPDVTRRTPDYFL

SEQ ID NO: 89925 - DNA, 975 bp, Zea mays
  CDS (1)..(975)
atggacgaggcggcgattgacgacttgatccggcggctcctcgaggcccgcggcgggcgcaccccgcgcaacgcgcaggtgactgacgccgagatccggcgcctctgcgccaccgccaaggacgttttcctctcccagcccaacctcctggagctcgaggcccccattaagatatgcggggatgtccatggccagtattcagacctccttcgattatttgagtatggtggctatccaccagatgcaaattatctgttcctgggtgactatgttgatcgggggaaacagagcatagaaacaatatgccttctcttggcgtacaagataaagtacccagaaaacttctttcttctcaggggaaaccatgaatgtgcctcgatcaaccggatatatgggttttttgatgagtgtaagaggagattcaatgtgcgtatctggaagatattcactgagtgttttaactgcctcccagtggctgcacttattgacgataagatcttttgcatgcatggggggttgtctcctgagctaaagaacatggatcaaatacgtaacatttctcgtcctgtggatgttcctgacgttggtcttctatgtgatctgttatggtcggaccctgataaagagattgttgggtggggtgagaatgacaggggtgtttcctacacctttggagctgacatagttgctgagtttcttcagaaacatgatctagatttgatctgcagggctcaccaggtcgtagaggatggctatgagtttttcgcaaatcgccagcttgtaacaatattctcagcaccgaactactgtggagagtttgacaatgctggtgcactgatgagcatcgacgactccctagtatgctcgttccagatactcaagccttctgaaaagaaaagaaaagcaggagctgagaacatgccaaagcccggtacacctcccaggaagataaaaataagtgttacccgcatttag

SEQ ID NO: 89926 - protein, 324 aa, Zea mays
MDEAAIDDLIRRLLEARGGRTPRNAQVTDAEIRRLCATAKDVFLSQPNLLELEAPIKICGDVHGQYSDLLRLFEYGGYPPDANYLFLGDYVDRGKQSIETICLLLAYKIKYPENFFLLRGNHECASINRIYGFFDECKRRFNVRIWKIFTECFNCLPVAALIDDKIFCMHGGLSPELKNMDQIRNISRPVDVPDVGLLCDLLWSDPDKEIVGWGENDRGVSYTFGADIVAEFLQKHDLDLICRAHQVVEDGYEFFANRQLVTIFSAPNYCGEFDNAGALMSIDDSLVCSFQILKPSEKKRKAGAENMPKPGTPPRKIKISVTRI

SEQ ID NO: 89927 - DNA, 25 bp, Artificial sequence
  primer
atggatatggaaattgatgacccta

SEQ ID NO: 89928 - DNA, 26 bp, Artificial sequence
  primer
ttataagaaataatccggtgtcttcc

SEQ ID NO: 89929 - protein, 383 aa, Artificial sequence
  consensus sequence
  Variant (2)..(2): Xaa in position 2 is any amino acid
  Variant (4)..(7): Xaa in position 4 to 7 is any amino acid
  Variant (8)..(9): Xaa in position 8 to 9 is any or no amino acid
  Variant (12)..(22): Xaa in position 12 to 22 is any amino acid
  Variant (24)..(29): Xaa in position 24 to 29 is any amino acid
  Variant (31)..(33): Xaa in position 31 to 33 is any amino acid
  Variant (41)..(42): Xaa in position 41 to 42 is any amino acid
  Variant (45)..(46): Xaa in position 45 to 46 is any amino acid
  Variant (49)..(50): Xaa in position 49 to 50 is any amino acid
  Variant (53)..(54): Xaa in position 53 to 54 is any amino acid
  Variant (56)..(57): Xaa in position 56 to 57 is any amino acid
  Variant (58)..(61): Xaa in position 58 to 61 is any or no amino acid
  Variant (66)..(66): Xaa in position 66 is any amino acid
  Variant (69)..(69): Xaa in position 69 is any amino acid
  Variant (74)..(75): Xaa in position 74 to 75 is any amino acid
  Variant (77)..(77): Xaa in position 77 is any amino acid
  Variant (80)..(81): Xaa in position 80 to 81 is any amino acid
  Variant (84)..(86): Xaa in position 84 to 86 is any amino acid
  Variant (88)..(89): Xaa in position 88 to 89 is any amino acid
  Variant (91)..(96): Xaa in position 91 to 96 is any amino acid
  Variant (103)..(105): Xaa in position 103 to 105 is any amino acid
  Variant (107)..(109): Xaa in position 107 to 109 is any amino acid
  Variant (117)..(117): Xaa in position 117 is any amino acid
  Variant (119)..(119): Xaa in position 119 is any amino acid
  Variant (121)..(124): Xaa in position 121 to 124 is any amino acid
  Variant (125)..(126): Xaa in position 125 to 126 is any or no amino acid
  Variant (128)..(130): Xaa in position 128 to 130 is any amino acid
  Variant (133)..(133): Xaa in position 133 is any amino acid
  Variant (135)..(140): Xaa in position 135 to 140 is any amino acid
  Variant (142)..(148): Xaa in position 142 to 148 is any amino acid
  Variant (149)..(150): Xaa in position 149 to 150 is any or no amino acid
  Variant (152)..(152): Xaa in position 152 is any amino acid
  Variant (159)..(163): Xaa in position 159 to 163 is any amino acid
  Variant (165)..(165): Xaa in position 165 is any amino acid
  Variant (168)..(170): Xaa in position 168 to 170 is any amino acid
  Variant (172)..(175): Xaa in position 172 to 175 is any amino acid
  Variant (177)..(178): Xaa in position 177 to 178 is any amino acid
  Variant (180)..(181): Xaa in position 180 to 181 is any amino acid
  Variant (189)..(194): Xaa in position 189 to 194 is any amino acid
  Variant (195)..(199): Xaa in position 195 to 199 is any or no amino acid
  Variant (201)..(205): Xaa in position 201 to 205 is any amino acid
  Variant (206)..(217): Xaa in position 206 to 217 is any or no amino acid
  Variant (219)..(222): Xaa in position 219 to 222 is any amino acid
  Variant (225)..(228): Xaa in position 225 to 228 is any amino acid
  Variant (231)..(236): Xaa in position 231 to 236 is any amino acid
  Variant (238)..(242): Xaa in position 238 to 242 is any amino acid
  Variant (243)..(244): Xaa in position 243 to 244 is any or no amino acid
  Variant (246)..(246): Xaa in position 246 is any amino acid
  Variant (248)..(249): Xaa in position 248 to 249 is any amino acid
  Variant (254)..(254): Xaa in position 254 is any amino acid
  Variant (256)..(257): Xaa in position 256 to 257 is any amino acid
  Variant (259)..(267): Xaa in position 259 to 267 is any amino acid
  Variant (268)..(273): Xaa in position 268 to 273 is any or no amino acid
  Variant (276)..(277): Xaa in position 276 to 277 is any amino acid
  Variant (284)..(286): Xaa in position 284 to 286 is any amino acid
  Variant (287)..(287): Xaa in position 287 is any or no amino acid
  Variant (289)..(301): Xaa in position 289 to 301 is any amino acid
  Variant (302)..(382): Xaa in position 302 to 382 is any or no amino acid
LXEXXXXXXLCXXXXXXXXXXXNXXXXXXPXXXCGDIHGQXXDLXXLFXXGGXXPXXXXXXNYLFXGDXVDRGXXSXETXXLLXXXKXXYXXXXXXLRGNHEXXXIXXXYGFYDECXRXYXXXXXXWXXXTDXFXXXXXXAXXXXXXXXXCXHGGLSPXXXXXDXIRXXXRXXXXPXXGXXCDLLWSDXXXXXXXXXXXPXXXXXXXXXXXXXXXXXWXXXXRGXXXXFGXXXXXXFXXXXXXXLXLXXRAHQXVXXGXXXXXXXXXXXXXXXVTXXSAPNYCXXXXNXXXXXXXXXXXXXXXXXXXXXXXXXXXXXXXXXXXXXXXXXXXXXXXXXXXXXXXXXXXXXXXXXXXXXXXXXXXXXXXXXXXXXXXXXXXXXXF

SEQ ID NO: 89930 - protein, 34 aa, Artificial sequence
  protein pattern
  Variant (2)..(2): Xaa in position 2 is Ala, Ile, Leu or Val
  Variant (3)..(3): Xaa in position 3 is Lys or Arg
  Variant (4)..(4): Xaa in position 4 is His or Tyr
  Variant (5)..(7): Xaa in position 5 to 7 is any amino acid
  Variant (8)..(8): Xaa in position 8 is Phe, Ile, Leu or Val
  Variant (9)..(9): Xaa in position 9 is any amino acid
  Variant (10)..(11): Xaa in position 10 to 11 is Ile or Leu
  Variant (17)..(17): Xaa in position 17 is Cys, Asp or Ser
  Variant (18)..(19): Xaa in position 18 to 19 is any amino acid
  Variant (20)..(20): Xaa in position 20 is Ile or Leu
  Variant (21)..(21): Xaa in position 21 is Asn or Thr
  Variant (22)..(22): Xaa in position 22 is any amino acid
  Variant (23)..(23): Xaa in position 23 is Ile or Val
  Variant (31)..(31): Xaa in position 31 is any amino acid
  Variant (33)..(33): Xaa in position 33 is Lys or Arg
  Variant (34)..(34): Xaa in position 34 is Phe or Tyr
KXXXXXXXXXXRGNHEXXXXXXXYGFYDECXRXX

SEQ ID NO: 89931 - protein, 26 aa, Artificial sequence
  protein pattern
  Variant (2)..(2): Xaa in position 2 is Leu or Val
  Variant (3)..(4): Xaa in position 3 to 4 is any amino acid
  Variant (5)..(5): Xaa in position 5 is Ile, Leu or Val
  Variant (6)..(6): Xaa in position 6 is any amino acid
  Variant (7)..(7): Xaa in position 7 is Ala, Cys, Asn, Ser, Thr or Val
  Variant (9)..(9): Xaa in position 9 is Ile or Val
  Variant (10)..(10): Xaa in position 10 is any amino acid
  Variant (11)..(11): Xaa in position 11 is Ile or Val
  Variant (15)..(15): Xaa in position 15 is Ile or Val
  Variant (19)..(20): Xaa in position 19 to 20 is any amino acid
  Variant (23)..(24): Xaa in position 23 to 24 is any amino acid
NXXXXXXPXXXCGDXHGQXXDLXXLF

SEQ ID NO: 89932 - protein, 40 aa, Artificial sequence
  protein pattern
  Variant (2)..(3): Xaa in position 2 to 3 is any or no amino acid
  Variant (10)..(10): Xaa in position 10 is any amino acid
  Variant (11)..(11): Xaa in position 11 is Ile, Leu, Met or Val
  Variant (12)..(13): Xaa in position 12 to 13 is any amino acid
  Variant (14)..(14): Xaa in position 14 is Ile, Leu, Met or Val
  Variant (15)..(16): Xaa in position 15 to 16 is any amino acid
  Variant (17)..(17): Xaa in position 17 is Ile, Leu, Met or Val
  Variant (18)..(19): Xaa in position 18 to 19 is any amino acid
  Variant (20)..(20): Xaa in position 20 is Phe, Ile, Leu or Val
  Variant (21)..(21): Xaa in position 21 is any amino acid
  Variant (23)..(24): Xaa in position 23 to 24 is any amino acid
  Variant (25)..(25): Xaa in position 25 is Ala, Asp, Glu or Gln
  Variant (26)..(26): Xaa in position 26 is Ile, Pro or Val
  Variant (28)..(29): Xaa in position 28 to 29 is any amino acid
  Variant (31)..(31): Xaa in position 31 is any amino acid
  Variant (32)..(32): Xaa in position 32 is Phe, Ile, Leu or Met
  Variant (33)..(33): Xaa in position 33 is Ala, Cys or Ser
  Variant (36)..(36): Xaa in position 36 is Leu, Met or Val
  Variant (38)..(38): Xaa in position 38 is Ala or Ser
LXXHGGLSPXXXXXXXXXXXXRXXXXPXXGXXXDLXWXDP

SEQ ID NO: 89933 - protein, 21 aa, Artificial sequence
  protein pattern
  Variant (3)..(3): Xaa in position 3 is Ile or Val
  Variant (4)..(4): Xaa in position 4 is Phe or Trp
  Variant (11)..(13): Xaa in position 11 to 13 is any amino acid
  Variant (14)..(16): Xaa in position 14 to 16 is any or no amino acid
  Variant (18)..(18): Xaa in position 18 is Ala or Asn
  Variant (19)..(20): Xaa in position 19 to 20 is any amino acid
  Variant (21)..(21): Xaa in position 21 is Ala or Ser
VTXXSAPNYCXXXXXXGXXXX

SEQ ID NO: 89934 - protein, 17 aa, Artificial sequence
  protein pattern
  Variant (4)..(4): Xaa in position 4 is Leu or Met
  Variant (7)..(7): Xaa in position 7 is any amino acid
  Variant (12)..(13): Xaa in position 12 to 13 is any amino acid
  Variant (15)..(15): Xaa in position 15 is Ile, Leu or Val
  Variant (17)..(17): Xaa in position 17 is Cys, Ser or Thr
YLFXGDXVDRGXXSXEX

SEQ ID NO: 89935 - protein, 20 aa, Artificial sequence
  protein pattern
  Variant (2)..(5): Xaa in position 2 to 5 is any amino acid
  Variant (6)..(6): Xaa in position 6 is Asp, Gly, Asn or Ser
  Variant (7)..(7): Xaa in position 7 is Ile, Leu or Met
  Variant (8)..(9): Xaa in position 8 to 9 is any amino acid
  Variant (10)..(10): Xaa in position 10 is Ile or Val
  Variant (11)..(11): Xaa in position 11 is Ala, Cys or Ser
  Variant (16)..(16): Xaa in position 16 is Leu or Val
  Variant (18)..(18): Xaa in position 18 is any amino acid
  Variant (19)..(19): Xaa in position 19 is Asp or Glu
FXXXXXXXXXXRAHQXVXXG

SEQ ID NO: 89936 - DNA, 1020 bp, Saccharomyces cerevisiae
  CDS (1)..(1020)
atgacatcttggagggataaatccgcgaaagtgcaagtgaaggagtcagaactgccctcctctataccggcgcagactggattgacgtttaatatatggtataataaatggtcccaagggtttgcggggaatacacgatttgttagtccatttgctttgcagccgcaacttcattctgggaagactaggggcgataatgatggccagttgttcttctgtctattttttgcaaagggtatgtgttgccttggccctaaatgtgaatatctgcatcatataccagacgaagaagatataggtaaactggccctgaggacagaggtattggactgttttggtagagaaaaatttgctgactatagagaggatatgggcgggatcggttcatttaggaagaaaaacaagacattgtatgtaggtggtattgatggagcattgaatagcaagcatttgaagccagctcagatagaaagcagaattcgatttgtattttctcgattgggtgatattgatagaatacgatacgttgagagcaaaaactgtggatttgtgaagtttaaatatcaagctaatgcagaatttgccaaagaagccatgagcaatcagacattgctgctacccagcgataaagaatgggatgatagaagggagggtactggactattggtgaaatgggcaaatgaagatccagaccccgctgcacagaaaagactgcaagaagaactgaagttagagtctttaaacatgatggtgcatctaatcaataacaataccaatagtgctggcactgaggttaataataagaataatgaaaggttagacaggacatttccagaagcaagtgttgataatgtcaagaaaagactattgccattagataatggaatggagagtgatgattttatagaaaaattgaagaaagtgaaaaaaaatatcagtagagaaaatatttcatcaaagccatctgttggtaagcttggtggtcccttgctcgattacctctcctctgatgaggattag

SEQ ID NO: 89937 - protein, 339 aa, Saccharomyces cerevisiae
MTSWRDKSAKVQVKESELPSSIPAQTGLTFNIWYNKWSQGFAGNTRFVSPFALQPQLHSGKTRGDNDGQLFFCLFFAKGMCCLGPKCEYLHHIPDEEDIGKLALRTEVLDCFGREKFADYREDMGGIGSFRKKNKTLYVGGIDGALNSKHLKPAQIESRIRFVFSRLGDIDRIRYVESKNCGFVKFKYQANAEFAKEAMSNQTLLLPSDKEWDDRREGTGLLVKWANEDPDPAAQKRLQEELKLESLNMMVHLINNNTNSAGTEVNNKNNERLDRTFPEASVDNVKKRLLPLDNGMESDDFIEKLKKVKKNISRENISSKPSVGKLGGPLLDYLSSDED

SEQ ID NO: 89938 - DNA, 1197 bp, Gibberella zeae PH-1
  CDS (1)..(1197)
atggccgatacagcagaacaagttgagatggcgccggtcgctgagcaggagaatcaggaaatggcagtagcgacaacaaataatgaagtcgcggcgcccaccggaaagaaggtcgtcaagaagattatccgcaagaagaagcgacctgcgcgagctcaagtcgatcccgattttttcacaacagaaccccctccccagaccggtacgatcttcaacatctggtacaacaagtggtctggcggcgacagagaagacaagtatctatccaagaccaaggccaagagtcgctgcaacgtctcgaaagacagtggatacaccaaggccgacacgataccagggagcttcttctgcttgcgctttgcgcgtggaatttgccccaagggtcaagactgcgattttcttcatcgactccccggaacatacgatcattttaaccccaacgtcgattgcttcggacgcgacaagttctccgactaccgagatgatatgggtggtgtgggaagtttcatgaggcagaacagaacagtttatgcgggaagaattcacgttactgatgatattgaagagatcgtggcgcgacatttcgcagaatggggtcccgtcgagcgcattcgtgttctcaacacccgaggtgtcgctttcgtcacatacgtcaaccaggctaatgccgaattcgcgaaagaggccatggcgcatcagtccctcgaccacgatgaggttctcaacgttcgatgggcaactgccgaccctaatcccatggcgcaagcgcgagaggcgcgtaagattgaggagcaggccgctgatgcaatccgcagagctctccctgcagagttcgtcgctgagattgaaggccgagacccagaggctagaaagagacggaagattgagagcagttatggtcttgagggatacgaggcgcctgacgaaatccactttgctcgaggagctcagtcggtcaaccccctgggacgagaaggtttcgaagtggaataccaggaacgaccaatgattgaaaacggagaggcaggacaagcccaggcggaagagcaacaaccgcaacaagaaaccggtggcatcttctcaggcagtactcttgcggctctcaataaggccaaggtagcggtggcatcgaaacccaaggccgcggcctcagcaggacccttggtggcatacgacagcgacagcgatgatgaatag

SEQ ID NO: 89939 - protein, 398 aa, Gibberella zeae PH-1
MADTAEQVEMAPVAEQENQEMAVATTNNEVAAPTGKKVVKKIIRKKKRPARAQVDPDFFTTEPPPQTGTIFNIWYNKWSGGDREDKYLSKTKAKSRCNVSKDSGYTKADTIPGSFFCLRFARGICPKGQDCDFLHRLPGTYDHFNPNVDCFGRDKFSDYRDDMGGVGSFMRQNRTVYAGRIHVTDDIEEIVARHFAEWGPVERIRVLNTRGVAFVTYVNQANAEFAKEAMAHQSLDHDEVLNVRWATADPNPMAQAREARKIEEQAADAIRRALPAEFVAEIEGRDPEARKRRKIESSYGLEGYEAPDEIHFARGAQSVNPLGREGFEVEYQERPMIENGEAGQAQAEEQQPQQETGGIFSGSTLAALNKAKVAVASKPKAAASAGPLVAYDSDSDDE

SEQ ID NO: 89940 - DNA, 1227 bp, Aspergillus niger
  CDS (1)..(1227)
atggctgaagcaacacccccaactgaaacagtaacccctcctacggaggaggtcgtcgaagaccaacaacaaacccagcaacaagaaaacgaaacaacagaagaaaccaccgccctaacaaccaccgccgacggcgccgtcgaaccgcaaaagaagaccaaaaagataatccgacgcaagcgccgcccagcacgcccacaagtcgacccagcgacaatcaaatccgagcccccaccccaagtcggcacaatcttcaacatctggtacaacaaatggagcggcggtgaccgcgaaaactcctacctaagcaagacggcagcaccctcacgatgcaacatcgcgcgcgacagcggctacacacgggccgataaagtgcccgggtcatacttctgcctgttcttcgcgcgcgggatatgcccgcgcggcgcagagtgcgaatacctgcaccgtttaccaacactgcacgacatattcaacccgaacgtggattgctttggacgggacaagttcagtgactatcgggatgatatgggtggtgtaggatcattcatgagacagaatcgcacgttgtatgtgggacggattcatgtgacggactcgattgaggaggtggtggcgaggaatttccaggaatggggacagattgatcggattcgggtgcttacgtcccggggtgttgcgttcgtgacgtatacaaatgaggcgaatgcgcagtttgcgaaggaggcgatggcgcatcagagtttggatcataatgagattctgaatgtgaggtgggctacggtcgatccgaatccgttggcgcagaagagggaggcgagacggctggaagagcaggctgctgaggcggttaggagggcgttgccggcggagtttgtggctgagttggaaggcagggatcctgaggccaagaagaggaagaagattgaggggagttatgggttgcaggggtatgagccgccggatgaggtgtggttctcgcgtgcgaaggagttggaggatgcgaatgcgattgcgcaattggaggctccagagcagccgctgatgattgagggtgcctctgagactgctgctgctgctccgcaggaggaacaggccggagggatcttctccagctctgctgttgcggcgttgaagggcctggctggcggtgctgtcacgacgcagcaggcgcctaaagctgctggacctctggtggcgtacgggagtgacgatgatagcgagtaa

SEQ ID NO: 89941 - protein, 408 aa, Aspergillus niger
MAEATPPTETVTPPTEEVVEDQQQTQQQENETTEETTALTTTADGAVEPQKKTKKIIRRKRRPARPQVDPATIKSEPPPQVGTIFNIWYNKWSGGDRENSYLSKTAAPSRCNIARDSGYTRADKVPGSYFCLFFARGICPRGAECEYLHRLPTLHDIFNPNVDCFGRDKFSDYRDDMGGVGSFMRQNRTLYVGRIHVTDSIEEVVARNFQEWGQIDRIRVLTSRGVAFVTYTNEANAQFAKEAMAHQSLDHNEILNVRWATVDPNPLAQKREARRLEEQAAEAVRRALPAEFVAELEGRDPEAKKRKKIEGSYGLQGYEPPDEVWFSRAKELEDANAIAQLEAPEQPLMIEGASETAAAAPQEEQAGGIFSSSAVAALKGLAGGAVTTQQAPKAAGPLVAYGSDDDSE

SEQ ID NO: 89942 - DNA, 1233 bp, Aspergillus oryzae
  CDS (1)..(1233)
atggcacacaccacagtagccgaccccccccaatccgtggaacccacaaattctctcgaagaaacaaataccccagacgagcatgtcgccagcgaggaaaatgccctcgccgtcacccagcccgccgagtccgccgtcgcggaaggcgcgccgaagaagaagaagataatcaggaagaagcgccgtccagcacgcatccaggtcgatcccgccacagtcaaatccgagccgcctccgcagacgggtacagtctttaacatttggtacaataaatggtccggcggcgacagagaagacagttacctatcaaaacaacacgccccatcacgatgcaacatctccaaagacagcggctacacgcgcgccgacaaagttaccggctcctacttctgtctgtttttcgcgcgcggtgtctgccacctcggtccggaatgccagtatctgcaccgtctgcccaccatccatgatctcttcagtccgaatgtcgactgtttcggccgcgacaagttcagcgattaccgcgatgatatgggcggtgttgggtcgtttatgcgccagaatcgcacgctgtatgtgggtcggatccatgttacggatgatattgaggaggttgttgcgcggcattttgccgagtggggtgagattgagagaatacgtgtgttgacgtcgaggggtgtggctttcgttacgtatactactcttgcgcaggcggagtttgcgaaggaggctatggcgcatcaatccctcgacaataatgagattttgaatgtgcgttgggcgacggtcgatccgaacccattggctcagaagcgtgaggcgagaaggttggaggagcaagctgctgaggcggtacgcagggcgttgccggcggactttgttgccgaacttgaagggagggaccctgaggctcgaaagaggaagaagattgagggcagtttcggtttgcaagggtatgagcctcctgacgaggtctggtatagccggacgaaacagttggaagatgcaggaaatggagatcaaggtcagctcgaagctccgaaccaaccactcatgcttgagaatgcatcgtctgcttctgctcctccgcaggaatcggaaagcagtggcatcttctctagctctactgttgcggcactgaggggactagcaggcggaaatgttacaacacaagcagctccgcaagcctcggggggtcctctagtaggctacgggagcgatgatgaaagtgattaa

SEQ ID NO: 89943 - protein, 410 aa, Aspergillus oryzae
MAHTTVADPPQSVEPTNSLEETNTPDEHVASEENALAVTQPAESAVAEGAPKKKKIIRKKRRPARIQVDPATVKSEPPPQTGTVFNIWYNKWSGGDREDSYLSKQHAPSRCNISKDSGYTRADKVTGSYFCLFFARGVCHLGPECQYLHRLPTIHDLFSPNVDCFGRDKFSDYRDDMGGVGSFMRQNRTLYVGRIHVTDDIEEVVARHFAEWGEIERIRVLTSRGVAFVTYTTLAQAEFAKEAMAHQSLDNNEILNVRWATVDPNPLAQKREARRLEEQAAEAVRRALPADFVAELEGRDPEARKRKKIEGSFGLQGYEPPDEVWYSRTKQLEDAGNGDQGQLEAPNQPLMLENASSASAPPQESESSGIFSSSTVAALRGLAGGNVTTQAAPQASGGPLVGYGSDDESD

SEQ ID NO: 89944 - DNA, 1245 bp, Aspergillus fumigatus
  CDS (1)..(1245)
atggcggagacagccgtcatcgatcctccacatgccacagagccaacatctctaccaacagaatccgccgacccaagcggccccgctcccagcgacgaaaatgctctcacccaaccgtcagaaagcgccgtcacggccaccacagacgccgatggcacacaaaaaaagaccaagaagataatccggcgaaaacgacgacccgctcggccgcaggtggaccctgcaacgcttaaatcggagccgcccccgcagacaggcaccgtcttcaacatctggtacaacaagtggtccggcggcgaccgcgaggacaagtatctctcgaaacacgccgcgccctcccggtgcaacatcgccaaggacagcgggtacacacgcgcagacaaggtgcccggatcgtacttctgcctgttcttcgcgcgcggcgtctgccccaaaggccacgagtgcgaatacctccaccgcctgccgacgctgcatgacctcttcaaccccaacgtggactgtttcggtcgggacaagttcagcgattaccgggacgacatgggcggtgtgggctcgttcacgcgccagaaccgcacgttgtatgttggccggatccatgtgaccgatgatatcgaggaggtggtgtcgcgccatttcgcggaatggggccagatcgaccgcatccgggtgctgacctcgcgcggggtggcgttcgtcacgtacacgaacgaggcgaatgcgcagtttgctaaggaggccatggcacaccagagtttggatcataatgagattctgaatgtgcgctgggcgacggttgatccgaacccgttggcgcagaagcgggaggcgaggcgtctggaggagcaggcggcggaggcggtgcggagggcactgcccgctgagtttgttgcggagctggagggtcgggacccggaggcaaggaagaagaagaagatcgagggcagctttgggctagagggttatgaggctccggatgatgtgtggtatgctcggaccaaggagttggaggatgcacgtaaagccggccagcttgaggctccagaacagcatttgatgatcgaacccgcaccgtcgtcgtcttccgcagcccttccttcacaatcagaagataccggtatcttctcaaactcaactgtggcggcactaaggggattggccggcggcaatgtgacgacgcaaaaagcccctgtgaattcgggcggtcctcttgttgcttacggaagtgatgatgatagtgactga

SEQ ID NO: 89945 - protein, 414 aa, Aspergillus fumigatus
MAETAVIDPPHATEPTSLPTESADPSGPAPSDENALTQPSESAVTATTDADGTQKKTKKIIRRKRRPARPQVDPATLKSEPPPQTGTVFNIWYNKWSGGDREDKYLSKHAAPSRCNIAKDSGYTRADKVPGSYFCLFFARGVCPKGHECEYLHRLPTLHDLFNPNVDCFGRDKFSDYRDDMGGVGSFTRQNRTLYVGRIHVTDDIEEVVSRHFAEWGQIDRIRVLTSRGVAFVTYTNEANAQFAKEAMAHQSLDHNEILNVRWATVDPNPLAQKREARRLEEQAAEAVRRALPAEFVAELEGRDPEARKKKKIEGSFGLEGYEAPDDVWYARTKELEDARKAGQLEAPEQHLMIEPAPSSSSAALPSQSEDTGIFSNSTVAALRGLAGGNVTTQKAPVNSGGPLVAYGSDDDSD

SEQ ID NO: 89946 - DNA, 921 bp, Candida glabrata
  CDS (1)..(921)
atggatagcgataaagggtggaggcagcggaaggcgcgggtacagcttgcggaagtgagcggcgagctggctgctgcgcagcaaacgcattctgtgaacatatggtatggcaagtggcagtccagcagacatgtttctgtgcaccggctggaccccgagcgggacagcggtgtgacgcgaggcgacagcagcgggacgtggaagttctgcttgtattttgcgcgtgggctatgtgcgttgggccacaagtgcgagtatctgcaccacatacccgagcagagcgacttcgacaggtacctggtggaaggcacgccgctgctggattgttttgggcgcgagaagcatgctgagaaccgggaagacatggcaggggtaggcagtttcaaccagcagaaccggacgttgtacgtgggcaatatcggcaatgcggcggttatgaagaacgggaaaccgctgaacagccgccaggtggagagcaggatacggtatatgtttggcagactgggcccgatggaccgagtacggtacctaccggagaagaactgtgcgtttgtgcggtaccgccaccacataacagcggagtttgcgaaggaggccatgcgggaccagtctctgtctctgtccatggcacaggacgcggcactgggtgcgcaggacagcactggtctactagtcaagtgggcccgagaggacccggatcctcagtcgcgcgcgcacaaggaagaagacctggtaaacgcgctgctatcactgttaccgccacaacaaacgcagaccccaagcaggaccacaagcaggaccactaacaagaccaccaacgaggccacgagcaaagtacgcaagctgcatagaaaggtgtacaggacaaccacagcggctatgtcccataagaatatactcacgtcttacgactcagattga

SEQ ID NO: 89947 - protein, 306 aa, Candida glabrata
MDSDKGWRQRKARVQLAEVSGELAAAQQTHSVNIWYGKWQSSRHVSVHRLDPERDSGVTRGDSSGTWKFCLYFARGLCALGHKCEYLHHIPEQSDFDRYLVEGTPLLDCFGREKHAENREDMAGVGSFNQQNRTLYVGNIGNAAVMKNGKPLNSRQVESRIRYMFGRLGPMDRVRYLPEKNCAFVRYRHHITAEFAKEAMRDQSLSLSMAQDAALGAQDSTGLLVKWAREDPDPQSRAHKEEDLVNALLSLLPPQQTQTPSRTTSRTTNKTTNEATSKVRKLHRKVYRTTTAAMSHKNILTSYDSD

SEQ ID NO: 89948 - DNA, 1055 bp, Cryptococcus neoformans
  CDS (1)..(1029)
atgtcctcagacaatactgtagcgccaaaaaggaagctcaagcctgctcggaagcaagtggcgtcggatgaggtggacaagagtcaaggttaccaagcgggacgagaatacaacatttggtataacaaatgggcaggaggtgacagagaggacgctttagctagcaaagtgcactctcaaacccgatgtatcatctctcgagatgcaggctacacaagagcagatgccaccggtaacaagtactgctgtttgttttttgctcgtggatgttgtccttacggatatgaatgccagtatctccaccgtttaccattaccgagccatcagttaccggacaactctagagactgttttggacgggagaagcacgccgactaccgagatgacatgggtggtgtcggatctttcaaccgtcaaaaccgaacattgtacattggcaaaatccaagaaagcccggataagaagcagatgacggagactttgttgcgtcatttcggagaatggggtaagattgtcaaatataatatcctgtttggacgtggtgtcgcgtttgtgacatacgagactgatcaccaagcgagctttgccaaggaggctatggcgaaccaaagtatggatggtgacgagatcttgaacgttcgatgggctactgaagatcccaatccaggagagaaggttgccgaggaaaaacgtattgaagaaattggacaaaaggccatcgccggcatgctcgacgaaaatttagtcgaagctactcaagctgttcgagcccttgaagacggtgacgttgaggatttctaccatatagaaacatcaaaacctgaagaagaggaggagaacagaccagcgaagaaagggaaaagcgaaggtggatttttcaatgcggacgctctggacaacatcaaattctacgctgaactggcgaagaaacaggctgaagaggagaaggaaaaggctagaaaagtaccggcaaagcaagtggggatgtctttgctcggaggatacggaagcggcgatgagagtgactaaaatctttagggtcatgtttgtttttg

SEQ ID NO: 89949 - protein, 342 aa, Cryptococcus neoformans
MSSDNTVAPKRKLKPARKQVASDEVDKSQGYQAGREYNIWYNKWAGGDREDALASKVHSQTRCIISRDAGYTRADATGNKYCCLFFARGCCPYGYECQYLHRLPLPSHQLPDNSRDCFGREKHADYRDDMGGVGSFNRQNRTLYIGKIQESPDKKQMTETLLRHFGEWGKIVKYNILFGRGVAFVTYETDHQASFAKEAMANQSMDGDEILNVRWATEDPNPGEKVAEEKRIEEIGQKAIAGMLDENLVEATQAVRALEDGDVEDFYHIETSKPEEEEENRPAKKGKSEGGFFNADALDNIKFYAELAKKQAEEEKEKARKVPAKQVGMSLLGGYGSGDESD

SEQ ID NO: 89950 - DNA, 1020 bp, Debaryomyces hansenii
  CDS (1)..(1020)
atgagctatagagagccattaggtgaatacgattgtcatatagataatacacggaatatgcctccagacaccactatagtctcaaaatcaaagaaaggcaaacccgccagactccaagttgaccctgaatctatacctgacgatgatagaccaccacaaactggaaatgtattcaatatatggttcttgaagtggtcaggaggagatagttcaaccaagaattacacgaagctgaagttcagagtaaatatcaaaaaagattcaggttatacgaaagctccgtctaatgctcctttatgtctattttttgctcgaggatgttgttatttgggcaaaaaatgctcatattaccatagattaccaagcgacacagattatttcattcctacgcaagattgttttggaagagacaaaaccagcgattataaagatgatatgaatggagtagggtcgttcagtaaactgaatagaaccttatatataggaggacttcacatggatgataaaatggagaatacgctaaccaagcattttcaggaatttggatcgattgataaaattcgggtgcttcatagtaaagcctgtgcatttgttacatttcgtaccgagaatgaagcacagtttgctaaagaagccatgcagaatcaatccctagatgggaatgaagtcctcaatataaggtgggcgaatgaagatccaaatcctgaagcacagagacaagagaagagaaggttagaagaggtaaccgttaatacagtaaaaaatttattagacctggtttcacaaactgaaagaaagacaaaaaaagttacagtagaggtccctgatgaaattgaagaaactgaatcgtcttcggaaataaaggcattaccatctctggagacgtcatcaggcttgttcaacaattcttcattaaatgcacttaaacaatttcaatccaagaaacgaaaaatagataaacctcaacctaaagagaatttacctacaatgttaggatattcaagtagtgatgaagaataa

SEQ ID NO: 89951 - protein, 339 aa, Debaryomyces hansenii
MSYREPLGEYDCHIDNTRNMPPDTTIVSKSKKGKPARLQVDPESIPDDDRPPQTGNVFNIWFLKWSGGDSSTKNYTKLKFRVNIKKDSGYTKAPSNAPLCLFFARGCCYLGKKCSYYHRLPSDTDYFIPTQDCFGRDKTSDYKDDMNGVGSFSKLNRTLYIGGLHMDDKMENTLTKHFQEFGSIDKIRVLHSKACAFVTFRTENEAQFAKEAMQNQSLDGNEVLNIRWANEDPNPEAQRQEKRRLEEVTVNTVKNLLDLVSQTERKTKKVTVEVPDEIEETESSSEIKALPSLETSSGLFNNSSLNALKQFQSKKRKIDKPQPKENLPTMLGYSSSDEE

SEQ ID NO: 89952 - DNA, 1254 bp, Emericella nidulans
  CDS (1)..(1254)
atggcagacacagcagtgatcgatacatcacctgcagcggccacagcagagccgtcagtcgatacaacgccgcaagatggcgaaagagaagaaataacaccaaatggagagaacgctcttgtccagcaacaatcagaaaccgccgaaacaggtatcacagacgcgaacagcacacagaagaaaacgaagaagatcattcggcggaaacgacgacctgcacggccacaggttgaccctgcgacgttaaagtccgagcctcccccacaaacaggaacggtgttcaacatctggtacaataagtggtctggcggcgatcgcgaggacaagtatctttcgaaaactgcggccccgtcacgatgcaacatcgcaagagatagtggatatacgcgcgcagataaagtgcggggctcttatttctgtttgttttttgctcgggggatatgccccaaaggccatgaatgcgaatatctccaccgcctccctaccctgcacgacctattcaacccaaacgtcgactgctttggccgcgacaaacacagcgactaccgcgacgatatgggcggtgtcggctccttcatgcgccagaaccgcaccctgtacgtcggccgcatccacgtaaccgacgatattgaggaagttgtcgcccgacatttcgcagaatggggccaaattgaccggacgagagtgcttacatcgcgcggcgtcgctttcgttacgtacaccaacgaagcgaatgcacagttcgccaaggaagccatggcgcaccagagcttggatcataacgaaatcttaaatgtgcggtgggcgaccgttgatccaaatcccttggcgcagaagagggaggcaaggaggttagaggagcaggctgctgaggctgtgaggagggcgctgccagcggagtttgtggcggagttggaggggagggatcccgaggcgaagaagagaaagaggattgaggggagttatggactgcaggggtatgaacctccagatgaggtgtggtttgcgagggcgaaggaacttgagggtacgggaaatgaacatgcgaaactcgaggcccctgagcagccgctcatgattgagagtggaagtgcttcagcgcctcagaaccaagttgaatcaagtggcggtatcttttccagctcggccgttgctgcgttaagaggactgaatggtggcaatgtaacgacaaaaccagcgccgcaggcttcgggcccgttggtagcttatggaagcgatgatgagagtgattaa

SEQ ID NO: 89953 - protein, 417 aa, Emericella nidulans
MADTAVIDTSPAAATAEPSVDTTPQDGEREEITPNGENALVQQQSETAETGITDANSTQKKTKKIIRRKRRPARPQVDPATLKSEPPPQTGTVFNIWYNKWSGGDREDKYLSKTAAPSRCNIARDSGYTRADKVRGSYFCLFFARGICPKGHECEYLHRLPTLHDLFNPNVDCFGRDKHSDYRDDMGGVGSFMRQNRTLYVGRIHVTDDIEEVVARHFAEWGQIDRTRVLTSRGVAFVTYTNEANAQFAKEAMAHQSLDHNEILNVRWATVDPNPLAQKREARRLEEQAAEAVRRALPAEFVAELEGRDPEAKKRKRIEGSYGLQGYEPPDEVWFARAKELEGTGNEHAKLEAPEQPLMIESGSASAPQNQVESSGGIFSSSAVAALRGLNGGNVTTKPAPQASGPLVAYGSDDESD

SEQ ID NO: 89954 - DNA, 1014 bp, Kluyveromyces lactis
  CDS (1)..(1014)
atgactggggattggaagaaccgaccagcaagggttcagttacaggagtctgacctaccttcatcagtaccgcctcagacgggtttggctttcaacgtatggtacaacaaatggtcacaggggcaaagtgggtccactaggttcgtcacaccgtactcgcttgatcccgagaacgattctggtatcactaaaggtgataaagagggtcggattcatttctgtttgtatttcgctaagggaatgtgctgtttaggcaaaaattgtcggtacttgcatcatattccagagccagatgattttgcgaggttagctttgcattcctctgcgttagattgttttggaagagagaaatttgctgattatagagatgatatgggtggggtaggttccttcaagaaacctaaccgtgtcttatacgtgggtggtattacaggggcactcaacaacaaaactttgaaaccacatcagattgagaatagagtgaaatacaagttcgggaaacttggagaattggattctgttcgatacgtggagagtaagaattgtgcctttgtcaagttcaaattacagtgtaactccgaatttactaaggaagcaatgggcaatcagactctattaataccaaccgataaagagtgggatctaaggaaggagggaactgggttgcttgtgaaatgggcgaacgaggatcctaatccagctgtacgaaagagagaattggaagaacaaacccaagagactttgaaagctataaaacaactagtggctagtactgaaggcactgtaaatcaaaaacgtaaagttgaagaaatcaacgaagtgagagattcgcaggcgaacagtcgtgaaagattcagcattagggagaatgcaatcatagataagactattttagataagttgaaacaaaggaaagtgactattaccaataccaacgttgctgcaaatataacagtttcaaaaccatcgtcggttttacctttggtaacccaatattcatctgatgaagactag

SEQ ID NO: 89955 - protein, 337 aa, Kluyveromyces lactis
MTGDWKNRPARVQLQESDLPSSVPPQTGLAFNVWYNKWSQGQSGSTRFVTPYSLDPENDSGITKGDKEGRIHFCLYFAKGMCCLGKNCRYLHHIPEPDDFARLALHSSALDCFGREKFADYRDDMGGVGSFKKPNRVLYVGGITGALNNKTLKPHQIENRVKYKFGKLGELDSVRYVESKNCAFVKFKLQCNSEFTKEAMGNQTLLIPTDKEWDLRKEGTGLLVKWANEDPNPAVRKRELEEQTQETLKAIKQLVASTEGTVNQKRKVEEINEVRDSQANSRERFSIRENAIIDKTILDKLKQRKVTITNTNVAANITVSKPSSVLPLVTQYSSDED

SEQ ID NO: 89956 - DNA, 1266 bp, Leptosphaeria maculans
  CDS (1)..(1266)
  misc_feature (1044)..(1044): n is a, g, c or t
atgaccgaagtacaaccaccgcccgcgcaatctactgtcgctacggcagacacgccttcactcgcaccggacacaaccctcgagacatccacatccaccgagcttgcgcccatcacaaccgaacagaccatcataaccaccaatgcagaaggtaaaaaggtcaagaagattattcgccgcaagagaagaccagcgcgaccgcaagtcgaccccgcgacctttaagacggacacgccagccccaactggtacaagcttcaacatctggtacaacaaatggagcggcggcgatcgcgaagacaaatacctaagccagacggcggcacaagggcgctgcaatgttgcgagagatagcggctataccaaagccgacaagacacccggttcctacttttgtctcttcttcgcgcgtggcatatgtcccaagggcgtcgactgcgaatacctgcatcgtctccccaccgtcaccgatatcttcccctccaacatcgattgtttcggccgagacaagcactcggactaccgcgacgacatgggcggtgtaggctccttccaacggcaaaatcgcaccctgtacattggccgcatccacgtcaccgacgacattgaagaaatcgtcgcccgtcactttcaagaatggggccagattgaacgcacgcgcgtcctcaccgcccgcggcgtagctttcgtaacctacatgaacgaagcaaacagccaattcgcaaaagaagcaatggcgcaccagagcctcgaccacaatgaaatcctcaacgtgcgctgggcaaccgtcgacccaaacccccaggccgcaaaacgagaggcccatcgcatcgaggagcaggccgcagaggctatccgcaaagccctacccgccgcctatgtcgccgagctagaaggccgcgatcccgaagccaagaagaggcgcaagatagaaggcagctttggcttgcagggctacgaggccccagacgacgtctggtatgccaaggaaaaggcagagtgggaagcagcaaaggagattgaggcagctggtggtgctgctcancccagacaaatgattgagagcggcgaggatgcacatgcgcacgaagcggactgtgcggctatgcaggtcgcgccgtctgggcagcacagtcagggcaatggtatattttccacttctacgctcgcggcactaaggggatatacggccgcgccggcaaaaccgaaagttgcacctgtggcggggccgctggtgggatatggaagtgatgatgatagcgattga

SEQ ID NO: 89957 - protein, 421 aa, Leptosphaeria maculans
  misc_feature (348)..(348): The Xaa at location 348 stands for Gln, or His.
MTEVQPPPAQSTVATADTPSLAPDTTLETSTSTELAPITTEQTIITTNAEGKKVKKIIRRKRRPARPQVDPATFKTDTPAPTGTSFNIWYNKWSGGDREDKYLSQTAAQGRCNVARDSGYTKADKTPGSYFCLFFARGICPKGVDCEYLHRLPTVTDIFPSNIDCFGRDKHSDYRDDMGGVGSFQRQNRTLYIGRIHVTDDIEEIVARHFQEWGQIERTRVLTARGVAFVTYMNEANSQFAKEAMAHQSLDHNEILNVRWATVDPNPQAAKREAHRIEEQAAEAIRKALPAAYVAELEGRDPEAKKRRKIEGSFGLQGYEAPDDVWYAKEKAEWEAAKEIEAAGGAAXPRQMIESGEDAHAHEADCAAMQVAPSGQHSQGNGIFSTSTLAALRGYTAAPAKPKVAPVAGPLVGYGSDDDSD

SEQ ID NO: 89958 - DNA, 1743 bp, Magnaporthe grisea
  CDS (1)..(1743)
atgtcagacactgaacaaccacaagcagcagagggcaccgagctggtacccacgagcaatggaccagtcgtccccgaaggccagaaaaaggtcaaaaagataatacgcgtcaagaagaagcgcccagcgcgacctcaaatcgacccggccctcgtcaagtcggagccaccgccgcaaacgggcacaactttcaacatctggtacaacaaatggtccggcggcgaccgtgaagacaaatacacctcccagacggccgccaagggccgatgcaacgtggcaaaagactcaggatacaccaaagccgaccagacaacgggctcctacttctgtctcttcttcgcgcgcggcgtatgtcccaagggtcaggactgcgagtacctccaccggctgccgacgctgcacgatctctacagtcccaacgtggactgcttcgggcgcgaccgcttctcagactaccgcgacgacatgggcggtgtgggttcctttatgcggcagaaccggacagtctatgttgggcggatccacgtcacggacgatattgaggaggtggtggcgcggcattttgcagaatggggccaggtcgaaaggatacgggtgctgaaccaaaggggtgtcgccttcatcacctacacaaacgaggctaatgcacagtttgcaaaagaggcaatggctcaccagagcctcgaccataatgagattctcaacgtgcgctgggccacggcggacccgaacccgatggcgcaggctagggaggctcgtagggttgaggagcaggctgccgaggcggtaaggagggcgctcccggctgaatttgtcgccgaaattgagggcagggatcccgaggccaggaagaggaggaaaatggagagctcttacgggttggatggttacgaggcccctgacgaggtgcactttgccaggggcgcgcaggccgtcaacccggtcggcaggaggggttttgaagatcaactcatgttggaaggtggtggtgaagaggtttctgcaagggaggctctgtttggagcagaaggtagcgggagtggggatggtgatgcaggcggcatcttctcgagcagcacgttagcggcgctgaattcagcacaggtcaaagtctctgctcagccaaagcaggctgcagccacggggccattggtggcatacggaatccattaccggcaccgtctggcacgcgtcctcgacctcggtagcccactccctctgcaccgccaggtcgaccagtctccggacctcatcccccgccagcagtttctgggcctgatagggaccaaaaacgcccgcgcgcaccgccgccgacgccagcgccttgacgtggcccagaaccagcacaaaggcggcctggtgcgccgacagtccggctgcggcacagactgcgccaaacagcggggcgaggtgcgccgcggccggtggcaggtggctcggcggcgcgttggtgatgcagtcgacgggcttgtgctgccgccccggggacttgacggccgccacgtactcggcaatgtcccggtctggcgggagcgacggggcaaagcagcgctcccacaggccgatcaacgcgcggccctgcgacacgctggcgcggcgggcgacggtgcagacgagcgaggcgtcgaggcagtcgtccaggtagagcagacgagaagggtcgcggtgggcggccagggtgaaggggagggtggtggatgcaaaggccgagatggagagcgggaggaaggtggtgaagggtga

SEQ ID NO: 89959 - protein, 580 aa, Magnaporthe grisea
MSDTEQPQAAEGTELVPTSNGPVVPEGQKKVKKIIRVKKKRPARPQIDPALVKSEPPPQTGTTFNIWYNKWSGGDREDKYTSQTAAKGRCNVAKDSGYTKADQTTGSYFCLFFARGVCPKGQDCEYLHRLPTLHDLYSPNVDCFGRDRFSDYRDDMGGVGSFMRQNRTVYVGRIHVTDDIEEVVARHFAEWGQVERIRVLNQRGVAFITYTNEANAQFAKEAMAHQSLDHNEILNVRWATADPNPMAQAREARRVEEQAAEAVRRALPAEFVAEIEGRDPEARKRRKMESSYGLDGYEAPDEVHFARGAQAVNPVGRRGFEDQLMLEGGGEEVSAREALFGAEGSGSGDGDAGGIFSSSTLAALNSAQVKVSAQPKQAAATGPLVAYGIHYRHRLARVLDLGSPLPLHRQVDQSPDLIPRQQFLGLIGTKNARAHRRRRQRLDVAQNQHKGGLVRRQSGCGTDCAKQRGEVRRGRWQVARRRVGDAVDGLVLPPRGLDGRHVLGNVPVWRERRGKAALPQADQRAALRHAGAAGDGADERGVEAVVQVEQTRRVAVGGQGEGEGGGCKGRDGEREEGGEG

SEQ ID NO: 89960 - DNA, 1167 bp, Schizosaccharomyces pombe
  CDS (1)..(1167)
atgtcagaaaatgggttagaacaagaagtcactgttgaggaaaaaaataacgatgttacagaaaagattttggtagagggggaaaaatccaaagagtacgaagaaacccctcgaaaagtgaagattgtcaagcgcaaaaagcaacctgcgcgcaagcaaattgaaactcgaccagagtatgaaatggagcccgaacaacctggacaagtttacaacctgtggtacaacaagtggagtggaggcatgcgacaggatccgttaaaaagccaagtaaagtcagaaacgagatgtgtaatatccagggattcaggttatactaaggcggataaaaatccagggtcatttttttgcctttattttgctcggggaatgtgttcagaagggtctaaatgtgaatatcttcatcggcttccaaaggacactgactttttcaatgccaatgttgattgctttggtcgcgaaaagcatgcggattatcgagatgatatgggaggtgtcggttcctttttgagacaaaactatacgctatatgtcgggggaattactcctacagatgatatcgaagaaatagtttcacgacattttgccgaatggggggatatagaacgaattcgagttttaaactctagaggcatcgcttttatcacatatttaaacgaggccaatgcccaatttgcaaaagaggcaatggctcatcaatcactggaccacgatgaatgtctgaacgttcgctgggcaactacggatccaaatccagcttcacaagcgcgcaaccaaagacgattagaagagcgtgcagccaacgctgtaaaaaaactattaccgaagcaatttcttttggatttagaggagacaaaaaatggaaaaagtggaaatcgcaagcggaaattggaacttgagtttggattaaaaggatacgttccatcagacgatttgctgtatgccgacggcgcgaattctgttcataaccagctggctgcgaacgaatttccaaataaatcgcaatcagaagaaggtagcaatgatgatcacaaaagcgttactactactgaaagtcaaaataaattcgtcaattcacaaattttgagtgacttgcaggttgctaaacaagcagtacataccaatcaaagcgccttagtgtcatattacgatagtgatgaagactaa

SEQ ID NO: 89961 - protein, 388 aa, Schizosaccharomyces pombe
MSENGLEQEVTVEEKNNDVTEKILVEGEKSKEYEETPRKVKIVKRKKQPARKQIETRPEYEMEPEQPGQVYNLWYNKWSGGMRQDPLKSQVKSETRCVISRDSGYTKADKNPGSFFCLYFARGMCSEGSKCEYLHRLPKDTDFFNANVDCFGREKHADYRDDMGGVGSFLRQNYTLYVGGITPTDDIEEIVSRHFAEWGDIERIRVLNSRGIAFITYLNEANAQFAKEAMAHQSLDHDECLNVRWATTDPNPASQARNQRRLEERAANAVKKLLPKQFLLDLEETKNGKSGNRKRKLELEFGLKGYVPSDDLLYADGANSVHNQLAANEFPNKSQSEEGSNDDHKSVTTTESQNKFVNSQILSDLQVAKQAVHTNQSALVSYYDSDED

SEQ ID NO: 89962 - DNA, 1443 bp, Ustilago maydis
  CDS (1)..(1443)
atgttgggtcagagcccacctcagctcagcattacatacgccgacatgagcgagacgcaagcgcaaggcgttcaatcgcctggccaggtagcttcaacctcgtatcagccgcgtcctgcacgcaaacaagtcacccaggccaagtttgatgccatccgagaagcttttagtgcgagacccgattccgcaggcaccttcaacatctggtacgagaactttgccggcgtcgatcgggaggaaaacgaggctcaaaaggcaaaacgcgagactagatgcgacattgcgagagattcgggctatactagagccgatatcaccctgaaaacgcaagcagcacgcattcagcaaggtgcacctgtcgctccagacgaggccgtttactgctgtattcattttgcgcgtggctgctgtccgcatggtgccgaatgcaactttcttcatcgacttcctcgtcccaacgactatcccagccaagggcgtgactgctttggtcgggaaaagctcggcaactacaaggatgacatgagcggtactggctcgctatccaaggtcaatcgcaccctctatgtaggtcggatccacgaagagcatggcgtatcttccccttctgctccggccaattcggcatggcgggacggcggcaaaacgctcaaaggaggtcgcagcatccacgacgtgcgtaacaagaacggacctcgtccacgacaagatcccaagtcatatcggccacaacacaattccgtacgtcccgagaccgacaatgctacggaacgtgtggtgcgacgtcatttcagtgaatggggagagatcgatagactacgcgttctcaccggccgatcgtgtgcatttgtcacattcaagtacgaagccaatgcacaattcgccaaggaagccatgctcaaccagtcgctcgaccacaacgagatcatcaacgttcgatgggcttccgacgatccaaatccagctgcacagaagcgcaatcaggaacagatgcgccgtgcaggggaacgcgctatcatggccggaatgtctgaacaagcaatccaggctcagcaggcattgcgtgcacttgaaggtttggagcatcagcgtggcgaggatgccgactcgaagcgtcgcaggatttctcatcagagctatgatgaggatatgcgaaggctcgaggaagagaatgaacgtggatgggtcgaatttgctcaggaaaggcaagctgccgtcgccgctgcaccaacaagccaagccccgtcggctgcaagctcagcaagcaagaacaacatcaccggctcgcttctaaattcggagacaatgtcccatctagcatcacttcagaatcttgatcaaaagcaaggcggagcatcagatacctacccaccacccgtgtcttccaatgggctcggcagcttggcggggtatggcagcgatagcgaggatgacgatagctaa

SEQ ID NO: 89963 - protein, 480 aa, Ustilago maydis
MLGQSPPQLSITYADMSETQAQGVQSPGQVASTSYQPRPARKQVTQAKFDAIREAFSARPDSAGTFNIWYENFAGVDREENEAQKAKRETRCDIARDSGYTRADITLKTQAARIQQGAPVAPDEAVYCCIHFARGCCPHGAECNFLHRLPRPNDYPSQGRDCFGREKLGNYKDDMSGTGSLSKVNRTLYVGRIHEEHGVSSPSAPANSAWRDGGKTLKGGRSIHDVRNKNGPRPRQDPKSYRPQHNSVRPETDNATERVVRRHFSEWGEIDRLRVLTGRSCAFVTFKYEANAQFAKEAMLNQSLDHNEIINVRWASDDPNPAAQKRNQEQMRRAGERAIMAGMSEQAIQAQQALRALEGLEHQRGEDADSKRRRISHQSYDEDMRRLEEENERGWVEFAQERQAAVAAAPTSQAPSAASSASKNNITGSLLNSETMSHLASLQNLDQKQGGASDTYPPPVSSNGLGSLAGYGSDSEDDDS

SEQ ID NO: 89964 - DNA, 1149 bp, Yarrowia lipolytica
  CDS (1)..(1149)
atgtctgaggctccggaatctatcgaaacctcgccagtggttacaccagacgtcgcagaaagcgtacagaaccaaggtgtcgaggtagtacaaacagaagcacccacagaagctcaggtggtcaaaacgaaatctaagaagaagagaaccaaagatcctgcattataccatactcggaaagcacggatccaggtggaccccgactcggtcaacactgatgacagacctccacagacaggaaccgtctataatatctggttcaacaagtggagtggaggagacaaggaggatgaaaagttcaaccagaagaaagcagatggacgatgtagcatagcccgtgactcaggatacacccgggcagacaaggtaccgggatcctacttttgcctgtattttgcccggggtctgtgtactcaagggcacaagtgtgagtttctgcatcgtcttcctgtgttgaccgacatgtttagtcctacgactgattgttttggtcgggaccggttctttgactacagagatgatatggggggtattggttcgatcagtagagtcaaccgaactctatatgtaggtcgtatccatgtgagtgatgctgccaaagcaggtgctctggatgagattgtctcgagacacttttctgaatggggagacgttgaccgcattcgagttttgcatgacaagggcgttgcatttgtgacatacgccacagaagtgaatgcgcagtttgctaaggaggccatggctcaccagagtctggatagtggagaggttcttaacgtacgatgggcgacacaggatcccgatcctttggctcaggcacgtgaacagcgacgactggaagagaatgccgccgaggctattaagcggctgttgcctcaggagtacgtggatgagctcgaaggtcgagctaagaagagcaagccattgctggagggttacgaagaagatgacagcgagaaactgaagagaatcatgaacaatcagaaggaggctggagctgagcctgctgaagaggtcaagcagattgaacctgcccctgagcctgctgctcccgtatccactgatacaggcatgttcaacaagagctctcttagtgctctcaaggctcttaagaagaaaaagaagaccaaggccaaggtagaagagtaa

SEQ ID NO: 89965 - protein, 382 aa, Yarrowia lipolytica
MSEAPESIETSPVVTPDVAESVQNQGVEVVQTEAPTEAQVVKTKSKKKRTKDPALYHTRKARIQVDPDSVNTDDRPPQTGTVYNIWFNKWSGGDKEDEKFNQKKADGRCSIARDSGYTRADKVPGSYFCLYFARGLCTQGHKCEFLHRLPVLTDMFSPTTDCFGRDRFFDYRDDMGGIGSISRVNRTLYVGRIHVSDAAKAGALDEIVSRHFSEWGDVDRIRVLHDKGVAFVTYATEVNAQFAKEAMAHQSLDSGEVLNVRWATQDPDPLAQAREQRRLEENAAEAIKRLLPQEYVDELEGRAKKSKPLLEGYEEDDSEKLKRIMNNQKEAGAEPAEEVKQIEPAPEPAAPVSTDTGMFNKSSLSALKALKKKKKTKAKVEE

SEQ ID NO: 89966 - DNA, 24 bp, Artificial sequence
  primer
atgacatcttggagggataaatcc

SEQ ID NO: 89967 - DNA, 24 bp, Artificial sequence
  primer
ctaatcctcatcagaggagaggta

SEQ ID NO: 89968 - protein, 451 aa, Artificial sequence
  consensus sequence
  Variant (4)..(4): Xaa in position 4 is any amino acid
  Variant (6)..(22): Xaa in position 6 to 22 is any amino acid
  Variant (23)..(28): Xaa in position 23 to 28 is any or no amino acid
  Variant (39)..(46): Xaa in position 39 to 46 is any amino acid
  Variant (47)..(52): Xaa in position 47 to 52 is any or no amino acid
  Variant (54)..(58): Xaa in position 54 to 58 is any amino acid
  Variant (64)..(64): Xaa in position 64 is any amino acid
  Variant (67)..(70): Xaa in position 67 to 70 is any amino acid
  Variant (71)..(89): Xaa in position 71 to 89 is any or no amino acid
  Variant (93)..(93): Xaa in position 93 is any amino acid
  Variant (98)..(98): Xaa in position 98 is any amino acid
  Variant (100)..(101): Xaa in position 100 to 101 is any amino acid
  Variant (103)..(104): Xaa in position 103 to 104 is any amino acid
  Variant (106)..(106): Xaa in position 106 is any amino acid
  Variant (113)..(122): Xaa in position 113 to 122 is any amino acid
  Variant (123)..(128): Xaa in position 123 to 128 is any or no amino acid
  Variant (134)..(134): Xaa in position 134 is any amino acid
  Variant (136)..(137): Xaa in position 136 to 137 is any amino acid
  Variant (150)..(152): Xaa in position 150 to 152 is any amino acid
  Variant (158)..(158): Xaa in position 158 is any amino acid
  Variant (160)..(160): Xaa in position 160 is any amino acid
  Variant (162)..(167): Xaa in position 162 to 167 is any amino acid
  Variant (168)..(224): Xaa in position 168 to 224 is any or no amino acid
  Variant (226)..(230): Xaa in position 226 to 230 is any amino acid
  Variant (231)..(231): Xaa in position 231 is any or no amino acid
  Variant (233)..(233): Xaa in position 233 is any amino acid
  Variant (235)..(235): Xaa in position 235 is any amino acid
  Variant (237)..(239): Xaa in position 237 to 239 is any amino acid
  Variant (241)..(241): Xaa in position 241 is any amino acid
  Variant (243)..(243): Xaa in position 243 is any amino acid
  Variant (245)..(249): Xaa in position 245 to 249 is any amino acid
  Variant (254)..(259): Xaa in position 254 to 259 is any amino acid
  Variant (261)..(261): Xaa in position 261 is any amino acid
  Variant (268)..(269): Xaa in position 268 to 269 is any amino acid
  Variant (274)..(275): Xaa in position 274 to 275 is any amino acid
  Variant (276)..(287): Xaa in position 276 to 287 is any or no amino acid
  Variant (289)..(289): Xaa in position 289 is any amino acid
  Variant (296)..(297): Xaa in position 296 to 297 is any amino acid
  Variant (302)..(305): Xaa in position 302 to 305 is any amino acid
  Variant (307)..(317): Xaa in position 307 to 317 is any amino acid
  Variant (319)..(365): Xaa in position 319 to 365 is any amino acid
  Variant (366)..(447): Xaa in position 366 to 447 is any or no amino acid
  Variant (449)..(450): Xaa in position 449 to 450 is any amino acid
PARXQXXXXXXXXXXXXXXXXXXXXXXXNIWYNKWSGGXXXXXXXXXXXXXXRXXXXXDSGYTXADXXXXXXXXXXXXXXXXXXXXXXXFCLXFARGXCXXGXXCXYLHRLPXXXXXXXXXXXXXXXXDCFGRXKXXDYRDDMGGVGSFXXXNRTLYXGXIXXXXXXXXXXXXXXXXXXXXXXXXXXXXXXXXXXXXXXXXXXXXXXXXXXXXXXXXXXXXXXXEXXXXXXFXEXGXXXRXRXLXXXXXAFVTXXXXXXAXFAKEAMXXQSLDXXXXXXXXXXXXXXEXLNVRWAXXDPNPXXXXRXXXXXXXXXXXAXXXXXXXXXXXXXXXXXXXXXXXXXXXXXXXXXXXXXXXXXXXXXXXXXXXXXXXXXXXXXXXXXXXXXXXXXXXXXXXXXXXXXXXXXXXXXXXXXXXXXXXXXXXXXXXXXXXXXXXXXXXXXXXXXLXXY

SEQ ID NO: 89969 - protein, 33 aa, Artificial sequence
  protein pattern
  Variant (5)..(5): Xaa in position 5 is Asp or Glu
  Variant (6)..(6): Xaa in position 6 is Lys or Arg
  Variant (7)..(7): Xaa in position 7 is Phe or His
  Variant (8)..(8): Xaa in position 8 is any amino acid
  Variant (12)..(12): Xaa in position 12 is any or no amino acid
  Variant (14)..(14): Xaa in position 14 is any or no amino acid
  Variant (18)..(18): Xaa in position 18 is Ile or Val
  Variant (21)..(21): Xaa in position 21 is Phe or Ile
  Variant (22)..(22): Xaa in position 22 is any amino acid
  Variant (23)..(23): Xaa in position 23 is Lys or Arg
  Variant (24)..(24): Xaa in position 24 is any amino acid
  Variant (26)..(26): Xaa in position 26 is any amino acid
  Variant (27)..(27): Xaa in position 27 is Thr or Val
  Variant (28)..(28): Xaa in position 28 is Leu or Val
  Variant (30)..(30): Xaa in position 30 is Ala, Ile or Val
  Variant (32)..(32): Xaa in position 32 is any amino acid
CFGRXXXXDYRXDXMGGXGSXXXXNXXXYXGXI

SEQ ID NO: 89970 - protein, 28 aa, Artificial sequence
  protein pattern
  Variant (2)..(3): Xaa in position 2 to 3 is any amino acid
  Variant (4)..(4): Xaa in position 4 is any or no amino acid
  Variant (8)..(8): Xaa in position 8 is any or no amino acid
  Variant (10)..(10): Xaa in position 10 is any or no amino acid
  Variant (12)..(12): Xaa in position 12 is Lys or Arg
  Variant (14)..(14): Xaa in position 14 is Ile, Leu, Met or Val
  Variant (16)..(17): Xaa in position 16 to 17 is any amino acid
  Variant (19)..(20): Xaa in position 19 to 20 is any amino acid
  Variant (22)..(22): Xaa in position 22 is Asp, Glu, Gln or Arg
  Variant (23)..(23): Xaa in position 23 is Phe or Tyr
  Variant (26)..(26): Xaa in position 26 is His or Arg
  Variant (27)..(27): Xaa in position 27 is Ile or Leu
GXXXFCLXFXAXGXCXXGXXCXXLHXXP

SEQ ID NO: 89971 - protein, 24 aa, Artificial sequence
  protein pattern
  Variant (2)..(2): Xaa in position 2 is any amino acid
  Variant (3)..(3): Xaa in position 3 is Pro or Gln
  Variant (4)..(4): Xaa in position 4 is Pro, Thr or Val
  Variant (6)..(7): Xaa in position 6 to 7 is any amino acid
  Variant (8)..(8): Xaa in position 8 is Phe or Tyr
  Variant (10)..(10): Xaa in position 10 is Ile, Leu or Val
  Variant (12)..(12): Xaa in position 12 is Phe or Tyr
  Variant (13)..(13): Xaa in position 13 is any amino acid
  Variant (17)..(17): Xaa in position 17 is any or no amino acid
  Variant (19)..(20): Xaa in position 19 to 20 is any or no amino acid
  Variant (22)..(23): Xaa in position 22 to 23 is any amino acid
  Variant (24)..(24): Xaa in position 24 is Glu, Gln, Arg or Ser
PXXXGXXXNXWXXKWSXGXXGXXX

SEQ ID NO: 89972 - protein, 27 aa, Artificial sequence
  protein pattern
  Variant (2)..(2): Xaa in position 2 is any amino acid
  Variant (3)..(3): Xaa in position 3 is Ile or Val
  Variant (4)..(4): Xaa in position 4 is Lys or Arg
  Variant (7)..(7): Xaa in position 7 is Asn or Thr
  Variant (8)..(8): Xaa in position 8 is any amino acid
  Variant (11)..(11): Xaa in position 11 is Asp or Asn
  Variant (13)..(13): Xaa in position 13 is any or no amino acid
  Variant (15)..(15): Xaa in position 15 is any amino acid
  Variant (16)..(17): Xaa in position 16 to 17 is any or no amino acid
  Variant (19)..(20): Xaa in position 19 to 20 is any amino acid
  Variant (21)..(21): Xaa in position 21 is Glu, His, Lys or Arg
  Variant (22)..(22): Xaa in position 22 is Glu, Lys or Arg
  Variant (23)..(25): Xaa in position 23 to 25 is any amino acid
  Variant (26)..(26): Xaa in position 26 is Glu, Asn, Gln or Arg
  Variant (27)..(27): Xaa in position 27 is Ala, Ser, Thr or Val
LXXXWAXXDPXPXAXXXRXXXXXXXXX

SEQ ID NO: 89973 - DNA, 675 bp, Saccharomyces cerevisiae
  CDS (1)..(675)
atgtctgttattaatttcacaggtagttctggtccattggtgaaagtttgcggcttgcagagcacagaggccgcagaatgtgctctagattccgatgctgacttgctgggtattatatgtgtgcccaatagaaagagaacaattgacccggttattgcaaggaaaatttcaagtcttgtaaaagcatataaaaatagttcaggcactccgaaatacttggttggcgtgtttcgtaatcaacctaaggaggatgttttggctctggtcaatgattacggcattgatatcgtccaactgcatggagatgagtcgtggcaagaataccaagagttcctcggtttgccagttattaaaagactcgtatttccaaaagactgcaacatactactcagtgcagcttcacagaaacctcattcgtttattcccttgtttgattcagaagcaggtgggacaggtgaacttttggattggaactcgatttctgactgggttggaaggcaagagagccccgaaagcttacattttatgttagctggtggactgacgccagaaaatgttggtgatgcgcttagattaaatggcgttattggtgttgatgtaagcggaggtgtggagacaaatggtgtaaaagactctaacaaaatagcaaatttcgtcaaaaatgctaagaaatag

SEQ ID NO: 89974 - protein, 224 aa, Saccharomyces cerevisiae
MSVINFTGSSGPLVKVCGLQSTEAAECALDSDADLLGIICVPNRKRTIDPVIARKISSLVKAYKNSSGTPKYLVGVFRNQPKEDVLALVNDYGIDIVQLHGDESWQEYQEFLGLPVIKRLVFPKDCNILLSAASQKPHSFIPLFDSEAGGTGELLDWNSISDWVGRQESPESLHFMLAGGLTPENVGDALRLNGVIGVDVSGGVETNGVKDSNKIANFVKNAKK

SEQ ID NO: 89975 - DNA, 828 bp, Arabidopsis thaliana
  CDS (1)..(828)
atgtcaacaggaatatccactgatctccatgtccattttggagctctaaatttctcaaaaacctacaaatctggtttaagcaatcgaacggtgtctttttcgagagtcgggtatgctcagaacaggaaattgagctgcagtgtttccaacacagagaatgtagctcctaaggatgatgaaagaggaaaggatagacctttggttaagatgtgtggcatcacatcagccagagatgcagctatggcagttgaggctggtgccgattttattgggatgattatttggccacattcaaaacgatctatttctctttctgtcgcaaaggatatctccaaagtggccagggaaggtggggccaaacctgttggtgtttttgttgaagatgatgagaacacgatactgagagcagctgattcctctgaccttgagcttgtgcagcttcatggtaatggttcgcgtgctgctttctcgaggttagtacgcaagaggagagtcatatatgtccttaatgcaaatcaggatggaaagctcttgaatgaagttcctgaagaggattgtcatcttgctgattggattcttgtggatagtgcaacgggtgggagtggacacggatttaactgggctcaattcaagttgccttccgtcagaagcagaaatgggtggctcttagctgggggaatcaatccaacaaatgtttcagaagctctttctatccttcaacctgatggaattgatgttagtagcggtatttgcggtacagacggtatccagaaggataagtctaagataagctcctttataactgcagttcgctctgtacactactaa

SEQ ID NO: 89976 - protein, 275 aa, Arabidopsis thaliana
MSTGISTDLHVHFGALNFSKTYKSGLSNRTVSFSRVGYAQNRKLSCSVSNTENVAPKDDERGKDRPLVKMCGITSARDAAMAVEAGADFIGMIIWPHSKRSISLSVAKDISKVAREGGAKPVGVFVEDDENTILRAADSSDLELVQLHGNGSRAAFSRLVRKRRVIYVLNANQDGKLLNEVPEEDCHLADWILVDSATGGSGHGFNWAQFKLPSVRSRNGWLLAGGINPTNVSEALSILQPDGIDVSSGICGTDGIQKDKSKISSFITAVRSVHY

SEQ ID NO: 89977 - DNA, 786 bp, Methanosarcina acetivorans C2A
  CDS (1)..(786): transl_table=11
ttgcccgggagaagcgtttcttgcctcctccgatacatccgtgttaagcccggcttccggggaaaaggcatgaaaacaaggccaaaaacaaggataaaaacaagggtaaaaatctgcgggatccgcagtccgaaagacatagaatttgcagccctctacggtgccgatgccgtgggtttcatcacggaagtccctgtggaaagcccgaggaaactcgattcagacaccgcggctgcccttatttcaaaagtcccgaaatgccttgattcggtaatggtaataatgcctgaaacttccacctctgccctcgaacttatcgagaaagtaaagccgaatatagtgcagatccactcggatctaccccttagcgaacttaaagctgtaagagaaaaagctgatattccaatcataaagaccctttccgtgcccgccgagcaggaggctcccaaactccataacattgtaactcgtcttcttgaggaggtccgcgagctggaagagagcgggattgtggatagcgtgcttctggactcggggattgccggaaaaaccggcggcacaggctgtgtacatgactgggacctgagccggagaattgccgaagaaacagaacttcccctgatccttgcaggcgggctaaaacctgaaaacgtgcaggaagctatcaggtctgtttccccttatgctgtggacacggcttcaggggtagagacccaggggaaaaaagattctgtgaaagtcaggaagtttattgaagaagtgaggtgtacctatgctttcctttga

SEQ ID NO: 89978 - protein, 261 aa, Methanosarcina acetivorans C2A
MPGRSVSCLLRYIRVKPGFRGKGMKTRPKTRIKTRVKICGIRSPKDIEFAALYGADAVGFITEVPVESPRKLDSDTAAALISKVPKCLDSVMVIMPETSTSALELIEKVKPNIVQIHSDLPLSELKAVREKADIPIIKTLSVPAEQEAPKLHNIVTRLLEEVRELEESGIVDSVLLDSGIAGKTGGTGCVHDWDLSRRIAEETELPLILAGGLKPENVQEAIRSVSPYAVDTASGVETQGKKDSVKVRKFIEEVRCTYAFL

SEQ ID NO: 89979 - DNA, 2295 bp, Magnaporthe grisea 70-15
  CDS (1)..(2295)
atggccaccacaggcatcgtcgacaactcacctcaccatcctgacccctcaccatcagttcctacggcgtcaaatctgattctcattgataactatgactccttcacttggaatgtctaccaatacctcgtccttgagggtgccaaggtcaccgtctaccgtaacgaccagatcactctcgatgagttgatagccttgaaacccacccagctggtcatcagccccggccctggccacccaaagacggattcaggaatcagccgcgatgccatcaagcactttgccggcaagattcccatctttggcgtttgcatgggccagcagtgcatcatcgatctgtacggaggcgaggtcagcttcgccggggagatcctgcacggcaagacctcccccctggtccacgatggcaagggggtttacgccggtctggcacagggcctgcccgtgaccaggtaccactccctggcagggacccacgtgagcctccccgagaccctcgaggtcacctcctggatcgccaaggacgacagcagtaagggagtcataatgggggttcggcacaaggagtacgccattgagggcgtgcagttccacccggagagcatcctctccgccgacggccgctccatgttccgcaactttgtccaactccagcacggcacctgggcagagaactcggggatcctgcagcaggccaaggacgccgccgccagctccaaggccaaagaggcttctaccggcccgggcggcaagaagacaaacattctgcaaaagatctacacccgccgcaaggagctggtgtcggcccagaaggagctcccgtcgcagaggatggctgacctcgaggctgcatatcgactcaacgccgctcccccactggtgcccctcatcgaccgcctccgccagtccccgttcgacgtggcactcatggccgagatcaagcgtgcgtccccgtccaagggtgattttgcaccgcacatcaacgcgccggcccaggcacgcaagtatgccctggccggtgccagcgtcatttcggttctcaccgagccggactggttcaagggtagcatcgaggacctaagagccatcaggcaggtccttgccggcatgtccaacaggccggctatcctccgcaaagagtttgtttttgacgagtatcagatcctcgagggtaggttggcaggagccgacactgtgcttctgattgtaaaaatgctggaaaaagatgtcctcaagcgtctatacaattactccctatcattggggatggagccacttgtcgaggtccaaaatggcgatgaaatgtccatcgccgtggagctcggcgcaaaggctatcggcgtcaacaaccgcaacctagagagcttcgaggtcgacctgggcacgacgagccggctgaggtccatggtaccagagtccaccattctgtgtgcactcagcgggatcaacacgcacgacgatgtcatggcttacaagaaggacggagtcaacgccgtcctcgtgggcgaatccatcatgcgcgcgccggacgcctccgagttcattcaccagctctgcgcaggtgtagccacagcgccagcagagcccaatcccgggcctttgctggtcaagatctgcggcacgagaacggccgaggccgcgacggaggccatcaaggcgggagctgacatggtgggaatgatactggtccccggcacgaagcgatgcgtatcggatgaggcggccctggagatatcaaaggcagtgcacgagacagtgcccgctttggctgctccgaaatcacaacagacgacgccaaaggatttcttctcgcagggtagggagtcgctcaggagaaaaggaccgttgctggtaggagtcttccagaaccagcccctcgacgagattctggagaagcaggcacggtacaagctggacgtagtgcagttccacggcaacgagcccgtagagtgggccaggctgatccccgtgcccgtcgtgcacaagtttaagcctggggaaccagggcttgggctccgtggctaccacgtcctgccgcttttggactctggctccgggtctggccagcaactggacgtggcggccgtcaaggccgagtttgagaaggactcggatcttcaggtcgtctttgcgggcggcttggggcctgacaatgtagagcaggccgtttcggccttgggcgagttcgccggccgagtggcgggcgtggacgttagcagcggagttgaggaggacggcaagcaaagcttgcccaagatacgggcctttgttgaggctgcgagacgaattagataa

SEQ ID NO: 89980 - protein, 764 aa, Magnaporthe grisea 70-15
MATTGIVDNSPHHPDPSPSVPTASNLILIDNYDSFTWNVYQYLVLEGAKVTVYRNDQITLDELIALKPTQLVISPGPGHPKTDSGISRDAIKHFAGKIPIFGVCMGQQCIIDLYGGEVSFAGEILHGKTSPLVHDGKGVYAGLAQGLPVTRYHSLAGTHVSLPETLEVTSWIAKDDSSKGVIMGVRHKEYAIEGVQFHPESILSADGRSMFRNFVQLQHGTWAENSGILQQAKDAAASSKAKEASTGPGGKKTNILQKIYTRRKELVSAQKELPSQRMADLEAAYRLNAAPPLVPLIDRLRQSPFDVALMAEIKRASPSKGDFAPHINAPAQARKYALAGASVISVLTEPDWFKGSIEDLRAIRQVLAGMSNRPAILRKEFVFDEYQILEGRLAGADTVLLIVKMLEKDVLKRLYNYSLSLGMEPLVEVQNGDEMSIAVELGAKAIGVNNRNLESFEVDLGTTSRLRSMVPESTILCALSGINTHDDVMAYKKDGVNAVLVGESIMRAPDASEFIHQLCAGVATAPAEPNPGPLLVKICGTRTAEAATEAIKAGADMVGMILVPGTKRCVSDEAALEISKAVHETVPALAAPKSQQTTPKDFFSQGRESLRRKGPLLVGVFQNQPLDEILEKQARYKLDVVQFHGNEPVEWARLIPVPVVHKFKPGEPGLGLRGYHVLPLLDSGSGSGQQLDVAAVKAEFEKDSDLQVVFAGGLGPDNVEQAVSALGEFAGRVAGVDVSSGVEEDGKQSLPKIRAFVEAARRIR

SEQ ID NO: 89981 - DNA, 2289 bp, Gibberella zeae PH-1
  CDS (1)..(2289)
atgggttcctcagatatcattgatcactctcctcaccaaggtgatccctcacctccgatcccgaccgcttccaatcttattgtcattgacaactacgactctttcacttggaacatttaccagtaccttgttcttgctggagctacggttactgtctatcgaaatgacaaggttaccgtggaggaattggttgccaagaaacccactcagatcattattagccctggacccggacatcccgagactgactctggagtgagccgcgatgtcatcaagcactttgcaggcaaagtcccaatctttggtgtttgtatgggcctccaatgcatcttcaatgtctacggtggagaagtcagctccgctggtgagtggcttcacggcaagacttcacctttgacccatgactccaagggtgtcttctccggtctaagccagggtgtaccagttactcgatatcactctcttgccggaacccatgttactctgcctgaggacttggagatctcctcctgggttgccaagcctgatggctctcctggtgtcattcaaggcgtgcgtcacaagaagtacacaattgagggtgttcaattccaccctgagagtattttgaccgaaggtggacgagccatgatcacaaactttctgcatatgcaaggaggtacttgggaggaaaacacccagttccaaaagtcgggcactgttgccagtgacaactcggcagcgcccaagtctaaaaagaccaacaacattctgcagcggatttacgcaaaccgaaaggctgcagtagacgctcagaagcagattccttctcagaggttcgaggacctccaggtcgcttatgatctgaatgccgcccctccccagattcctcttgttagccggctacgggagtctccctttgatgttgctctcatggctgaaatcaagcggggttctccttcaaagggtatatttgctcttgatatctctgctcctgcccaggctcgaaagtacgccttggcgggtgcgagtgtcatttctgttctgacagagcctgagtggttcaagggcagcattgaagatttgagggcagtccgacaagttttagacggcatgcctaacaggcccgcaattctgcgaaaggaattcatctttgatgagtatcaaattctcgaggcccgattggctggtgctgatactgttcttctcattgtcaagatgcttgacactgaacttctgcatcgtctatacaactactctcttcagctgggaatggagcccctcgtcgaggttcagaatgctgaagagatgacaacagcagtcaagctgggtgccaaggtcatcggcgtcaacaaccgtaacctggagagctttgaggtggatctcaacacaaccggccggctacgcagcatggtgccagaatctacaatcatctgcgcacttagcggcatcaacactcacgatgacgttctaatgaacaagagggatggtgtcaatgctgttcttgtcggtgaggccattatgaaggcgcctgacgccagtgtttttatcagtcagctgtgctctggaaccgagcctgcagccaagactggtgttgcaccatctttgtatgtcaagatctgcggcactcgaagtgccgaagctgcgcgaagggctgccgagtcaggggcagactttgttggcatctgtcttgtccccagcgccaagcgatgcatctcacacgagaccgcccttgccatttcagaagctgtgcacactttctccagcactcgaaagtatgaaacacaagtgtcagcagtggataacaaagccaaggactttttcgaggctgcaacccagagactcagcagtccccgacctcagcttgtcggcatcttccagaaccagcccctgagcgaggtccttgagaagcagaagcaatacaacctcgatcttgtgcagctacatggtgatgagcctattgagtgggccaacctaatccctgtaccagttgtccgatgcttcaagccgagccaggttggcattggtcgtcgcggataccacacggttcctctcctcgattcgggctctggttctggcaagcttcttaacgttgcaaatgttcaagctgtcctggagagtgaccctgaactccgtgtctttttggcaggtggcctcaaccccgacaatgtcgctgagtctgtcaaggctttgggccccctagctgaccgcgtgattggtgttgatgtgagcagtggcgtagaggaggatggaaagcaaagtctcgacaagatcacggcattcatcaaggccgctaaagaaatccgatag

SEQ ID NO: 89982 - protein, 762 aa, Gibberella zeae PH-1
MGSSDIIDHSPHQGDPSPPIPTASNLIVIDNYDSFTWNIYQYLVLAGATVTVYRNDKVTVEELVAKKPTQIIISPGPGHPETDSGVSRDVIKHFAGKVPIFGVCMGLQCIFNVYGGEVSSAGEWLHGKTSPLTHDSKGVFSGLSQGVPVTRYHSLAGTHVTLPEDLEISSWVAKPDGSPGVIQGVRHKKYTIEGVQFHPESILTEGGRAMITNFLHMQGGTWEENTQFQKSGTVASDNSAAPKSKKTNNILQRIYANRKAAVDAQKQIPSQRFEDLQVAYDLNAAPPQIPLVSRLRESPFDVALMAEIKRGSPSKGIFALDISAPAQARKYALAGASVISVLTEPEWFKGSIEDLRAVRQVLDGMPNRPAILRKEFIFDEYQILEARLAGADTVLLIVKMLDTELLHRLYNYSLQLGMEPLVEVQNAEEMTTAVKLGAKVIGVNNRNLESFEVDLNTTGRLRSMVPESTIICALSGINTHDDVLMNKRDGVNAVLVGEAIMKAPDASVFISQLCSGTEPAAKTGVAPSLYVKICGTRSAEAARRAAESGADFVGICLVPSAKRCISHETALAISEAVHTFSSTRKYETQVSAVDNKAKDFFEAATQRLSSPRPQLVGIFQNQPLSEVLEKQKQYNLDLVQLHGDEPIEWANLIPVPVVRCFKPSQVGIGRRGYHTVPLLDSGSGSGKLLNVANVQAVLESDPELRVFLAGGLNPDNVAESVKALGPLADRVIGVDVSSGVEEDGKQSLDKITAFIKAAKEIR

SEQ ID NO: 89983 - DNA, 777 bp, Debaryomyces hansenii CBS767
  CDS (1)..(777)
atgtcaaaattagttaaagtatgtggtattaggaccgaggaggcagcaaattgtgctatcgaatcgggtgttgatttacttggagtgatcttggttcctaatagaaagagaaccattgatcacaatgtagccaaaaacatttcacttttggcaagtgataagagaaagataaaggatactcaattcaaaactgtaaattctatattgaagcatctagaggggcaatcttttctgaatagcgaccaatattttattgcatttaagcaattaataatagataatgggccatttttagttggagttttcagaaatcaagatatttcagatgtgttcaagattgcaggggagcttagtttagattttatacagcttcatgggaatgaggataaggaagaattttgcgaatataattcactgaaagaatcatgtacatatgggatcattccacgattcgtgatcccaagagatattgccgtgatggacaaactctttacagaaacaatcagagataatgtacatgtcggcagtggtttagcgttgccattattggactctgaattgggaggagaaggtaaaattattgattggaaagcagtcgatgatttaaagaaaggcaagtttattttggctggaggcttaaatccgtctaatgttcgaagtgcgttcgtgatcaacaatgtaataggatttgacgtaagcggtggtgttgaggatggagatgggaataaagatttaacgaaaattgaaagtttcataaaagctgtcaaggaaacttaa

SEQ ID NO: 89984 - protein, 258 aa, Debaryomyces hansenii CBS767
MSKLVKVCGIRTEEAANCAIESGVDLLGVILVPNRKRTIDHNVAKNISLLASDKRKIKDTQFKTVNSILKHLEGQSFLNSDQYFIAFKQLIIDNGPFLVGVFRNQDISDVFKIAGELSLDFIQLHGNEDKEEFCEYNSLKESCTYGIIPRFVIPRDIAVMDKLFTETIRDNVHVGSGLALPLLDSELGGEGKIIDWKAVDDLKKGKFILAGGLNPSNVRSAFVINNVIGFDVSGGVEDGDGNKDLTKIESFIKAVKET

SEQ ID NO: 89985 - DNA, 1203 bp, Yarrowia lipolytica CLIB122
  CDS (1)..(1203)
atggactttctctactcttcgacatgtctacatcccgtgggagagttcaagggccaactcaacggactaatggtgcccaagtacactgaagcggacgccgaggagtggtaccggtggatcatggccaacaaggacgcccaggccctcatctacacagactcgtcgattggcgtggagcagggtcgactggtgcgggatctgtaccggcagtttgacccgcgacccatgatcatccgacgactggatcaggacgccatcgaggtggcccaaatacaaaagtctcgcgtcatgggatgcgacgggttggtatttccacactctgcaaatatctccgacctggccgacgaggtccgagactcgggtctccatattctcagagacgggttctcctacgaaggcgagaaggtaagtgtcaacctggtaacggacaaaaacaccggccactccgaaaagacaagcccgactccggagacgtgccccaaccctagcacgtgtcccacccatagcagtcccacggcccctgtggctccgccggcgcatcctactaacgccaatatcgccagtcccgagactgccggccccgtcgttaagatctgcggcctgcgcacccttgaggctgctgtcgtggccatggaaagcggtgccgacatgttgggtatgattctcgttcctggacgagcccggacagtcaattttgacgttgcacgggagattgccgctgtggtgcgttcaggcaagtatagaaacgcacatagtggtaagcggccgttattggtcggcgtattccgcaaccagccgttaccatacattctgtcatgtgttgcggacctcaatctcgacattgtgcagctgcatggcgacgagccgctcgactggtgcagacagattcctgtgtctgtaatcaagcgtgtgtctcctggaaagcgggacttccgacagtcgctggtggccggataccagtcgttttcgcttctggacagcgaggtgggtggagaaggacagctggtggactggaccagtgcggaaaagtggtacgacaaccacgtgcggtttattttggccggcgggctgactccggaaaatgtggcgcaggccgtccaggtcaagggtgtcattggagtggacgtctctggaggcgtggagaccgacggggaaaaggatctcgacaaaatcaggctgtttgtcaaaaacgccagggggtaa

SEQ ID NO: 89986 - protein, 400 aa, Yarrowia lipolytica CLIB122
MDFLYSSTCLHPVGEFKGQLNGLMVPKYTEADAEEWYRWIMANKDAQALIYTDSSIGVEQGRLVRDLYRQFDPRPMIIRRLDQDAIEVAQIQKSRVMGCDGLVFPHSANISDLADEVRDSGLHILRDGFSYEGEKVSVNLVTDKNTGHSEKTSPTPETCPNPSTCPTHSSPTAPVAPPAHPTNANIASPETAGPVVKICGLRTLEAAVVAMESGADMLGMILVPGRARTVNFDVAREIAAVVRSGKYRNAHSGKRPLLVGVFRNQPLPYILSCVADLNLDIVQLHGDEPLDWCRQIPVSVIKRVSPGKRDFRQSLVAGYQSFSLLDSEVGGEGQLVDWTSAEKWYDNHVRFILAGGLTPENVAQAVQVKGVIGVDVSGGVETDGEKDLDKIRLFVKNARG

SEQ ID NO: 89987 - DNA, 681 bp, Candida albicans SC5314
  CDS (1)..(681): transl_table=12
atgaaagtagttaagatttgtggtatcaagacggtggaggcagcgagtgttgctatagacaatggagcgaatctcttagggtgtatactagttcctaatcgtgcccgtacgattgatttggaggtggcaaagcagattgctcgcatggtaaagagagataggaacccaccgccaaagtttgcgggtggtacctcaacacaacactttgaacaggttgcacaatggattattgagaatgggccgtttttagttggggtgtttaggaaccagccaaaggaagaagtgtttcgtattgcgagggaggtggggctagactttatccagctccatggactggaagataagctagagtttttgggtacagaatttgggttaattcccaggtatgttgttcctgacgagctagaccttttggaagagcagagcttgctgttaacgcaatgtgtgagtttgccgttgcttgattcggaagttgggggtgaagggaagttacttgattggacgtttattgagaagttacctacaaaagctatacttgctggtgggctaacccctgagaatttgcctacatttgacaacattttgggctacgatgttagtggcggtgttgaaaccaatggggtaaaagattcattgaaaattataaagtttatacaaaagggacacgctcagtcgtcttga

SEQ ID NO: 89988 - protein, 226 aa, Candida albicans SC5314
MKVVKICGIKTVEAASVAIDNGANLLGCILVPNRARTIDLEVAKQIARMVKRDRNPPPKFAGGTSTQHFEQVAQWIIENGPFLVGVFRNQPKEEVFRIAREVGLDFIQLHGSEDKLEFLGTEFGLIPRYVVPDELDLLEEQSLSLTQCVSLPLLDSEVGGEGKLLDWTFIEKLPTKAILAGGLTPENLPTFDNILGYDVSGGVETNGVKDSLKIIKFIQKGHAQSS

SEQ ID NO: 89989 - DNA, 2487 bp, Ustilago maydis 521; identical to SEQ ID NO: 76175
  CDS (1)..(2487)

SEQ ID NO: 89990 - protein, 828 aa, Ustilago maydis 521; identical to SEQ ID NO: 76176

SEQ ID NO: 89991 - DNA, 1368 bp, Erwinia carotovora subsp. atroseptica SCRI1043; identical to SEQ ID NO: 76179
  CDS (1)..(1368): transl_table=11

SEQ ID NO: 89992 - protein, 455 aa, Erwinia carotovora subsp. atroseptica SCRI1043; identical to SEQ ID NO: 76180

SEQ ID NO: 89993 - DNA, 669 bp, Symbiobacterium thermophilum IAM 14863
  CDS (1)..(669): transl_table=11
atgtgggtgaagatctgcggcttgcagtttatgaaggacgcggtggccgccgtcgaggccggggccgatgccctgggcttcgtcttcgcccccagtcggcggcaggtgacccccgagcgggtcgaggccctgatcagcgggctgccgccggaaaccgtgacggtgggcgtcttcgtggacgccccgatggaggagatccgccgggccgtaacgctgtccgggctgaaggccgtgcagctgcacggctccgagccgccggaggcgatcgatcagatcggactgccggtgatcaaggcgatccgcatccgggggcccgaggacctggcccggctgccggactaccgcaacgcggcgggcctgctgctggagccctacgtggaggggcaggccggcggcaccggccagacgctggacccgactctggtccgctgggcggcccagaccctggagcgggccggcgtgccgctcgccggccccgacgagccgctgacccccggccggcccaagctgatcctggccggcgggctgaccccggacaacgtggccgacgccatcgccagggcccagccgggcggggtcgacgtctccagcggcgtcgagaacgggggcgtcaaggatatcaacaagatctacgccttcgtcgccgccgccaagggggtggcgcgatga

SEQ ID NO: 89994 - protein, 222 aa, Symbiobacterium thermophilum IAM 14863
MWVKICGLQFMKDAVAAVEAGADALGFVFAPSRRQVTPERVEALISGLPPETVTVGVFVDAPMEEIRRAVTLSGLKAVQLHGSEPPEAIDQIGLPVIKAIRIRGPEDLARLPDYRNAAGLLLEPYVEGQAGGTGQTLDPTLVRWAAQTLERAGVPLAGPDEPLTPGRPKLILAGGLTPDNVADAIARAQPGGVDVSSGVENGGVKDINKIYAFVAAAKGVAR

SEQ ID NO: 89995 - DNA, 669 bp, Methylococcus capsulatus str. Bath
  CDS (1)..(669): transl_table=11
atgatgccggcatacccctccgggcgaactcgggttaaaatttgcggtttcacgcaggccgaggacgcggcctgcgcggtggctctgggcgtcgatgcgttgggtctggtgttctacggtcccagcccgcgcaacgtgggccttggtcaggcgcaggccatcgccgcggccgtcccggcgctggtcacggtggtgggactgttcgtggatgccgagccggaacgagtgcgggaggtctgcagtgccgtgcggatcgatctgctgcagtttcatggcgatgaatcccccgaatattgtgctggcttcgggcggccctacatcaaggccttgcggatgatgcccggtgtcgacgtcggggccgaggctcgccggtacgctggcgccgccggtttgctgctcgacgcctaccagccgggcgagcagggcgggaccggcatgacgttcgactggcgcagggccgaagccggatgctgcctgccgttgatcctggcgggcgggctcgcgccgaccaatgtgagagaggcactggaaacggcaaagccttacgcggtggatgtatcgagcggcgtggagggggcgcggaagggaatcaaggaccacgacaaaatggcggcgtttttacgcgaggtatacgattttgatcatgcaagacgagattcagccctatga

SEQ ID NO: 89996 - protein, 222 aa, Methylococcus capsulatus str. Bath
MMPAYPSGRTRVKICGFTQAEDAACAVALGVDALGLVFYGPSPRNVGLGQAQAIAAAVPALVTVVGLFVDAEPERVREVCSAVRIDLLQFHGDESPEYCAGFGRPYIKALRMMPGVDVGAEARRYAGAAGLLLDAYQPGEQGGTGMTFDWRRAEAGCCLPLILAGGLAPTNVREALETAKPYAVDVSSGVEGARKGIKDHDKMAAFLREVYDFDHARRDSAL

SEQ ID NO: 89997 - DNA, 651 bp, Silicibacter pomeroyi DSS-3
  CDS (1)..(651): transl_table=11
atggctgacgacattcgcgtcaagatctgcgggctgagcgatcccgaacacctgcgcgtggccgccgaggcgggcgcccgttatatgggtttcgtgttctttgccaaatcgcccaggcatctgacggtcgagcgtgctgctgaactggcggtctcggtcccggtcggtgtggccaaggtggcgctggtggtgaacgcaaatgatgcggagctggaggcgatcaccaccgccgtgccgctcgacatgctgcagcttcacggcaaggaaagccctgagcgggtggccgagatcaaggcgcgctttggtctgccggtgatgaaggcggttggtgtggccgaagcggcggatctggcacagatcgatctctattccgaggtggccgaccagttgctgatcgacgccaagccaccgcagggggcagagctgcccgggggcaacgggctggcttttgactggcggctgctggcgggccggaaatactggcgcaaaccctggatgctggcgggcgggctgacgccggaaaatgtgggcgaggcgatccgcctgaccggagcgcggcaggtcgatgtctcctcgggcgtcgaaacgacgccgggggtgaaggatgccgggctgatccgcgagtttctggctgctgcacgggcggattaa

SEQ ID NO: 89998 - protein, 216 aa, Silicibacter pomeroyi DSS-3
MADDIRVKICGLSDPEHLRVAAEAGARYMGFVFFAKSPRHLTVERAAELAVSVPVGVAKVALVVNANDAELEAITTAVPLDMLQLHGKESPERVAEIKARFGLPVMKAVGVAEAADLAQIDLYSEVADQLLIDAKPPQGAELPGGNGLAFDWRLLAGRKYWRKPWMLAGGLTPENVGEAIRLTGARQVDVSSGVETTPGVKDAGLIREFLAAARAD

SEQ ID NO: 89999 - DNA, 627 bp, Neisseria gonorrhoeae FA 1090
  CDS (1)..(627): transl_table=11
atgaggaaaatccgcaccaaaatctgcggcatcaccacaccggaagacgcactgtatgccgcccacgccggcgcagacgcattgggactggttttttacccccaaagcccccgcgctatcgacatcattaaagcacaaaaaatcgccgccgcactgccgccgtttgtcagcgttgtcgcccttttcgtcaacgaaagcgcgcaaaacatccgccgcatccttgccgaagtgccgatacacatcatccaattccacggcgacgaagacgatgcattctgccggcagttcgaccgcccctatattaaagccattcgtgttcagacggcatcagacatccgaaacgccgccacgcgcttccccaacgctcaggcactgctgttcgatgcctatcacccttcggaatacggcggcaccggacaccgcttcgactggacgctgttggcggaatattcgggcaagccgtgggtgcttgccggcgggctgacccctgaaaacgtcggcgaagccgtccgcatcaccggagcggaagcggtcgacgtatccggcggcgtggaagcgtctaaaggcaaaaaagaccccgccaaagtcgccgcctttatcgcaaccgccaaccgcctatcccgttaa

SEQ ID NO: 90000 - protein, 208 aa, Neisseria gonorrhoeae FA 1090
MRKIRTKICGITTPEDALYAAHAGADALGLVFYPQSPRAIDIIKAQKIAAALPPFVSVVALFVNESAQNIRRILAEVPIHIIQFHGDEDDAFCRQFDRPYIKAIRVQTASDIRNAATRFPNAQALLFDAYHPSEYGGTGHRFDWTLLAEYSGKPWVLAGGLTPENVGEAVRITGAEAVDVSGGVEASKGKKDPAKVAAFIATANRLSR

SEQ ID NO: 90001 - DNA, 627 bp, Dechloromonas aromatica RCB
  CDS (1)..(627): transl_table=11
atgaagacccgaatcaagatttgcggcctgactcgcgaagaagatgtcgacgcggctgtcgcggccggtgccgatgcgatcggcttcgtcttctacccgcccagcccgcgttacgtttcgccgcagcgcgcggccgaactggtcaagcggattccacctttcgtcgacgtcgtcggtctcttcgtgaacgaggcgccagaagttgtccgcatcgcctgcgaagccctgcccattaacgtcctgcagtttcacggcgacgaggatgcagcgtattgcagccagtttgcccggccctatctgcgggcggcaagggtgaggccggggcttgatctggtagaattcgccggctcgtttcccgatgcccggggtctgttgctggatgcctttgtcgagggctacggtggtggcggccatgtctttgactggacgctgatcccgccgaatctcccctcgtatctggtgctatccggtggcctgaccgcagacaatgtcggcgatgccgtgcggcgcgtgcgcccggtggccgttgacatctcatcaggtgtcgaagcgagcaagggaatcaaggatcactcgaaaatcgctgccttcgtggcggctgtacggaaagccgatgagtcaatataa

SEQ ID NO: 90002 - protein, 208 aa, Dechloromonas aromatica RCB
MKTRIKICGLTREEDVDAAVAAGADAIGFVFYPPSPRYVSPQRAAELVKRIPPFVDVVGLFVNEAPEVVRIACEALPINVLQFHGDEDAAYCSQFARPYLRAARVRPGLDLVEFAGSFPDARGLLLDAFVEGYGGGGHVFDWTLIPPNLPSYLVLSGGLTADNVGDAVRRVRPVAVDISSGVEASKGIKDHSKIAAFVAAVRKADESI

SEQ ID NO: 90003 - DNA, 717 bp, Methanosarcina barkeri str. Fusaro
  CDS (1)..(717): transl_table=11
atgacagcgaaagtgaaaacgagaataaagatctgtggaatccgcagccctgaagaaatcgaaattgcagccctttacggagccgatgcagttgggtttattacagaagttcctgtcgagagcccaagaaagcttgattccgatactgccgcttacctcgtgtccagagtccctgaaaccctgagttccgtactggttatcatgcctgaaaacgcggatactgccgtaggtctgattaataaaataaaacccgatatcgtgcagatccactccagactgccccatctcgaacttgaaataataaaagaaaaaacgggcatccctatcataaaaactctgtccgtacctgcacagggagaggcttcaaacgcaggttccggaaatcctgcttctgtctcaagcctacttgaagaggtcagtctactggaagaagccgacattgtagattccattctgcttgatacggcaaggtccgaaaagcccggaggcacaggctgtgtgcacgactgggctctgagccggcgaatctcagaagaaacgcgacttccccttatccttgcaggcgggctcaagcctgaaaacgtgcggggagcaatcagggctgtttcgccttatgctgtggacacagcatccggggttgagacctgcgggaaaaaagatgccgtaaaaatcaaaagttttattgaagaagtgaggtgtgccaatgctttcctttga

SEQ ID NO: 90004 - protein, 238 aa, Methanosarcina barkeri str. Fusaro
MTAKVKTRIKICGIRSPEEIEIAALYGADAVGFITEVPVESPRKLDSDTAAYLVSRVPETLSSVLVIMPENADTAVGLINKIKPDIVQIHSRLPHLELEIIKEKTGIPIIKTLSVPAQGEASNAGSGNPASVSSLLEEVSLLEEADIVDSILLDTARSEKPGGTGCVHDWALSRRISEETRLPLILAGGLKPENVRGAIRAVSPYAVDTASGVETCGKKDAVKIKSFIEEVRCANAFL

SEQ ID NO: 90005 - DNA, 618 bp, Thiobacillus denitrificans ATCC 25259
  CDS (1)..(618): transl_table=11
atggccgttcgcgtaaaaatctgcggaattacccgcgtcgacgacctgcacgctgcgtgcgacgccggcgcagatgcgcttggcttcgttttctacgagaagagcccgcgtcatctgacgctcgacgccgccgccgcgctgctgcgggaagtcccgccattcgttcagactgtgggccttttcgtcgacgccaacccggcctttgtcgactcggtgttgcgcgctgtgccgctcgatctgctgcagtttcatggcgacgagaagcccgccgactgcgcgcgccacggccggccctggatcaaggccatacgcgtcagagcggacacggatttgctaaaatgcgcggctgacttcgcggccgcgagcgggcttctgctcgacgcctacgtgcccggcgtgcccggtggcaccggggcgcgcttcgactggcggctgattccgccgcgtctgccccagcgggttattttgtccggagggctcacgccggataacgttgccgacgcggtccggcgcgtccgtccctgggcggtcgacgtgtcctcgggcgtcgaggcggcgaaaggcatcaaggacgcgcagaagatcgcgcgattcatctcacaggcgaaagcatcatga

SEQ ID NO: 90006 - protein, 205 aa, Thiobacillus denitrificans ATCC 25259
MAVRVKICGITRVDDLHAACDAGADALGFVFYEKSPRHLTLDAAAALLREVPPFVQTVGLFVDANPAFVDSVLRAVPLDLLQFHGDEKPADCARHGRPWIKAIRVRADTDLLKCAADFAAASGLLLDAYVPGVPGGTGARFDWRLIPPRLPQRVILSGGLTPDNVADAVRRVRPWAVDVSSGVEAAKGIKDAQKIARFISQAKAS

SEQ ID NO: 90007 - DNA, 609 bp, Geobacter metallireducens GS-15
  CDS (1)..(609): transl_table=11
atggttcgcgtcaagatctgcggcataacctccctggaggacgccctcatggcggtggaggccggagccgatgccctcggcttcgtcttccatgaagactctccccgtcacgtgccccccgagcaggccaccggcatcatcgccgggcttccccccttcgtgcagaccgtgggcctcttcgtaaaccgccccatcgcatacgtcaacgaaacagcggcccggtgccgcatcgacctggtccagctccacggcgacgagcctcccgagttctgcgcagccgtggagcgccgggtgatcaaggccttccgggtacaggacatcacgagtctcgacccgatcaagcactaccgcgtcgcggcccatctcctcgatgcctattcccccaaggcctacggcggcaccggcctcaccttcaactgggacatcgcagcggcggccaaggagttcggcccggtcatccttgccggcgggctcacccccgacaacattcgcgaggcggtggaggcagtgaacccttacgccgtggacgtttcgggcggtgtggagagcgccccgggccgaaaggatgcggccaaggtgcgggagtttattcgacgggcgaaagcatag

SEQ ID NO: 90008 - protein, 202 aa, Geobacter metallireducens GS-15
MVRVKICGITSLEDALMAVEAGADALGFVFHEDSPRHVPPEQATGIIAGLPPFVQTVGLFVNRPIAYVNETAARCRIDLVQLHGDEPPEFCAAVERRVIKAFRVQDITSLDPIKHYRVAAHLLDAYSPKAYGGTGLTFNWDIAAAAKEFGPVILAGGLTPDNIREAVEAVNPYAVDVSGGVESAPGRKDAAKVREFIRRAKA

SEQ ID NO: 90009 - DNA, 654 bp, Synechococcus elongatus PCC 7942
  CDS (1)..(654): transl_table=11
atgggcctacgcattaaaatctgcggactgcgcgatcctcaacaagcgatcgcgatcgccgatctgggcgcaacggcgatcggcttcattgcggtacggcagtcaccccgctatgtttcccctgcccaagtcgctgagattgctcaggctttgcagaagacccatccgaccgtcaatcgtgtcggtgtgtttgccaatgccacggctgaagaactagaagcctacgtggctgcgggaatcaccagccttcaactccatggcgatgaaaccctagcagactgtcagcgttggcgcgatcgcttccctgcattggaattgatcaaagccctacgaattcgctcaaccgctgacttggcgctggcagagtcctttacagactgcgtagacacgctgctgctcgatgcctaccaccctcagatgctgggagggactggtgcaaccttggattggcaggcattgcaagcctttcaaccctctcgcccttggctgcttgcaggtggtctaacacctgagaacatcacgaccgcgctatcccagcttcaccccgctggtattgatctctccagtggtgttgagcgatcgcccggtgataaggatctggagaaagttacggctttattctcttctctagccagaaatagtctcttgaaatga

SEQ ID NO: 90010 - protein, 217 aa, Synechococcus elongatus PCC 7942
MGLRIKICGLRDPQQAIAIADLGATAIGFIAVRQSPRYVSPAQVAEIAQALQKTHPTVNRVGVFANATAEELEAYVAAGITSLQLHGDETLADCQRWRDRFPALELIKALRIRSTADLALAESFTDCVDTLLLDAYHPQMLGGTGATLDWQALQAFQPSRPWLLAGGLTPENITTALSQLHPAGIDLSSGVERSPGDKDLEKVTALFSSLARNSLLK

SEQ ID NO: 90011 - DNA, 690 bp, Novosphingobium aromaticivorans DSM 12444
  CDS (1)..(690): transl_table=11
atgagcggcgcgttgcctctaacgcgccgctccatgaacgacacgcgccccgcatcggccatcaagatctgcggcgtcaccacgcgtgatgcgctggacgcggcgatccacgcgcgcgccacccacgtcgggttcaacttcttccccccctccccgcgcttcctgcacctcgggcaggcgccggcgcttgccgcgcaggccgaaggacacctcgttcgcgtcggggttttcgtcgatgccgccgacgatgccattgccgatgccgtcgccgccgcccggctcgacgcgatccagcttcacggcaaggaagacccggcccgcgccgcccagcttcgcgcccgcttcggcaagccggtgtggaaggtcatgtccgtcgccggccccgacgacatcgccagggcggacctgtacgccggcacggccgatttcatcctgttcgatgccaagacgcccaagggcgcggcgcttccgggcgggctcggcctcgccttcgactggaacctgctgcgcgcctatcgcggcccgctgccgtggggtcttgccgggggcctctcgcccgccaacgtggccgaggccgtgcgcggcaccggggcatcgctggtcgacgtctcgtccggcgtcgaaagtgcgcccggagtgaaggacgccgaactcatccgcgccttctgcctgaacgcccgcggcgcctga

SEQ ID NO: 90012 - protein, 229 aa, Novosphingobium aromaticivorans DSM 12444
MSGALPLTRRSMNDTRPASAIKICGVTTRDALDAAIHARATHVGFNFFPPSPRFLHLGQAPALAAQAEGHLVRVGVFVDAADDAIADAVAAARLDAIQLHGKEDPARAAQLRARFGKPVWKVMSVAGPDDIARADLYAGTADFILFDAKTPKGAALPGGLGLAFDWNLLRAYRGPLPWGLAGGLSPANVAEAVRGTGASLVDVSSGVESAPGVKDAELIRAFCLNARGA

SEQ ID NO: 90013 - DNA, 714 bp, Desulfitobacterium hafniense Y51
  CDS (1)..(714): transl_table=11
atgccccggataaaaatctgcggcatccgcactggcgaagaagcccgttgggccgttgaagccggtgccgatgctctgggattcatctttgtcccccacagcaaacgctatatccaaccggaaactgcccgggagattatcctgaacttacctcccctgatcagcaaagtcggggtgtttgctcaggcatcccctgagcatgtgggccggattgtccatgagtgttctttggatacgattcagctgcatgggaatgaagatccccggctctaccgccatctctccgtgacaaagattaaagcattctccttcccctctgcaccggcccctggcaattcctccgaagccgcacctgatttctccctggttgaaacctctccttcttcgtctcttcccacttccttcagggaacttcccccggcctcccttcacgggatccttttggactcgtccgctgggggaaggacagggggaaccggaatccccctcccctggcacaccccagtgtttcaggattttctgcatcaggtcggagaccttggttatcctctgattttagccgggggacttaatcccgacaatatcctggaagccatccgtttaacccggccctacggagtggatgtcagctccggagtggaacggaacggccgcaaggatcgtgaaaaaatccaacacttcatctcacaggcaagaaaggagtcacccctatga

SEQ ID NO: 90014 - protein, 237 aa, Desulfitobacterium hafniense Y51
MPRIKICGIRTGEEARWAVEAGADALGFIFVPHSKRYIQPETAREIILNLPPLISKVGVFAQASPEHVGRIVHECSLDTIQLHGNEDPRLYRHLSVTKIKAFSFPSAPAPGNSSEAAPDFSLVETSPSSSLPTSFRELPPASLHGILLDSSAGGRTGGTGIPLPWHTPVFQDFLHQVGDLGYPLILAGGLNPDNILEAIRLTRPYGVDVSSGVERNGRKDREKIQHFISQARKESPL

SEQ ID NO: 90015 - DNA, 627 bp, Neisseria meningitidis FAM18
  CDS (1)..(627): transl_table=11
atgaggaaaatccgcaccaaaatctgcggcatcaccacaccggaagacgcatcggccgccgtagcggcaggtgcagatgccgtcgggctggtctttttccaaggcagcagccgggccgtcgatattgcccgcgccaaaaaaatcaccgccgcactgccgccgtttgtcagcgttgtcgcccttttcgtcaacgaaagcgcgcaaaacatccgccgcatccttgccgaagtgccgatacacatcatccaattccacggcgacgaagacgacacattctgccgccagttcgaccgcccctatatcaaggccattcgtgttcagacggcatcagacatccgaaacgccgccgaccgcttccccgacgctcaggcactgctgttcgatgcctaccacccttcggaatacggcggcaccggacaccgcttcgactggacgctgctggcggaatattcgggcaaaccgtgggtgcttgccggcgggctgacccctgaaaacgtcggcgaagccgtccgcatcaccggagcggaagcggtcgatgtatccggcggcgtggaagcgtctaaaggcaaaaaagacccagccaaagtcgccgcctttatcgcaaccgccaaccgcctatcccgttaa

SEQ ID NO: 90016 - protein, 208 aa, Neisseria meningitidis FAM18
MRKIRTKICGITTPEDASAAVAAGADAVGLVFFQGSSRAVDIARAKKITAALPPFVSVVALFVNESAQNIRRILAEVPIHIIQFHGDEDDTFCRQFDRPYIKAIRVQTASDIRNAADRFPDAQALLFDAYHPSEYGGTGHRFDWTLLAEYSGKPWVLAGGLTPENVGEAVRITGAEAVDVSGGVEASKGKKDPAKVAAFIATANRLSR

SEQ ID NO: 90017 - DNA, 648 bp, Magnetospirillum magnetotacticum MS-1
  CDS (1)..(648): transl_table=11
atgccggtcgaggtcaagatctgcggcatcaccgacgaagaggccatggacgcggccatcgaggccgaggccgattacgtcggtctggtgttctttgccaagagcccccgcaatgtcacccctgaccgcgccgccgaattggtggaattcgcgcccggcgacgtgaccaaggtcggcctgttcgtcgatcccgacgatgccacccttgatgccgtgctgacccgggtgcggctcgacctgctgcaactgcacggcaacgaatcgcccgagcgggttgaagccatccgcctggaatatggcctgccggtgatgaaagtgctgtcggtggcggagcccgccgatctggacggggccgagccctatctggcggtggccgaccgcctgctcttcgacgccaagccgcccaagggcgccttgctgcccggcggcaacgcggtcagcttcgactggtccatcctcacggggcgcaaatggggactgccctggatgctggccggggggctgacgcccgccaatgtggccgaggcggtgcgcatcagcggagcattggccgtcgacgtctcctcgggcgtggaaagtgcgccgggcgtcaaggatcccgacaagatccgcgctttcatccaggccgctcgaggcggcttggtgtaa

SEQ ID NO: 90018 - protein, 215 aa, Magnetospirillum magnetotacticum MS-1
MPVEVKICGITDEEAMDAAIEAEADYVGLVFFAKSPRNVTPDRAAELVEFAPGDVTKVGLFVDPDDATLDAVLTRVRLDLLQLHGNESPERVEAIRLEYGLPVMKVLSVAEPADLDGAEPYLAVADRLLFDAKPPKGALLPGGNAVSFDWSILTGRKWGLPWMLAGGLTPANVAEAVRISGALAVDVSSGVESAPGVKDPDKIRAFIQAARGGLV

SEQ ID NO: 90019 - DNA, 1419 bp, Haemophilus somnus 2336; identical to SEQ ID NO: 76191
  CDS (1)..(1419): transl_table=11

SEQ ID NO: 90020 - protein, 472 aa, Haemophilus somnus 2336; identical to SEQ ID NO: 76192

SEQ ID NO: 90021 - DNA, 645 bp, Sulfitobacter sp. EE-36
  CDS (1)..(645): transl_table=11
atgacccaaaatttgcacgtgaaattctgcggcttgcgcagcacgcaggatattgcggcggccgctgcggccggtgcgcgctatgtcggctttgttttctttgaaaaatccccccggcacgtcacgattgatcaagccgctgaactggccatagaggtgccaatggggctgtgtaaggtcgcgctgacggtcaacgcggatgacgcctttctggatgcgctgacggccgctgtgcctattgatatgctgcagctacacggcaaggaaacgcccaagcgtgtcgccgaggtcaaggcgcgctatgggctgccggtgatgaaggcggtcggtgtggccgatgcagatgacctgccacagattgatgcctatatggccgtggcagaccagatcctgatcgacgcgaaaccgccccaaggggcagcgctgcccggtggcaatggattgtcctttgactggcgtctgatcgcagatcgcacatgggacaagccgtggatgctggcaggggggctgacccccgacaatgtggctcaggccgcccgtatgaccggcgcacggcaggtagatgtctcttccggtgtggaaagcgcgccgggtgtaaaggacgcggggctgatcgcggcattcggaaacgccgcgaaggtctag

SEQ ID NO: 90022 - protein, 214 aa, Sulfitobacter sp. EE-36
MTQNLHVKFCGLRSTQDIAAAAAAGARYVGFVFFEKSPRHVTIDQAAELAIEVPMGLCKVALTVNADDAFLDALTAAVPIDMLQLHGKETPKRVAEVKARYGLPVMKAVGVADADDLPQIDAYMAVADQILIDAKPPQGAALPGGNGLSFDWRLIADRTWDKPWMLAGGLTPDNVAQAARMTGARQVDVSSGVESAPGVKDAGLIAAFGNAAKV

SEQ ID NO: 90023 - DNA, 642 bp, Erythrobacter sp. NAP1
  CDS (1)..(642): transl_table=11
atgaccatccaaatcaagatttgcgggctctcgacgcctgagacgattgccgcttccgcagatgcgggggcgagccatatcggtttcaatttctacccgccctcaccgcgttctgtcgcgcctgagcttgcgagcgaactggctgcgataacgccaaggtcgctcctgaaggttggcgtgtttgtgaacccggacgataccctgctcaacgaggcagtccggcacggcgcgctagatgcgatccagcttcatggaaaggaaactccagcccgcgtccaagaggtcaaggccagcttcggcctgccggtctggaaagtcctgagcgtcgaaacggacgaggatatcgccgctgccgacgcctactcgagcgttgccgacctgatcctgtttgacaccaagacgcccaagggtgcgctgccgggcggcatgggaatgggctttgactggtcgctgctcgatgcgttcgacaagtccatcccttggggccttgcgggcggcctcaattccgagaatgttgccgacgccatccgcgcaaccggcgccccattggtcgacacttcgtcaggtgtggaaagcgcgccgggcgtcaaggacgtggacagaatcgccgccttctgcaaagccgcgctcgaccatgactga

SEQ ID NO: 90024 - protein, 213 aa, Erythrobacter sp. NAP1
MTIQIKICGLSTPETIAASADAGASHIGFNFYPPSPRSVAPELASELAAITPRSLLKVGVFVNPDDTLLNEAVRHGALDAIQLHGKETPARVQEVKASFGLPVWKVLSVETDEDIAAADAYSSVADLILFDTKTPKGALPGGMGMGFDWSLLDAFDKSIPWGLAGGLNSENVADAIRATGAPLVDTSSGVESAPGVKDVDRIAAFCKAALDHD

SEQ ID NO: 90025 - DNA, 660 bp, Dehalococcoides sp. BAV1
  CDS (1)..(660): transl_table=11
gtgattaagactaagatttgcggcttgacagaggttggacaagccttggccacagcccggacaggggctgactttgccggagtggtatttgccgaaagcaaacggcgcatcaccacggagaaagcacttgagatagccgaagccctgaaaccactaaacccaagaccgatgctggtaggcgtctttgccaaccagacggcagaagaagtaaaccggattgcctccgtctgccgtctggacagggtacagctaagcggtaacgaaagctgggaatactgcaatcaggtaaacctgccggttatcaaggttattcacgttgccgaaggcactaccgccgaactggttattcaggaaatacaggccgggcttaaagccctgaaaaaaacacccgtattcctgctggatacccataccaaggccttattcggaggcagcggtcaaagttttgactggcagattgtaaaacaggtctctctgaaataccccgtcatggtggccggcggacttaatccggaaaacatacagggatttataaaaatagccaaaccatggggagtagacgttgccagcggagtggaaacagacgggataaaagatacagccaaaatacaccttttcattgaacgggtgaaagatgcggatggtaaccggatatgttag

SEQ ID NO: 90026 - protein, 219 aa, Dehalococcoides sp. BAV1
MIKTKICGLTEVGQALATARTGADFAGVVFAESKRRITTEKALEIAEALKPLNPRPMLVGVFANQTAEEVNRIASVCRLDRVQLSGNESWEYCNQVNLPVIKVIHVAEGTTAELVIQEIQAGLKALKKTPVFLLDTHTKALFGGSGQSFDWQIVKQVSLKYPVMVAGGLNPENIQGFIKIAKPWGVDVASGVETDGIKDTAKIHLFIERVKDADGNRIC

SEQ ID NO: 90027 - DNA, 621 bp, marine gamma proteobacterium HTCC2207
  CDS (1)..(621): transl_table=11
atgtcggtccaggtaaagatttgtggtatcacaacacccgagcaagcgcttatggtgcagcaggctggtgccgatgccctgggtttggtgatctaccgcaagagttcgcgctacgtagacttacgtcaggccatcgccattcgagcggcgattgcctcggatgttctctgtgttgtgctgttggttaacgccgacaaagagtttgttaaacaggtaatcgccgaggtaaaaccggatctgctgcagtttcacggtgacgagagcgctgacttttgccagcaatttgatttcccctatatccgcgcgctgcgtatgcgcgatgatctaaatattgctgcagaagcaaaggctcacaagccggctcatagtctgctatttgatgcttggcacccaggtcaatacggtggcacaggtgaaagctttgtctgggctcggctgcctcgtgagcgcagctttaatctgattctcgcaggtggtttaaccccagataatgtcgccgagtcagtggcagttgtggcgccagatatggttgatgtcagcggtggggttgagtcagcgccagggataaaagatccgcagaaggtgcgggactttattcagcgagcaaaagctgccggttaa

SEQ ID NO: 90028 - protein, 206 aa, marine gamma proteobacterium HTCC2207
MSVQVKICGITTPEQALMVQQAGADALGLVIYRKSSRYVDLRQAIAIRAAIASDVLCVVLLVNADKEFVKQVIAEVKPDLLQFHGDESADFCQQFDFPYIRALRMRDDLNIAAEAKAHKPAHSLLFDAWHPGQYGGTGESFVWARLPRERSFNLILAGGLTPDNVAESVAVVAPDMVDVSGGVESAPGIKDPQKVRDFIQRAKAAG

SEQ ID NO: 90029 - DNA, 714 bp, Desulfitobacterium hafniense DCB-2
  CDS (1)..(714): transl_table=11
atgccccggataaaaatctgcggcatccgcactcgcgaagaagcccgttgggctgctgaagccggtgccgatgctctgggatttatctttgccccccacagcaaacgctatatccagccggaaactgcccgggagattatcctgagcttacctcccctgatcagcaaagtcggggtgtttgctcaggcatcccctgagcatgtgggccggattgtccatgagtgttctttggatacgattcagctgcatgggaatgaagatccccggctctaccgccatctctccgtgacaaagattaaagcattctccttcccctctgcaccggcccctggcaattcctccgcagccgcacctgatttctccctggttgaaacctctccttcttcgtctcttcccacttccttcagggaacttcccccagcctcccttcacgggatccttttggactcgtccgctggaggaaggacagggggaaccggaatccccctcccctggcacaccccggagtttcaggattttctgcatcaggtcggagaccttggttatcctctgattttagccggaggacttaaccccgacaatattctggaagccatccgtttaacccggccctacggagtggatgtcagctccggagtggaacggaacggccgcaaggatcgtgaaaaaatccaacacttcatctcacaggcaagaaaggagtcacccctatga

SEQ ID NO: 90030 - protein, 237 aa, Desulfitobacterium hafniense DCB-2
MPRIKICGIRTREEARWAAEAGADALGFIFAPHSKRYIQPETAREIILSLPPLISKVGVFAQASPEHVGRIVHECSLDTIQLHGNEDPRLYRHLSVTKIKAFSFPSAPAPGNSSAAAPDFSLVETSPSSSLPTSFRELPPASLHGILLDSSAGGRTGGTGIPLPWHTPEFQDFLHQVGDLGYPLILAGGLNPDNILEAIRLTRPYGVDVSSGVERNGRKDREKIQHFISQARKESPL

SEQ ID NO: 90031 - DNA, 2313 bp, Aspergillus niger
  CDS (1)..(2313)
atggcggactccggactcgtcgatcattccccccaccatcccaccaaggccgcccagttgaacacggcatcgaatgttatcttgattgataactacgactcgtttacctggaacgtttaccagtacttagtccttgagggtgctactgtcaatgtatttcgtaatgaccagatcactttggaggaactgatcgccaaaaaacccacccagctggttatcagtccgggccccggtcaccccgagactgacgctggtatcagcagtgcggccatccaatacttcagtggcaagattcccatcttcggtgtgtgcatgggccagcaatgtattattacttgctttggtggaaaggttgatgtcaccggcgaaattcttcacggcaagacgtccgcgcttaaacatgacggcaagggcgcctatgaaggactacctgactcgctcgccgtcactcgttaccactcgctagctggtacacatgcgacaattcccgactgtctggaggtgtcctcttccgtccagttaacggacgatagcaacaaggatgtcatcatgggtgtgaggcacaagaaattggctgtggagggagtccagttccaccccgagagtatcctcactgagtacggccgtaccatgttccgcaacttcctcaaacttactgcaggtacctgggaaggaaacgggaagcattttgatgaacagagcaacacgaccaaggccaccgtttcctcaaacactgccccgaaaactgacaagaagttgtccatcctcgaaaggatttacgaccatcggagagccgctgttgccgtgcaaaagaccattccctcccagcggccagcagacctccaggctgcctatgaccttaacctggcccctccccaggtcccatttccggctcgtcttagacaatcgccctatccactgtcccttatggcggaaatcaagcgtgcttctccctccaagggtatgatagccgaaaacgcgtgtgcgcccgctcaggccaggcaatacgcgaaggccggtgccagtgtcatctctgtgctcacagagcctgaatggttcaaaggcagcattgacgacttgcgtgccgttcgccaaagtctggagggcttgacgaacaggcccgccattctgcggaaggaattcgttttcgacgaatatcagatcctagaggcccgtttggccggtgctgacacggtcttgctcattgtgaagatgcttagtgttgaactcctcactcggttgtatcactactcccgtagccttggcatggagcctttggttgaagtgaacacacccgaagagatgaagattgcggtcgatcttggagctgaggttatcggtgtcaacaacagagacctcactagtttcgaggttgatctcggcactactagccggctcatggatcaggtgcccagcagcaccattgtgtgtgccctcagtggaatctccgggcctaaggatgtggaagcttacaagaaggagggtgtcaaagctatcctagtaggagaagcccttatgcgggcagcagacacggctgctttcattgctgagcttcttggaggcagctcacagaacgtttccaaagagtcccggagttcgccgttggtaaagatctgcggcactcgttctgaagaagcagcacgagcggcgatcgaggctggagcagacctaattggaattatcatggttcagggacgaacgcgatgcgtccctgatgacgtggccctccgtatatctcaagtggtcaagtccatcccgaagcctgctggtcaaactcctcccacatctcgaggaactcccgctgcagcatctgttgagtattttgaccactcagccagaatcctacgtcatcctagccgggcgcttctcgtgggcgtcttccagaaccaaccccttgattatattttgagccagcaacaaaagctgggactcgatgtcgtgcaacttcacggatctgagccgcttgaatgggccaaattgatcccagtgcctgtcatccgcaagtttgggcttgacgagcctgcgatcgcccgcagggcttatcactccctaccattactggattctggcgttgggggaactggtgagttgctggaccagtcccgcgttcagaacgtcctcgataaggatagcggtttgcgcgttattctggcaggtggcttagatcccaccaatgttgctggcattgtccagaagcttggcgaatccggtcgcaaggtcgttggcgtcgatgtcagttctggcgtagagtcagacggtgctcaggatcttggcaaaattcgcgcctttgtgcaggccgtgaggggactctag

SEQ ID NO: 90032 - protein, 770 aa, Aspergillus niger
MADSGLVDHSPHHPTKAAQLNTASNVILIDNYDSFTWNVYQYLVLEGATVNVFRNDQITLEELIAKKPTQLVISPGPGHPETDAGISSAAIQYFSGKIPIFGVCMGQQCIITCFGGKVDVTGEILHGKTSALKHDGKGAYEGLPDSLAVTRYHSLAGTHATIPDCLEVSSSVQLTDDSNKDVIMGVRHKKLAVEGVQFHPESILTEYGRTMFRNFLKLTAGTWEGNGKHFDEQSNTTKATVSSNTAPKTDKKLSILERIYDHRRAAVAVQKTIPSQRPADLQAAYDLNLAPPQVPFPARLRQSPYPLSLMAEIKRASPSKGMIAENACAPAQARQYAKAGASVISVLTEPEWFKGSIDDLRAVRQSLEGLTNRPAILRKEFVFDEYQILEARLAGADTVLLIVKMLSVELLTRLYHYSRSLGMEPLVEVNTPEEMKIAVDLGAEVIGVNNRDLTSFEVDLGTTSRLMDQVPSSTIVCALSGISGPKDVEAYKKEGVKAILVGEALMRAADTAAFIAELLGGSSQNVSKESRSSPLVKICGTRSEEAARAAIEAGADLIGIIMVQGRTRCVPDDVALRISQVVKSIPKPAGQTPPTSRGTPAAASVEYFDHSARILRHPSRALLVGVFQNQPLDYILSQQQKLGLDVVQLHGSEPLEWAKLIPVPVIRKFGLDEPAIARRAYHSLPLLDSGVGGTGELLDQSRVQNVLDKDSGLRVILAGGLDPTNVAGIVQKLGESGRKVVGVDVSSGVESDGAQDLGKIRAFVQAVRGL

SEQ ID NO: 90033 - DNA, 1132 bp, Arxula adeninivorans
  CDS (264)..(983)
ctcaaggataccgacactctagttgagaacattgaaaagtgccgaaacaatggactatctagtctgattgaagttcagggacatggcgatctagaggcgattaacagcttgagcgtaaagcctgatggaatagtaactttcaacgaggcccgactgtccgtctgagagtcgactcatctttagttcatgtacacctaagttcgtctgggatccccactccgtacaccgaggccgaggacattcctgtcaaacaagctgaagatatgacaacgtcgccaatcgtcaaggtgtgcggaatcaggaccgtggaggcggcccaggtcgctttggatgctggagccaacatgattggaatgattatggtccctaatagagcgcgcactgttgatatggagacagcaggcaagatatcacgactggtacgatcatatagacgtcaaggatcctttgagctggacactaatgagctgggcggatcgactcactctgcactcgcccacatcattgaagccaagacaaggacccggccagcaatcgtaggcgtgttccgcaaccagccgctgtcagaagtcctgcggttgcaacaggaattgtcgctggatttcgttcagcttcacggatcagagcccctagaatggtgtagactgattccatgtcctgtgatccgtcggttcacccccgatactccagatttctatgcctcgccggttactggataccacagcctatccctcatagacggtgaggttggcggagagggcaagatggtggactggagcggagtccagtctcgggcccgaatgggagcgaggttccttatggctggaggattgacagccgacaatgttgcccaagctctagcggtcgagggtgcctgtggtgttgatgtcagcggaggagtcgaatcaagcccgggggtcaaagatctcaacgagattgagcggtttgtcaaagctgccaagggggttactgtgaagtattaacactccagcagcagcatcaataggtgatactgacgacaggtaatgtgtactaataggtctgacagcagaatacagctatattacttctcatttgaaacttgaggtgattgacaatttactatttatacaagctaagcttcaatacagac

SEQ ID NO: 90034 - protein, 239 aa, Arxula adeninivorans
MTTSPIVKVCGIRTVEAAQVALDAGANMIGMIMVPNRARTVDMETAGKISRLVRSYRRQGSFELDTNELGGSTHSALAHIIEAKTRTRPAIVGVFRNQPLSEVLRLQQELSLDFVQLHGSEPLEWCRLIPCPVIRRFTPDTPDFYASPVTGYHSLSLIDGEVGGEGKMVDWSGVQSRARMGARFLMAGGLTADNVAQALAVEGACGVDVSGGVESSPGVKDLNEIERFVKAAKGVTVKY

SEQ ID NO: 90035 - DNA, 828 bp, Medicago truncatula
  CDS (1)..(828)
atgttttcaggttcaacaactgggagttacttggaacttagagccacaaacttccacaaaagaccgattccaggtttgagaggaaataagcttcaattttctagcataagattcggtccaaagtatgaagtttcctgcaaacttactgagttggcaaacgtttcatgttcatcaaaggaacctgaaaagattaagcctttggttaagatgtgtggcattacatcagctaaagatgctgctatggcggccgaagctggagcaaactttattggaatgatcgtgtggccaaactcaaaacgttctgtttcactttctgttgcaaaggagatatcaaaagttgcaagagattatggagcagagcctgttggagtatttgtggatgatgatgcagaaacaatattaagagcttctgatgcatcaaatcttgagtttgtgcagcttcatggatctggttcgcgggcagctttcccatctttgattcaggaaagtcgtgtaatatatgttctccatgcaaatgctgatgggagccttttaaacacaattcctgatgaagagtgtcctctagttgattgggttctggtagatagtgcaaagggtggcagtggggaagcatttgattgggcccagtttaaattaccaaaaattagaagcaaatatggctggctcttggcaggaggggtcaatcctgagaatgttggtgaggctttgtctagtctcaaacctggaggagtggatgtgagtagcggcatatgtgcatcagatggcattcagaaggatcaatcaagaatagcttccttcatggatgcagtacattctgttcagtactga

SEQ ID NO: 90036 - protein, 275 aa, Medicago truncatula
MFSGSTTGSYLELRATNFHKRPIPGLRGNKLQFSSIRFGPKYEVSCKLTELANVSCSSKEPEKIKPLVKMCGITSAKDAAMAAEAGANFIGMIVWPNSKRSVSLSVAKEISKVARDYGAEPVGVFVDDDAETILRASDASNLEFVQLHGSGSRAAFPSLIQESRVIYVLHANADGSLLNTIPDEECPLVDWVLVDSAKGGSGEAFDWAQFKLPKIRSKYGWLLAGGVNPENVGEALSSLKPGGVDVSSGICASDGIQKDQSRIASFMDAVHSVQY

SEQ ID NO: 90037 - DNA, 2325 bp, Aspergillus oryzae; identical to SEQ ID NO: 76203
  CDS (1)..(2325)

SEQ ID NO: 90038 - protein, 774 aa, Aspergillus oryzae; identical to SEQ ID NO: 76204

SEQ ID NO: 90039 - DNA, 1276 bp, Oryza sativa
  CDS (49)..(885)
gattgccccacacccacctcctcgcctgcttccccgtcttccccggcaatggcggccgcggctcaagcgacggtggcgccatcaatctcgtcagtagccaggcaacctcagcgattccctgcaccgagtactagtgggaattcgaaatttcctctatttaaaacatcatgcttggcaatgagccatggccttgtatccaatactgctgtgtcttcacaaccaaatgatggagctgctaaactcatccagcctgtagtcaaaatgtgtggcatcacatcagctaaagatgcagaaacggctttggaggccggagctaaacttattggcatgatactctggccaaactccaagcgttctgttgcgttagcagaagcaaaagaaatatcaagagtagcacagtcttatggggctgaatcagttggtgtctttgtggatgatgatgaagagaccatcttacgagtgtctgattcatgtgaccttaatctagtgcagcttcatggagatgaatctcgttcattacttcatgtgctatcgaagaacaatcgcatcatttatgttctaaatgccaatgacgacggaaagcttatcaacgctcttcctgatgaaaaatatgagcttgattggttcttggtggatagtgccaaaggtggaagtggcaagggattcaactggcagaagtttcagatgccgtctgttcgaagcaagaatgggtggcttttagctggaggccttcacgctgataatgtttgtgatgccttttatgccctgaaaccaaatggagtggatgttagcagtggaatatgtgctcctgatggtatcagaaaagatcccacgaggatttcttctttcatgagaaatgttaaatccttgggcagatcacaatgattattctggtgtttggaggttaacctcattttgtttgcttaatgtggagaatgaagcagagtctcttctgaagcaagctgttcatttattcagcatggtagtggtaaatgccattggggttaaagtcgaaatagtgaccaaatttctgaggattttgctagtgatgcagtaactaataagtgcactctctgtgtctcaagtcgaaggcaaaataaattgcagagttgccatagttagagtttgatgtactatcaattgtatgttttgatcaatgcaataaggctagagtaattttcaccttttccattgggcttttcgttagttgcctatgtagaatacaacgcgtatgtttcttaatatactctggccggcatccttttgccggcccggc

SEQ ID NO: 90040 - protein, 278 aa, Oryza sativa
MAAAAQATVAPSISSVARQPQRFPAPSTSGNSKFPLFKTSCLAMSHGLVSNTAVSSQPNDGAAKLIQPVVKMCGITSAKDAETALEAGAKLIGMILWPNSKRSVALAEAKEISRVAQSYGAESVGVFVDDDEETILRVSDSCDLNLVQLHGDESRSLLHVLSKNNRIIYVLNANDDGKLINALPDEKYELDWFLVDSAKGGSGKGFNWQKFQMPSVRSKNGWLLAGGLHADNVCDAFYALKPNGVDVSSGICAPDGIRKDPTRISSFMRNVKSLGRSQ

SEQ ID NO: 90041 - DNA, 2856 bp, Hebeloma cylindrosporum
  CDS (52)..(2598)
aaggtttccttcatcgcatcaactccagttaccatccaggggttgcgcaaaatgtctgcgaatactctgccccaacatctcactggtcaactcgatgtgttaatgatcgataatttcgattcatttacctggaatttataccagcagctcagcctccacggtgctgaggttaccgtcattcgaaacgatgccataccccccgaacttcttcctcagctccagatcaagtttttgattatctccccgggtccgggacatcctcagacggactccggcatttccaaagcagccatcgaatatttccaagggaaaattcctgtccttggtgtctgtatggggttggaatgtctcgtagatttgtacggcggagaaatagggtatgccggcgaaatcatgcatggaaaagtcagccggatacggcatgataatagaggttgcttcagcggggtaccccaaggcatcaaatcgattcgatatcattcgttaagtgcttcacacaccactctaccgcctgagttggctattacatcggctactgaggaatcaggtgtcatcatgggggttcgccacagaaaatataccattgaagctatccaataccacccagaaagtatcctcagcgagggagggaatgactttattcgcaatctcctctcccttcgcggagggctatgggaagataacccaaaagcaagagttctggataacactctccctcctttcccttatgaggctttacctaccgaagttacatccaaaccaggcgccactaccaaaataccttcgatcttggagagaatatacgcccaaagactccaggatgttgcagacgcggcaatagcaccagggaccacgttggttgacttacagactcttcttgcattgaacatcgccccaccattgattgactttgtttctcggatcaaggattcgcctccaggtcaaccgtcgctattcgcagaaattaagcgcgcatcaccgtcgaaaggcccgatttcgatttcgacatctcccgcaaagcaagcattaacctacgcgttatcaggcgcgcaagccatatctgttctaacggaaccgaaatggttcctcggctcattgcacgatatgctgcacgcgcgcctgagcgtcgcccacctccctaatcgacccgccatcctccgaaaggattttattttaagccgttatcaaatcctggaagcacgtttatggggggcagatacccttcttctgatcgtcagtatgctgccggaggcactgttgaaggacctgtacaaattcagtgttgaactcggaatggaacctctcgtcgaggtgaacaacgccaaggaaatggagatagctctttcattacctgcaaaggtgatcggcgtcaacaatcgaaaccttcatgacttccaggttgatatgaataccactagccggctgagtgacatggtcaccggaaaagatgtaatcctatgtgcgctcagtgggatatctagctcggaagatgttaaacgctatgcatcggagggcgtaggtgctgttctaataggagaaagcctgatgcgcgccaaagataccgctgctttcgttcgcgaacttttctctctctccccctctgacgccaacccgccggtgtggcgttcccgagcccctttggttaagatctgtgggatcagatccaaggacgaggctctagcggtcgctgctgcgggcgctgatttccttggtctgatgttcgtgggcacatcgaagcgcgccatcagcctaaattcagcaaaagaagtctcgcaggcaatccgaaatttacgatttgacgcaccaacgacctcggagccggtggaggccaccgttgatggtccttggttcacaacccaagccaaccgaatatcgctctccccatcaaatttgcgccccttgctcgtcggcgtattccaagatgcaccgctgtcgcatattcttcgcgtagttgcggaagtacaacttgacattgttcagctgcacggatctgaaccaactgattgggcgctccacatccccgttcctgttatccgcgttttccacgtgggtgagtcaggtgaaggagtgcaaaatatcagtcttgggggcgcccacgcgtttgtgttgctagacagcctcagaaatgacggaagcaaggtgagcggaggaacaggcaaagtctttgactgggatttggccaagaagatcgtacatgacggggaaatcgttgtcggcaattttcctacatccccacaatcccttcctttttcagcagtatcaaataccgccagcaacgaggcggaggtaaccgatccctctgatgccaaagctggcgaacagaagaaagacggagcatcaccttctgccttccctctcccaatcattcttgctggggggctcacaccggacaacattgcggcggccatcgagcaggtacaaccttgggcggtagacgttagcggtggggtggagctcgctgatggctctggtaaggacatcgaaaaggtcagggccctcattcaaaacgcaaaaggaccgtttgtccatgaagaaagcgaagacgagtcagaggatgaggatgaggaagaaactaacagcgaagaaaataaagattgaaggctcgagaaatgtacagtcctcttgtacatcggttgaaattgattgccattttttgaggacatggcgtcgattaaatctggcaaagcattttttttttcacatttacaaagggggtcgatacaactatcacacaagtctatataaagaacaaacagggacacgggagattctgtccgtacagcagtaggtattacgagataatgttctcacttcatcgaatgttagatcattgctttggtaagaaaaaaaaaaaaa

SEQ ID NO: 90042 - protein, 848 aa, Hebeloma cylindrosporum
MSANTLPQHLTGQLDVLMIDNFDSFTWNLYQQLSLHGAEVTVIRNDAIPPELLPQLQIKFLIISPGPGHPQTDSGISKAAIEYFQGKIPVLGVCMGLECLVDLYGGEIGYAGEIMHGKVSRIRHDNRGCFSGVPQGIKSIRYHSLSASHTTLPPELAITSATEESGVIMGVRHRKYTIEAIQYHPESILSEGGNDFIRNLLSLRGGLWEDNPKARVLDNTLPPFPYEALPTEVTSKPGATTKIPSILERIYAQRLQDVADAAIAPGTTLVDLQTLLALNIAPPLIDFVSRIKDSPPGQPSLFAEIKRASPSKGPISISTSPAKQALTYALSGAQAISVLTEPKWFLGSLHDMLHARLSVAHLPNRPAILRKDFILSRYQILEARLWGADTLLLIVSMLPEALLKDLYKFSVELGMEPLVEVNNAKEMEIALSLPAKVIGVNNRNLHDFQVDMNTTSRLSDMVTGKDVILCALSGISSSEDVKRYASEGVGAVLIGESLMRAKDTAAFVRELFSLSPSDANPPVWRSRAPLVKICGIRSKDEALAVAAAGADFLGLMFVGTSKRAISLNSAKEVSQAIRNLRFDAPTTSEPVEATVDGPWFTTQANRISLSPSNLRPLLVGVFQDAPLSHILRVVAEVQLDIVQLHGSEPTDWALHIPVPVIRVFHVGESGEGVQNISLGGAHAFVLLDSLRNDGSKVSGGTGKVFDWDLAKKIVHDGEIVVGNFPTSPQSLPFSAVSNTASNEAEVTDPSDAKAGEQKKDGASPSAFPLPIILAGGLTPDNIAAAIEQVQPWAVDVSGGVELADGSGKDIEKVRALIQNAKGPFVHEESEDESEDEDEEETNSEENKD

SEQ ID NO: 90043 - DNA, 2499 bp, Coprinopsis scobicola
  CDS (1)..(2499)
atggccaccaccagtcaaacttcgctgccccctcatctccaggggcagctcgatgtcctcatgatcgacaacttcgactcgttcacctggaatctctaccaacaaatctgtctccagggcgcaaaggtcactgtcatccgcaacgacgctatcgacccgtctctgtttcctcagctcaagatcagacatctcgtcatctcgccaggaccaggtcacccccagaccgactctggtatctccagggatgccatcaaatactttgcaggcaaagtccccatcctgggcgtttgcatgggcctcgagtgtgtcgtcgatgtctatggaggaacaatcgcttacgccggagaaattatgcacggcaaagtcagcaaagtcagacacgacaaccggggatgtttcaaggacattccccagggcatccagtccattcgctaccactccctgagtgccgctttgtccactctccctgctgaattggccatcacatccgtcaccgaggagtctggtgtcattatgggtgttcgccaccgcaagtacaccgtcgaggccgtccaataccaccccgaaagtatcttgagcgagggtggtgacgaactcgttcgaaacttcctctccttgaggggtggaacctgggaagtcaatccagaagtgcaggttcttgaccaatcgctccccccattcccagtcgagaaccttcccaaagaaatcacctccgatcccgccgcatccaataaagtcccctccatcctcgacaagatctacgcccagcgtctcaacgatgtcgctcaggctcagcggactcctggcaccacaccagccgatctcgagaccctttacgccctcaatgtcgcccctcctctgatctcctttaccgaacgcatcaagtcccaatccggacggccttccctcttcgctgagatcaagcgagcatccccctcaaagggccccatctctatcgcgacctcccctgcgtcccaagctctgacatacgctctttctggagctgccgtcatctccgttctcacagaacccaagtggttcttgggttctcttcaagacatgctgcatgctcggttgagcgtcgccaatctcccaaaccggccggccatcctccgaaaggactttgtcctcagtcgctaccaaatcttggaagcccgcatctggggtgccgacacggttttgctcattgtcagcatgctgaatgaagttctcctccgcgatctttacgcgtactcgctcgaactcggcatggagccccttgtcgaggtcaacaacgcgagggagatggaagtcgcgctctctctgggtgccaaggtcattggcgtcaacaaccgaaacctccatgacttcaaggtcgacatgaacaccaccagccgcctcaccgacatggtcaagggtaaagatgtcaccctgtgtgccttgagcggtatctccaacgcggaggacgtcaaccgctacgcgtcccagggcgttggtgcagttctgattggagagagcttgatgagggccgaggatcctgcagcgttcattcgcgagcttttttccctctcggaacccaccatccaatcccccaaatggcgctcccgtctcccactcgtgaagatctgcggtgtccgctccaaagaggaggccgtcgcaatcgcgaccgctggtgccgacatgattgggctgatgttcgtcgagaaatcgaagaggttcgtggattgggagactgccaaggacatttccaaggccgtccgcgatcttcggttcgaggcaccctctgcgccatcgtctgcagagcctgctcagggcaacaccccctggttcaccaccaacgccaacagactttccgactccagcaacaagtcccgtccccaacttgtcggtgtcttccaggatgcccctctcgcggacatcttgagggccgtggccgaaattcagctcgacatggttcagctgcatgggtctgagccgaccgaatgggcccagcagattcctgtgcccgtcattcgagtcttccacgtctccgcagacggcaaaggtctggacgccatcactcgacccggtgcccatcaattcgtcctcctcgacagcgtacgcgacgatggctcgggcgtcagcggtggaagcggcaaggtcgttgatctcgacctcgccaaacgcgtcgtctcagctggcgagatcaacctgctcggccccgctgcgtacgccgcgcctgacgccaaagacgcccctgtcgagactcaggcgaccaaggcgaacttgaaggtcgcagccacctaccctatgccgattatcctggctggtggactcagccccgaaaatgtggccgctgcgatcgccaaggtccagccgtgggctgtggacgtcagtggaggcgtggagaatgcaacccagggaggtaaggatctttcgaaggtgcaggcgttcatcgatgccgccaagggcttgattagcccgaacgaggttgttgctgcggagggagaagagaacgtcgctgaggtcattgcggtctaa

SEQ ID NO: 90044 - protein, 832 aa, Coprinopsis scobicola
MATTSQTSLPPHLQGQLDVLMIDNFDSFTWNLYQQICLQGAKVTVIRNDAIDPSLFPQLKIRHLVISPGPGHPQTDSGISRDAIKYFAGKVPILGVCMGLECVVDVYGGTIAYAGEIMHGKVSKVRHDNRGCFKDIPQGIQSIRYHSLSAALSTLPAELAITSVTEESGVIMGVRHRKYTVEAVQYHPESILSEGGDELVRNFLSLRGGTWEVNPEVQVLDQSLPPFPVENLPKEITSDPAASNKVPSILDKIYAQRLNDVAQAQRTPGTTPADLETLYALNVAPPLISFTERIKSQSGRPSLFAEIKRASPSKGPISIATSPASQALTYALSGAAVISVLTEPKWFLGSLQDMLHARLSVANLPNRPAILRKDFVLSRYQILEARIWGADTVLLIVSMLNEVLLRDLYAYSLELGMEPLVEVNNAREMEVALSLGAKVIGVNNRNLHDFKVDMNTTSRLTDMVKGKDVTLCALSGISNAEDVNRYASQGVGAVLIGESLMRAEDPAAFIRELFSLSEPTIQSPKWRSRLPLVKICGVRSKEEAVAIATAGADMIGLMFVEKSKRFVDWETAKDISKAVRDLRFEAPSAPSSAEPAQGNTPWFTTNANRLSDSSNKSRPQLVGVFQDAPLADILRAVAEIQLDMVQLHGSEPTEWAQQIPVPVIRVFHVSADGKGLDAITRPGAHQFVLLDSVRDDGSGVSGGSGKVVDLDLAKRVVSAGEINLLGPAAYAAPDAKDAPVETQATKANLKVAATYPMPIILAGGLSPENVAAAIAKVQPWAVDVSGGVENATQGGKDLSKVQAFIDAAKGLISPNEVVAAEGEENVAEVIAV

SEQ ID NO: 90045 - DNA, 828 bp, Arabidopsis thaliana
  CDS (1)..(828)
atgtcaacaggaatatccactgatctccatgtccattttggagctctgaatttctcaaaaacctacaaatctggtttaagcaatcgaacagtgtctttttcgagaatcgggtatgctcagaacaggaaattgagctgcagtgtttccaacacagagaatgtagctcctaaggatgatgaaagaggaaaggatagacctttggttaagatgtgtggcatcacatcagccagagatgcagctatggcagttgaggctagtgccgattttattgggatgattatttggccacattcaaaacgatccatttctctttctgtcgcaaaggatatctccaaagtggccaggaaaggtggggccaaacctgttggtgtttttgttgaagatgatgagaacacgatactgagagcagttgattcctctgaccttgagcttgtgcagcttcatggtaatggttcgcgtgctgctttctcgaggttagtacgcaagaggagagtcatatatgtccttaatgcaaatcaggatggaaagctcttgaatgaagttcctgaagaggattgtcatcttgctgattggattcttgtggatagtgcaacgggtgggagtggacacggatttaactgggctcaattcaagttgccttccgtcagaagcagaaatgggtggctcttagctgggggaatcaatccaacaaatgtttcagaagctctttctatccttcaacctgatggaattgatgttagtagcggtatttgcggtacagacggtatccagaaggataagtctaagataagctcctttataactgcagttcgctctgtacactactaa

SEQ ID NO: 90046 - protein, 275 aa, Arabidopsis thaliana
MSTGISTDLHVHFGALNFSKTYKSGLSNRTVSFSRIGYAQNRKLSCSVSNTENVAPKDDERGKDRPLVKMCGITSARDAAMAVEASADFIGMIIWPHSKRSISLSVAKDISKVARKGGAKPVGVFVEDDENTILRAVDSSDLELVQLHGNGSRAAFSRLVRKRRVIYVLNANQDGKLLNEVPEEDCHLADWILVDSATGGSGHGFNWAQFKLPSVRSRNGWLLAGGINPTNVSEALSILQPDGIDVSSGICGTDGIQKDKSKISSFITAVRSVHY

SEQ ID NO: 90047 - DNA, 828 bp, Arabidopsis thaliana
  CDS (1)..(828)
atgtcaacaggaatatccactgatctccatgtccattttggagctttgaatttctcaaaaacctacaaatctggtttaagcaatcgaacggtgtctttttcgagagtcgggtatgctcagaacaggaaattgagctgcagtgtttccaacacagagaatgtagctcctaaggatgatgaaagaggaaaggatagacctttggttaagatgtgtggcatcacatcagccagagatgcagctatggcagttgaggctggtgccgatttgattgggatgattatttggccacattcaaaacgatccatttctctttctgtcgcaaaggatatctccaaagtggcctgggaaggtggggccaaacctgttggtgtttttgttgaagatgatgagaacacgatactgagagcagctgattcctctaaccttgagcttgtacagcttcatggtaatggttcgcgtgctgctttctcgaggttagtacgcaagaggagagtcatatatgtccttaatgcaaatcaggatggaaagctcttgaatgaagttcctgaagaggattgtcatcttgctgattggattcttgtggatagtgcaacgggtgggagtggacacggatttaactgggctcaattcaagttgccttccgtcagaagcagaaatgggtggctcttagctgggggaatcaatccaacaaatgttgcagaagctctttctatccttcaacctgatggaattgatgttagtagcggtatttgcggtacagacggtatccagaaggataagtctaagataagctcttttataactgcagttcgctctgtacattactaa

SEQ ID NO: 90048 - protein, 275 aa, Arabidopsis thaliana
MSTGISTDLHVHFGALNFSKTYKSGLSNRTVSFSRVGYAQNRKLSCSVSNTENVAPKDDERGKDRPLVKMCGITSARDAAMAVEAGADLIGMIIWPHSKRSISLSVAKDISKVAWEGGAKPVGVFVEDDENTILRAADSSNLELVQLHGNGSRAAFSRLVRKRRVIYVLNANQDGKLLNEVPEEDCHLADWILVDSATGGSGHGFNWAQFKLPSVRSRNGWLLAGGINPTNVAEALSILQPDGIDVSSGICGTDGIQKDKSKISSFITAVRSVHY

SEQ ID NO: 90049 - DNA, 1446 bp, Vibrio parahaemolyticus
  CDS (1)..(1446): transl_table=11
atgaagatgactgacttcaacacccagcaagcaaacaacttatcagagcacgtctcaaaaaaagaagcagaaatggcggaagtgcttgccaaaattgttcgcgataaataccaatgggtagcagagcgaaaagcatcacagcatctgagcacttttcagtcagatctattgccgtcggatcgcagtttttatgatgcattgagtggcgataaaaccgtattcattacagaatgcaaaaaggcatcgccatcaaaaggccttattcgcaacgacttcgatttggactacatcgcgtcggtttacaacaactacgcagacgcgatctcggttctgaccgatgaaaaatacttccagggtagcttcgattttctgcctcaagttcgccgacaagtgaaacagccagtgttgtgtaaggacttcatggtcgatacctaccaagtttaccttgctcgtcattatggcgcggatgcggtattgctcatgctttcggtactgaatgacgaagagtacaaagcgttagaagaagctgcgcacagcctaaacatgggcattttaacggaagtcagcaacgaagaagagcttcaccgcgcagttcagcttggagctagagttatcggaataaacaaccgcaacttgcgcgacttaacaacggatttaaaccgcactaaagcgcttgcgccaaccattcgtaagcttgcaccaaacgcaacggttatttcagagtctggcatttacactcatcaacaagttcgtgacttagcagaatatgcagacggctttttgattggcagctcgctgatggcggaagacaacttagaacttgcggttcgtaaagtaacgctaggtgaaaataaggtttgcggtctgactcacccagatgatgcggcaaaagcgtatcaagcaggcgcagtatttggtggtctgattttcgttgagaaatcgaaacgagcggtcgattttgaaagtgctcgcctaaccatgagcggcgcgccacttaattatgttggcgtgttccaaaatcacgacgttgattatgtcgcctctatcgtaacgtctttgggcttaaaagccgtacagttacatgggctagaagatcaagagtacgtcaaccagctcaaaacagaactacccgttggcgtcgagatttggaaagcctacggcgtggcggatacaaaaccatccttgctcgcagacaacattgaccgtcacctactggatgctcaagttggtactcaaactggcggcacaggccacgtgttcgactggtctttgatcggcgatccaagtcaaatcatgctggcaggtggactgtcgcctgaaaatgcacagcaagcagcaaaattaggctgcttgggattagatttaaactctggagtagaaagcgcaccggggaaaaaagattcacagaagttgcaagccgcatttcacgctattcgcaactactaa

SEQ ID NO: 90050 - protein, 481 aa, Vibrio parahaemolyticus
MKMTDFNTQQANNLSEHVSKKEAEMAEVLAKIVRDKYQWVAERKASQHLSTFQSDLLPSDRSFYDALSGDKTVFITECKKASPSKGLIRNDFDLDYIASVYNNYADAISVLTDEKYFQGSFDFLPQVRRQVKQPVLCKDFMVDTYQVYLARHYGADAVLLMLSVLNDEEYKALEEAAHSLNMGILTEVSNEEELHRAVQLGARVIGINNRNLRDLTTDLNRTKALAPTIRKLAPNATVISESGIYTHQQVRDLAEYADGFLIGSSLMAEDNLELAVRKVTLGENKVCGLTHPDDAAKAYQAGAVFGGLIFVEKSKRAVDFESARLTMSGAPLNYVGVFQNHDVDYVASIVTSLGLKAVQLHGLEDQEYVNQLKTELPVGVEIWKAYGVADTKPSLLADNIDRHLLDAQVGTQTGGTGHVFDWSLIGDPSQIMLAGGLSPENAQQAAKLGCLGLDLNSGVESAPGKKDSQKLQAAFHAIRNY

SEQ ID NO: 90051 - DNA, 1428 bp, Yersinia pestis; identical to SEQ ID NO: 76215
  CDS (1)..(1428): transl_table=11

SEQ ID NO: 90052 - protein, 475 aa, Yersinia pestis; identical to SEQ ID NO: 76216

SEQ ID NO: 90053 - DNA, 633 bp, Ashbya gossypii
  CDS (1)..(633)
atggttgttgcgaaggtgtgcggcgtgcgggacgcgggcgcggcggcggcggcggcggcggcgggcgcggggttcgtggggatggtgtgtgtgccggggcggcggcggacggtgggccgcgaggaggcgcgcgcgattgcggcggcggtgcggggcgcgccggggacgaggctggtgggcgtgttccaagaccaggcgccggaggaggtgctgcggttgcagcgcgagctggggctggacgcggtgcagctgcacggcgcggaggactgggcggcgttccgggcgcagctgccggcgagcacgctgctgatcaagagcttcgtatttccccgggactgcgaggccgcgctggcgatgcaccgggccgcgcgcggccgcaactgcatggtgctcttcgacgcggcgggcggcggcagcggcgcgcggctggactgggccgcgctggcggcgtggggcgcggcgcacgcggacgtgcagttcatgctggcgggcgggctgacgccggccaacgtcgcggaggccgcgcgcctgccgggcgtggtcgcggtcgacgtcagcagcggcgtggagaccggcggcgcgaaggacggcaacaagatccggcagtttgtcgagaacgcaaaaggtatataa

SEQ ID NO: 90054 - protein, 210 aa, Ashbya gossypii
MVVAKVCGVRDAGAAAAAAAAGAGFVGMVCVPGRRRTVGREEARAIAAAVRGAPGTRLVGVFQDQAPEEVLRLQRELGLDAVQLHGAEDWAAFRAQLPASTLLIKSFVFPRDCEAALAMHRAARGRNCMVLFDAAGGGSGARLDWAALAAWGAAHADVQFMLAGGLTPANVAEAARLPGVVAVDVSSGVETGGAKDGNKIRQFVENAKGI

SEQ ID NO: 90055 - DNA, 654 bp, Candida glabrata
  CDS (1)..(654)
atgtcatttgattcgttactcgacaagaatgataagctggtaaaagtttgcgggattcaaaccgtcgaggctgccgaaactgcgcttcaagcaggcgctgatttgatagggatcatatgtgtccccaacaggaagcggactatcgagagcgctgtggctcgtgaaatatccaaattgattcacaaatcaggtactacaaagctggtgggggtgttcaggaatcaatctgttgaggacgtacatcggctttctgaggaatatgaccttgacataatccaattacatggtgatgaatcatggccagagtactataacgtcattaagaaaccaataatcaaaagagtcatattccctagagatgtcgatgttgtaacacaagtgtgtcaaagaaaacccttggtatgtctaccattgttcgactccgaggcaggcggtacaggtgaaaagctggactggtccagtatttcctcctgggcaagcgaacagaataacgtattttatatactagcgggtggactaactgcagaaaacgtcatggaggcggtggggttgcctggtgtaattggtgttgacgtctcaggtggtgtagagactgacggcgtcaaagacaatgacaagataattaaatatgtacaaaatgcaaagaaacaatga

SEQ ID NO: 90056 - protein, 217 aa, Candida glabrata
MSFDSLLDKNDKLVKVCGIQTVEAAETALQAGADLIGIICVPNRKRTIESAVAREISKLIHKSGTTKLVGVFRNQSVEDVHRLSEEYDLDIIQLHGDESWPEYYNVIKKPIIKRVIFPRDVDVVTQVCQRKPLVCLPLFDSEAGGTGEKLDWSSISSWASEQNNVFYILAGGLTAENVMEAVGLPGVIGVDVSGGVETDGVKDNDKIIKYVQNAKKQ

SEQ ID NO: 90057 - DNA, 699 bp, Hansenula anomala
  CDS (1)..(699)
atgctagtcaagatttgtggagttaaagatgtcgaggcagctcaagttgcactagaatcaggtgcagacatgattggaatgattttcgtgcctggtaaaccaagaactattcaagtatcaaatgctaaagaagttgtatcattagttgaatcaaaaaggaaaggtttaaattctaatgaactatatgattcattaaagccaggtcaagatagtttatggtttgaacaagttcatgattctattaaatctaatggaccttatagtgtgggagttttcagaaatcaaagtatagaggagattaataatataattgaagaagttgatattgattttgttcaattacatggacaagaatctcatgatgaatatattccacaattgaaaaaaccagtgataacgagattcgtaccaaatgaaacaaaagttttacaaagtttaaaaccaaataaacatttattaccattgtttgatagtgaagctggtggtgaaggtgtgaaattaaattggtccaacttgagtgattggtctgcaaagaacaatgctagatatttattagctggtgggttaacacctgataatgttcatgaagctattaaattggatggtgttattggagttgatgtttctggaggtgttgaaactaatggtgttaaagattatgtaaagattaaagagtttgtaaagaatgcattacaataa

SEQ ID NO: 90058 - protein, 232 aa, Hansenula anomala
MLVKICGVKDVEAAQVALESGADMIGMIFVPGKPRTIQVSNAKEVVSLVESKRKGLNSNELYDSLKPGQDSLWFEQVHDSIKSNGPYSVGVFRNQSIEEINNIIEEVDIDFVQLHGQESHDEYIPQLKKPVITRFVPNETKVLQSLKPNKHLLPLFDSEAGGEGVKLNWSNLSDWSAKNNARYLLAGGLTPDNVHEAIKLDGVIGVDVSGGVETNGVKDYVKIKEFVKNALQ

SEQ ID NO: 90059 - DNA, 633 bp, Kluyveromyces lactis
  CDS (1)..(633)
atgctcgttaaagtgtgtggtttgcaaaccgttgaagctgcaaagactgctgtggatgatggtgctgattacttaggtatcatttgtgttcccggtaggaaaagaaccattgactcatctgttgcgaaaggtatttcaactgcagttcaccaacaagagaacgtgaaaggtactaaactagtcggggtgtttagaaatcagtccgttgatgatgtccttcaactgtaccacgaatataatctagatgtgatacaattacatggagatgaagatattaaagaatacagatctttgatcccatcttcaattccaatcattaagaggttccagttcccacaggattgtgaattactactggacctgtatgaacacgtagacaatgtgctgacgttgttcgattctggtgaaggtggcactggtgagaaattgaattggagtgcaatttccagttggtctgcaagtcatcccgagataaaattcattatcgctggtggattgaatcctgataacgtttctgttgccattaatatgttaccaaatgcgatcggtgtcgatgtaagtggaggagtagagactgatggtatcaaggatttagaaaaggtaaagctattcatccagcaggcctctcaatag

SEQ ID NO: 90060 - protein, 210 aa, Kluyveromyces lactis
MLVKVCGLQTVEAAKTAVDDGADYLGIICVPGRKRTIDSSVAKGISTAVHQQENVKGTKLVGVFRNQSVDDVLQLYHEYNLDVIQLHGDEDIKEYRSLIPSSIPIIKRFQFPQDCELLLDLYEHVDNVLTLFDSGEGGTGEKLNWSAISSWSASHPEIKFIIAGGLNPDNVSVAINMLPNAIGVDVSGGVETDGIKDLEKVKLFIQQASQ

SEQ ID NO: 90061 - DNA, 600 bp, Lactobacillus casei
  CDS (1)..(600): transl_table=11
atggtactcgttaaaatctgtggtctcatgcattcggaagatattttggcagtcaatactgctggggctgactttgccggctttgtctttgctcccgggcggcatcaagtatcacttgagcaagcgttggccttaaaccagttgcttcattccaagatcaagaccgttggtgttttcgtcaacgagccagtcgccgaaattctggctatctatcaagcaggtgccattgatgttgcacagcttcatgggaaaagcaccccagccgaaatcacgcaacttcaacaagccggtttaaaagtgatccaggtctttgaacgccaggccattgatctaacctcaatggctgattatttaatggtcgatagcggcaaaggcagcgggcaactacttaacttaaaagctatcccccacatcagccgacccctcattttggctggcggtctaacgccactgaatgtgcgccaagcggttcaactcgttcagcccacgatggtcgacgtctccagcggggttgaaaccaacggccataaagatgctgataaaatcacccaattcattcaacaagcaaaagaggacatcatctatgaagacattaaatga

SEQ ID NO: 90062 - protein, 199 aa, Lactobacillus casei
MVLVKICGLMHSEDILAVNTAGADFAGFVFAPGRHQVSLEQALALNQLLHSKIKTVGVFVNEPVAEILAIYQAGAIDVAQLHGKSTPAEITQLQQAGLKVIQVFERQAIDLTSMADYLMVDSGKGSGQLLNLKAIPHISRPLILAGGLTPLNVRQAVQLVQPTMVDVSSGVETNGHKDADKITQFIQQAKEDIIYEDIK

SEQ ID NO: 90063 - DNA, 699 bp, Lipomyces starkeyi
  CDS (1)..(699)
atgacagtctccaccacttcgctgtgcacacccatcgtcaaaatctgcggtcttaccgtagaagcagcccactgtgcgatctcctcgggtgcagacttaatcggcatgattcttgtcccggatctcaaacgcactgttcagcagaccaagctaaaggccatttcccgcgcggttacacgaattccgggagtcccgacctccccatcacgtggcattgacagaccatcccacggactggttcggggcacattttcagcagattacacttcgtggccgttggtcgtgggtgtgtttagaaatcaatcgttggatgaggtgcttcggatgctgaggaattacgaccttgatatcgtgcagttgcatggctcagaaccgttacatcagtggacacgagagataccggtaccggtgatcaagaagttcgggcttggtgaagacgatttgatggcgccgggactacatgccgtgacactgctagatggtggtgcaggtggtgaaggccaaaagattagctgggagggattacctggaagtggcgcgtttatgttggccggaggattgacggttgataatgttgccgtcgcggtaaagatcccgaacgtagccggtgtggatgtttctagtggtgtcgccaccgacggaatgcaggatttggagaaaaattgcagatgtttattcaggaatgcgaagggttggtaa

SEQ ID NO: 90064 - protein, 232 aa, Lipomyces starkeyi
MTVSTTSLCTPIVKICGLTVEAAHCAISSGADLIGMILVPDLKRTVQQTKLKAISRAVTRIPGVPTSPSRGIDRPSHGLVRGTFSADYTSWPLVVGVFRNQSLDEVLRMLRNYDLDIVQLHGSEPLHQWTREIPVPVIKKFGLGEDDLMAPGLHAVTLLDGGAGGEGQKISWEGLPGSGAFMLAGGLTVDNVAVAVKIPNVAGVDVSSGVATDGMQDLEKNCRCLFRNAKGW

SEQ ID NO: 90065 - DNA, 612 bp, Listeria innocua
  CDS (1)..(612): transl_table=11
atgattgtaaaaatttgtggattgaaaaaaagtgtcgatgtaaaagcagcagttgagaatggtgcggatatgattggtttcgtttttgcgaaaagtaaacgccaagttacgattgaacaagcacaccagttagctaaaaacatcccacctaatattaagaaagttggcgtttttgttaacccgactgaagatgagttgactgctgctattaaaggcgtaccactagacatcgtgcaactccatggacaagaaccgaccgagcaagcagaccgcaccgatgccgaagtaattaaagcttttccagttaaagagggcaaacttcctaacaatataaatgattattcaaatgcctatatcttacttgatgctccggcagaagaatacgagggcggcagcgggaaaacttttgattgggataaagtaaatagtgatttacttataaaaaataaattgattattgctggtggcttaaatgtcgaaaacgtgaaagaagctattaaccgctttgaaccatatgccgttgatatttcttccggcgtagaaacgaatggtgaaaaagatcctgaaaaaattaaaatcttcattaaaacagcaaaaggagttggaaaataa

SEQ ID NO: 90066 - protein, 203 aa, Listeria innocua
MIVKICGLKKSVDVKAAVENGADMIGFVFAKSKRQVTIEQAHQLAKNIPPNIKKVGVFVNPTEDELTAAIKGVPLDIVQLHGQEPTEQADRTDAEVIKAFPVKEGKLPNNINDYSNAYILLDAPAEEYEGGSGKTFDWDKVNSDLLIKNKLIIAGGLNVENVKEAINRFEPYAVDISSGVETNGEKDPEKIKIFIKTAKGVGK

SEQ ID NO: 90067 - DNA, 717 bp, Methanosarcina acetivorans
  CDS (1)..(717): transl_table=11
atgaaaacaaggccaaaaacaaggataaaaacaagggtaaaaatctgcgggatccgcagtccgaaagacatagaatttgcagccctctacggtgccgatgccgtgggtttcatcacggaagtccctgtggaaagcccgaggaaactcgattcagacaccgcggctgcccttatttcaaaagtcccgaaatgccttgattcggtaatggtaataatgcctgaaacttccacctctgccctcgaacttatcgagaaagtaaagccgaatatagtgcagatccactcggatctaccccttagcgaacttaaagctgtaagagaaaaagctgatattccaatcataaagaccctttccgtgcccgccgagcaggaggctcccaaactccataacattgtaactcgtcttcttgaggaggtccgcgagctggaagagagcgggattgtggatagcgtgcttctggactcggggattgccggaaaaaccggcggcacaggctgtgtacatgactgggacctgagccggagaattgccgaagaaacagaacttcccctgatccttgcaggcgggctaaaacctgaaaacgtgcaggaagctatcaggtctgtttccccttatgctgtggacacggcttcaggggtagagacccaggggaaaaaagattctgtgaaagtcaggaagtttattgaagaagtgaggtgtacctatgctttcctttga

SEQ ID NO: 90068 - protein, 238 aa, Methanosarcina acetivorans
MKTRPKTRIKTRVKICGIRSPKDIEFAALYGADAVGFITEVPVESPRKLDSDTAAALISKVPKCLDSVMVIMPETSTSALELIEKVKPNIVQIHSDLPLSELKAVREKADIPIIKTLSVPAEQEAPKLHNIVTRLLEEVRELEESGIVDSVLLDSGIAGKTGGTGCVHDWDLSRRIAEETELPLILAGGLKPENVQEAIRSVSPYAVDTASGVETQGKKDSVKVRKFIEEVRCTYAFL

SEQ ID NO: 90069 - DNA, 627 bp, Neisseria meningitidis serogroup A
  CDS (1)..(627): transl_table=11
atgaggaaaatccgcaccaaaatctgcggcatcaccacaccggaagacgcactgtatgccgcccacgccggcgcagacgcattgggactggttttttacccccaaagcccccgcgctgtcgacatcattaaagcacaaaaaatcaccgccgcactgccgccgtttgtcagcgttgtcgcccttttcgtcaacgaaagcgcgcaaaacatccgccgcatccttgccgaagtaccgatacacatcatccaattccacggcgacgaagacgacgcattctgccgccagttccaccgcccctatatcaaggccattcgtgttcagacggcatcagacatccgaaacgccgccgaccgcttccccgacgctcaggcactgctgttcgatgcctaccatccttcggaatacggcggcaccggacaccgcttcgactggacgctgttggcggaatattcgggcaaaccgtgggtgcttgccggcgggctgacccctgaaaacgtcgacgaagccatccgcatcaccggagcggaagcggtcgatgtatccggcggcgtggaagcgtctaaaggcaaaaaagacccagccaaagttgccgcctttatcgcaaccgccaaccgcctatcccgttaa

SEQ ID NO: 90070 - protein, 208 aa, Neisseria meningitidis serogroup A
MRKIRTKICGITTPEDALYAAHAGADALGLVFYPQSPRAVDIIKAQKITAALPPFVSVVALFVNESAQNIRRILAEVPIHIIQFHGDEDDAFCRQFHRPYIKAIRVQTASDIRNAADRFPDAQALLFDAYHPSEYGGTGHRFDWTLLAEYSGKPWVLAGGLTPENVDEAIRITGAEAVDVSGGVEASKGKKDPAKVAAFIATANRLSR

SEQ ID NO: 90071 - DNA, 627 bp, Neisseria meningitidis serogroup B
  CDS (1)..(627): transl_table=11
atgaggaaaatccgcaccaaaatctgcggcatcaccacaccggaagacgcagctgccgccgcagcggcaggtgcggatgccgtcgggctggtctttttccaaggcagcagccgggccgtcgatattgcccgcgccaaaaaaatcaccgccgcactgccgccgtttgtcagcgttgtcgcccttttcgtcaacgaaagcgcgcaaaacatccgccgcatccttgccgaagtgccgatacacatcatccaattccacggcgacgaagacgacgcattctgccgccagttccaccgcccctatatcaaagccattcgtgttcagacggcatcagacatccgaaacgccgccacgcgcttccccgacgctcaggcactgctgttcgatgcctaccatccttcggaatacggcggcaccggaaaccgcttcgactggacgctgctggcggaatattcgggcaaaccgtgggtgcttgccggcgggctgacccctgaaaacgtcggcgaagccgtccgcatcaccggagcggaatcggtcgatgtatccggcggtgtggaagcgtctaaaggcaaaaaagatgccgccaaagtcgccgcctttatcgcaaccgccaaccgcctatcccgttaa

SEQ ID NO: 90072 - protein, 208 aa, Neisseria meningitidis serogroup B
MRKIRTKICGITTPEDAAAAAAAGADAVGLVFFQGSSRAVDIARAKKITAALPPFVSVVALFVNESAQNIRRILAEVPIHIIQFHGDEDDAFCRQFHRPYIKAIRVQTASDIRNAATRFPDAQALLFDAYHPSEYGGTGNRFDWTLLAEYSGKPWVLAGGLTPENVGEAVRITGAESVDVSGGVEASKGKKDAAKVAAFIATANRLSR

SEQ ID NO: 90073 - DNA, 615 bp, Oceanobacillus iheyensis
  CDS (1)..(615): transl_table=11
atgtttgtaaaaatatgcggaataacttccattgatactgctcaagcagttgtagatgctaacgctgatatgattggatttgtatttgcaccgagtaagcgacaactatccacctctctagctgaggaaatagcaaatacacttcctcagaccattcaaaaagttggggtatttgtagatgagcctttagagaatatcctatccatcatcgagagggtgaatcttgatattgtccagttacacggcgatgagtctatcgactatcaaaagaggattccaattccgataatcaaagcatttccagctactacagagggattaaaccaagcaaatcaatcatctgcaaaatatatattaatcgacagtccccctctgcaatcatcgcgcggaggaaacggggtaacatttaattggaatatccttaaagaccaaccttttactagcaaattaatattggctggtgggttgaatacagagaatatacgtgaagctataaaaactgtaaatcccgctggtgttgatgtttcaagtggagtagaaacaaatggaaaaaaggacgcaaagaagatccagcaatttattactaacgtacaaagaaaggatgtattgcgatga

SEQ ID NO: 90074 - protein, 204 aa, Oceanobacillus iheyensis
MFVKICGITSIDTAQAVVDANADMIGFVFAPSKRQLSTSLAEEIANTLPQTIQKVGVFVDEPLENILSIIERVNLDIVQLHGDESIDYQKRIPIPIIKAFPATTEGLNQANQSSAKYILIDSPPLQSSRGGNGVTFNWNILKDQPFTSKLILAGGLNTENIREAIKTVNPAGVDVSSGVETNGKKDAKKIQQFITNVQRKDVLR

SEQ ID NO: 90075 - DNA, 714 bp, Pichia pastoris
  CDS (1)..(714)
atggccctcgtaaagatctgcggtttgcaaagtttggaggctgcggaaacggcagtaaacaatggagcttcattagtgggtgttattatggtccctggccgggaacgaacggtgaaacaagaggttgcgagggaaatttcgcagatggtgcgggaaaagagaatttcaaagggctcaaaatacttggattccagacaactgaggaaagagtgggacgactgtcctctggaagactggtttgagtacaacgtgaaagaaataaacagcagtggtccatttttagttggagtttttcgtaatcaaagtatagatgaaatccagcaagctatccacactcatggtttggatttcgtccaactacatgggtctgaggattttgattcgtatatacgcaatatcccagttcctgtgattaccagatacacagataatgccgtcgatggtcttaccggagaagacctcgctataaatagggccctggtgctactggacagcgagcaaggaggtgaaggaaaaaccatcgattgggctcgtgcacaaaaatttggagaacgtagaggaaaatatttactagccggaggtgtgacacctgataatgttgctcatgctcgatctcatactggctgtattggtgttgacgtctctggtggggtagaaacaaatgcctcaaaagatatggacaagatcacacaatttatcagaaacgctacataa

SEQ ID NO: 90076 - protein, 237 aa, Pichia pastoris
MALVKICGLQSLEAAETAVNNGASLVGVIMVPGRERTVKQEVAREISQMVREKRISKGSKYLDSRQLRKEWDDCPLEDWFEYNVKEINSSGPFLVGVFRNQSIDEIQQAIHTHGLDFVQLHGSEDFDSYIRNIPVPVITRYTDNAVDGLTGEDLAINRALVLLDSEQGGEGKTIDWARAQKFGERRGKYLLAGGVTPDNVAHARSHTGCIGVDVSGGVETNASKDMDKITQFIRNAT

SEQ ID NO: 90077 - DNA, 681 bp, Saccharomyces kudriavzevii
  CDS (1)..(681)
atgtcttttgttaatataaggagtagtcgcgggccagtggtgaaagtttgcggcttgcaaagcttaaaagccgctcaatgtgctttggattcggacgctgacttgctgggcataatatgtgtgcccggcagggagagaactgttgatccggtcgtagccatggagatttcggctctcgtaagagcatgtagaaccagcatgagcaccccaaaatatctggttggtgttttccgtaatcagtccaaggaggatgttttacgtatagccaacgattatggtatcgatatcgttcaacttcacggtgacgagccgtggcaagagtatcaaaaatttctcggcttgccagttatcaaaaggctcgtgttcccaagagattgcgacatattactgagtacgccttcagagaaaacacatctgtttatgcccctatttgattcggaggccggtggaacaggtgaacttttagattggaactccatttctgactggtttgcggagcaaggaaacccggaatgtctacagttcatgttggctggtggattgacgcctgaaaacgtcagtgacgcccttcaactacatggtgttattggtgttgatgtaagtggtggtgtggaaacaaatggtatgaaagatatggacaaaatcacgaactttgtcagaaatgcaaagaaggaaagttag

SEQ ID NO: 90078 - protein, 226 aa, Saccharomyces kudriavzevii
MSFVNIRSSRGPVVKVCGLQSLKAAQCALDSDADLLGIICVPGRERTVDPVVAMEISALVRACRTSMSTPKYLVGVFRNQSKEDVLRIANDYGIDIVQLHGDEPWQEYQKFLGLPVIKRLVFPRDCDILLSTPSEKTHLFMPLFDSEAGGTGELLDWNSISDWFAEQGNPECLQFMLAGGLTPENVSDALQLHGVIGVDVSGGVETNGMKDMDKITNFVRNAKKES

SEQ ID NO: 90079 - DNA, 618 bp, Zygosaccharomyces bailii
  CDS (1)..(618)
atgatcgcaaaaatctgcggtttacaaagtgtcgaggctgctcagcaggcagtggataatggtgccgacctcattggagtcatctgtgtgcccaaccgcaaacgaactgttgaccccgagatcgccagaagtatctccaagatatgtcacgggacaggaacaaggctggttggtgtgtttagaaaccaaccaaaagaagaggtacgtcagctggcgcaagagtatgaattagatgttgtgcagttacacggtgatgaagactggcaagagtacgcttcttacgttggacttcccttgttgaaaagagtagtttttcccagggatgtctcactagtaagtcagatggatggcgaggtctgcacaccgttgttcgattctgaagctggcgggagtggtgaaaaactggactggcaggccattggaagctggtttcaagattcacagctaacgcgtgggtatttgttggccggtggactgagccctgataatgttgtcgaagcgcttcgagtgcccggagtggtaggagtggacgtaagtggtggtgtagagactgatggcaccaaagatctggctaagattaaacagtttctagaactatataaagtaaatgtaaattaa

SEQ ID NO: 90080 - protein, 205 aa, Zygosaccharomyces bailii
MIAKICGLQSVEAAQQAVDNGADLIGVICVPNRKRTVDPEIARSISKICHGTGTRLVGVFRNQPKEEVRQLAQEYELDVVQLHGDEDWQEYASYVGLPLLKRVVFPRDVSLVSQMDGEVCTPLFDSEAGGSGEKLDWQAIGSWFQDSQLTRGYLLAGGLSPDNVVEALRVPGVVGVDVSGGVETDGTKDLAKIKQFLELYKVNVN

SEQ ID NO: 90081 - DNA, 3903 bp, Aspergillus niger
  CDS (1226)..(3538)
ctgctgagagggaaggtccgaagaacgctgggaagccggctcttggttatctctgagatacaacgcaagcagcttgcatgccactttgacgacatggcttctctccgatagatataagctgcgcagccgcaggcggcggctagtttcagaagaaaaatcggaagcctcgtcaacatgggctgctttctgattgaaaatttcggccagggcaggtcctgcgagagacacacgaagattgtcacctccgccgcgctttgcaagctagttgtttcctcgtcggcaaaacggttgagaaggcgcgtggcaggtcgggtttgccattctaatactgttaatcggagcgcgctgatttcatcaatacccgccttctcgctcaaccacagagcatctgctttgatctccttcaaatcatacgaagattgcgcatttgtctcaacattgattgcggctgtcttagattcaaagtcggattttgatttggtggaaggagaaggaaaaccggtgaggcaattcgagaggatttggacgctgtcgggatgcgataggaaggcatggagtctttccacatcttcgacgttgctatcgatcttgcatatgtgaaggaaggctctcttccaggacctaagatcgcatagataatcagtgaatgctcgtcaattgggaacagacgaatgtaaagcccatacagaagctggacgtccccggagaagcacttgtccagggacgggaaataggcttccgggacgggagccattggcgagacaattatatcattctagatgctcgatgggatgcgaaaaggatgtgctgctcgcgagggtccaaagcgacagagacccggagcaaaagggcaggcaagttgagagtgttaagcagagagctcacaagctcaaaggcgggaacccaagaatattattccaggagcgggtttggctggaggtcaacaatgactgcctatctgggtttagcccaaggcggtgagctgaagttttgcgccgtttgcttaccaaccccaatccggaaggcgacacgatccaccgaggatctgagtcaggccgcagccaccgtcgatgtttgctccgccctcactttactccggcagttgacagttcaacttcaaaaaggtgagtgtgtctctatgcgccttgccctggctgctttttccttatcgcattgctcttcgatttcatctaattgaagatcctgtcctgcgcagattttcgtcatggcggactccggactcgtcgatcattccccccaccatcccaccaaggccgcccaactgagcaccgcatcgaatgttatcttgattgataactacgactcgtttacttggaacgtctaccagtacttagttctcgagggtgctacagtcaatgtgtttcgtaatgaccagatcactttggaggaactgatcgccaaaaagcccacacagctggtcatcagtcccggtcccggtcaccccgagactgacgctggtatcagcagtgcagccattcaatatttcagcggcaagattcccatcttcggtgtatgcatgggtcagcaatgtattattacttgctttggtggaaaagttgatgtcaccggcgagattcttcatggcaagacatccccgcttaaacatgacggcaagggcgcctatgaaggactacctggctcgctcgccgtcactcgctatcactctctagctggtacacatgcgacaatccccgactgtctggaggtgtcctcttccgttcagttggcggacgacagtaacaaagatgtcataatgggcgtgagacacaagaagttggccgtggagggggttcagttccaccccgaaagtatcctcactgagtacggccgtatcatgttccgcaacttcctcaaacttactgcaggcacctgggaaggaaacgggaaacattttggtgagcagagcagcactaccaaggccaccgttccctcaaaccctcccccgaaaacggacaagaagttgtccatcctcgaaaggatctacgaccatcggagagccgctgtcgccgtgcaaaagactattccctcgcaacggccagccgacctccaggctgcctatgaccttaatctggcccctccccagatcccatttccggctcgtcttagacaatcgccctacccactgtcccttatggcagagatcaagcgtgcttctccctctaagggtatgatagccgaaaatgcatgcgcgcctgctcaggccaggcaatacgcgaaggccggtgccagtgtcatctctgtgctcacagagcctgaatggttcaaaggcagcattgacgacttgcgtgccgttcgccaaagtctggagggcatgacgaacaggcctgccattctgcggaaggaattcgtttttgacgaataccagatcctagaggcccgtttggccggtgccgacaccgttttgctcattgtgaagatgcttagtgttgaactcctcactcggttgtatcactactcccgtagccttggcatggagcctttggttgaagtgaacacacccgaagagatgaagattgcggtcgaccttggagccgaggttattggtgtcaacaacagggacctcacaagcttcgaggttgatctcggcactactagccggctcatggatcaggtgcccagcagcaccatcgtgtgtgctctcagtgggatctccgggccgaaggatgtggaggcttacaagaaggagggtgtcaaagctattctagtaggagaagccctgatgcgggcagcagacacggctactttcattgctgagcttcttggaggcagctcacaaaccgtttccagcgagtcccggagatcgccgttggtaaagatctgcggtactcgatctgaagaagctgcacgagcagcgatcgaggctggagcagacctaattggaatcatcatggtgcaagggcgaaccggatgcgtccccgatgacgtggcgctcccgatatcccaagtggtcaggtccaccccgaaacctgctagtcaagctcttcacacatctcaagaacctcccgctgcgacatctgtggagtactttgatcactcagccaaaattttgcgtcatcctagccgggcgcttctcgtgggcgtctttcagaaccagccccttgattatatattgagtcagcaacaaaaattgggacttgatgtcgtgcaacttcacggatctgagccgcttgaatgggccaagttgatcccagtgcctgtcatccgcaagtttggacttgacgagcctgcgatcgcccgcagggcttaccactccctaccgttactggattctggcgttgggggaactggtgagttgctggaccagtcccgcgttcagaatgtcctcgataaggactgtggtttgcgcgttattttggcgggtggtttagatcctaccaatgttgctggcattgtccagaagcttggcgaatctggccgcaaggtcgttggcgtagatgtcagttctggcgtagagtcagacggcgctcaggatcttaacaaaattcgcgcatttgtgcaggccgtgaggggactctagcttgggatcgtctctatatatccccaatcatgggattaccaggcatcattggtcttttcatttgattttctttgagttttattacctttcactttgttgatacctttcgggatctaccatagccatgatgccaagcaatgacacggccacttcagatatcctacactcttgccagcttacagtagcctcactattcagtgacaagataaacctcatttttctcttcttagtgttcgttcattcggccatgatcgaatagtatcgtaatagtagtactacttatcatattcttccccgagctttctacttactatatacctttaagatcccttatattcactcaacgcacccttgatacagtcagc

SEQ ID NO: 90082 - protein, 770 aa, Aspergillus niger; identical to SEQ ID NO: 76220

SEQ ID NO: 90083 - DNA, 2307 bp, Cochliobolus heterostrophus
  CDS (1)..(2307)
atgccatcctcgactttgattgaccactcgcctcgcaatccaaatccctctccgccccgtatcaccgcctccaatgtgatcctcattgacaactacgactctttcacctggaacgtctatcagtaccttgtctttgaaggcgcattcgtaaccgtctatcgcaatgatgagattactctcgatgagctcatcgcgaagaagcccactcagcttgtcattagccaggtcccggacacccggaaagaggacgtggcattagcaatcgagccattacgcacttcagtggcaaaatccccattttcggcgtgtgcatgggagagttgcatcttctacagctatggaggcaccgtagacgttactggtcagattctccacggaaaaacatgccctctcaagcacgacggcaagggtgtttttgcaggcgtgccccaggatgtcccggttactaggtatcattctctcgctggtactcacggcacacttccagactgccttgagattagtgcaaccattcctgcaaatgcagatgccgagatcaaggaggtcatcatgggtgttcgccacaaggagtatgtgattgaaggcgtgcagtttcatccagagagcattctgaccgagcatggacgtctcatgatgagaaacttcctcaagatgcaaggaggcacgtgggctgagaatgagcgactgcagaaagaggcacatgcccaagcaattggggctgcgttcagcgagagcgcaatggtgcaaagaacggacagtagaactcatcttcaaaagatttacgatcaccgcagggcagccgttgctgagcagaagaagatcccttctaacagacctgttgatttacaggctgcatatgattcgaacttggccccgccgcagatcaactttccagagcgtcttagacaatctcctttcaaactctcgctcatgtccgagatcaagcgtgcgtcgccttccaaaggcatcatttccctgtcgacgtgtgcgcctgctcaagccagattatatgccaaggctggcgctagacccatttctgtcctcacagaacccgaatggttcaagggtagcatcgaggacctaagggccgttcgacaaagcatcgaaggcatggccaatcgtcctgcgctgctgcgtaaggaattcattttcgacgaataccagatcctcgagggtaggcttgcgggtgcggatacggtgcttgtgattgtaaaaatgttagagaccgagttgctggagaggctcctaggactatcagattcagtcggaatggagccccttgttgaagtccagaatactgacgaaatgaagattgcagtcaagctgggcgcccaggttatcggcgtgaacaaccggaacctggtaaacttcgaggtcgacattggaacaacgaaccgcttgatccagatggtcccgaaagagacaattttgtgcgctctgagtggtatcgctggccccaaagatgtagaggcctacatcaaagatggggttggtgcagttttagttggagaagcgctcatgcgggcgtcagacatgtcacaattcatttcagagcttctaggcggaccatacaaggaagttcgggcatcatcttctagtccaattgtcaaaatctctgggacaagaagtgaagctgccgtagctgcagttgaagcgggagccgatcttatcggcattattcttgctcctggacttaagcgaacagtaacagcagagacggccctgagtatatctgaagcagtccacaaaaccaagaagccgaatgtctccaaatcaggactcctggccgactcaaagactgcgtccgacttttttgatcacggcgcatcacgcttgttggaaacgattagtcgtgcgctgctcgtgggagtcttccgcaatcaatcgctagagtatgtgcttgagcagcagcgattgctgaatctggatgttgtacaacttcacggccaagagccaatcgagtgggcgaagcttgtccccgttcctgttctgaaggcgtttaacccgcaagaccatggcatcggcacaagaggttaccacgctcttcccttgctggatgctggttcgggaggctctggcaagcaactgggattgtcagatgtcaaggcagcatttaccaaggatgatggcatcaagatcatactgggcagggggcttgaacccgacaacgtgcagacgacgctcgccgggcttgatgaataccgagaccgggtctatgcagttgatgtcagcagtggcgttgaggaggatggtcagcagagcttggacaagattcgttcatttgtgaaggcggctaagagtttgtag

SEQ ID NO: 90084 - protein, 768 aa, Cochliobolus heterostrophus
MPSSTLIDHSPRNPNPSPPRITASNVILIDNYDSFTWNVYQYLVFEGAFVTVYRNDEITLDELIAKKPTQLVISQVPDTRKEDVALAIEPLRTSVAKSPFSACAWESCIFYSYGGTVDVTGQILHGKTCPLKHDGKGVFAGVPQDVPVTRYHSLAGTHGTLPDCLEISATIPANADAEIKEVIMGVRHKEYVIEGVQFHPESILTEHGRLMMRNFLKMQGGTWAENERLQKEAHAQAIGAAFSESAMVQRTDSRTHLQKIYDHRRAAVAEQKKIPSNRPVDLQAAYDSNLAPPQINFPERLRQSPFKLSLMSEIKRASPSKGIISLSTCAPAQARLYAKAGARPISVLTEPEWFKGSIEDLRAVRQSIEGMANRPALLRKEFIFDEYQILEGRLAGADTVLVIVKMLETELLERLLGLSDSVGMEPLVEVQNTDEMKIAVKLGAQVIGVNNRNLVNFEVDIGTTNRLIQMVPKETILCALSGIAGPKDVEAYIKDGVGAVLVGEALMRASDMSQFISELLGGPYKEVRASSSSPIVKISGTRSEAAVAAVEAGADLIGIILAPGLKRTVTAETALSISEAVHKTKKPNVSKSGLLADSKTASDFFDHGASRLLETISRALLVGVFRNQSLEYVLEQQRLLNLDVVQLHGQEPIEWAKLVPVPVLKAFNPQDHGIGTRGYHALPLLDAGSGGSGKQLGLSDVKAAFTKDDGIKIILGRGLEPDNVQTTLAGLDEYRDRVYAVDVSSGVEEDGQQSLDKIRSFVKAAKSL

SEQ ID NO: 90085 - DNA, 2352 bp, Cryptococcus neoformans; identical to SEQ ID NO: 76221
  CDS (46)..(2304)

SEQ ID NO: 90086 - protein, 752 aa, Cryptococcus neoformans; identical to SEQ ID NO: 76222

SEQ ID NO: 90087 - DNA, 2343 bp, Penicillium chrysogenum; identical to SEQ ID NO: 76225
  CDS (66)..(2324)

SEQ ID NO: 90088 - protein, 752 aa, Penicillium chrysogenum; identical to SEQ ID NO: 76226

SEQ ID NO: 90089 - DNA, 2367 bp, Phanerochaete chrysosporium
  CDS (1)..(2367)
atgtcgcttccaccgcacctatgtgttcccatcgacattctaatgatcgacaactttgattcgttcacctggaatctctaccagtcgctatgcttgctaggtgccgatgtcactgtcatcaggaacgatgctatcccccgttccgccatcccccagcttcgtatcaagcgtctcatagtgtctcccggtcctggtcacccccagaccgactctggcatctctcgtgaagctatcaagtacttcgcaggcaaggtgccaatcatgggtgtctgtatgggtcttgagtgtgtagtggatgtatttggaggacagattgcctatgccggagaaatcatgcacggcaaggtcagcggtatccgtcacgatgcccgtggctgcttcaaggaccttcctcaaggcatccagtcgactcgctatcactccctgagtgcgggtgtcaagactttgcctgatgagctcgccgtcactgctgtaaccgagcacgagcgagtcatcatgggtattcgccaccggaaatataccgtagaagctgtccagtaccacccggagagtatcctgtcggagtcaggagatgatcttctgcgacactttatgaagctgaagggcggcacatgggaggaaaaccccgaattccgtgtactggatccatccctccccgctttcgaaatcggttcgcagccggcggcgtccacgtctgcgaagattcccactattctcgaaaagatttgcgcacagcgccagaaggatgtcgatcaggcgaaggctactcctgggaccacgccagaagacctcaagaccctgctgtcaatgaaactctcgccgccacagatctcattccccgaccgcctcaaggctgctgaggtcaagcccgcgttgatggcagaagtcaagcgcgctagtccttccaaaggcccaatcgcgatgaacggcaacgctgctcagcaggccctcacttacgcacttgcaggcgcctcggtaatttcggtccttaccgagcccacttggttcaagggctcgctgctggacatgaggctggctcgccaggccatcgacaaccttccccatcgccctgccattctccgcaaggacttcatcattgacgagtaccagattgacgaagctcgtctgcacggtgccgacactgtcttgctcatcgttgccacacttactgagaagcgtctggaggagctgtacgcgtactcacagtctcttggcatggagcctctggttgaggtgaacaatgccaaggagatggagatcgcgctcaagctcggtgccaaagtcatcggggtcaacaaccgcaacctgcacgacttcaacgtcgacatgggtacgacctcgcgcctggcggagatggtccgcgagcgcgacgtcatactgtgcgcactcagcggcatcaaggacgcccaggatgtcaacacatacgttgaacagggcgtcggtgctgttctcgtcggcgagtcgcttatgcgtgcgcccgacactcgtgcattcatccgtcagctgctcagcatccccgagtctgaggctaagggaaaaggcaaggagaccacgcctctgtcaagatcttgtggcatacgcacggaggaagaagctctcgccgcggcagaggctggcgctgacatgctcggcctcatgttcgtccccaagagcaagcgctacgtctcccttgagaaggcacagcagatcgcggctgctatccactcgcgccgtctctccaagcccgttttgacgtcaggaaagacactggagaatgagccttggttcaccgcgcagcaaccgccttcgcgcagttttgtctggcgattcgccgcgcgcccgctcttggtcggtgtcttccagaaccagccgctctccgtgtacctgacgccgtgcgtcccgcagctcgacctcgtgcagctacacggctccgagcctgccgagctcgcgaaacactacccggtgcccgtgattcgtgtcttccacgtgagcgcggatgggcgtgggcttgcggacctcgcgcggccgggcctccaccagttcgcgcttctcgacgcggtgctccccggcagcgcgagtgcgctcagcggcggcaccggcacgaccgtcgactgggcgctggcgcgcgacgcagtgcgtagcggcgaggtacgcgttgcgcgctcagcgcagggcgacggacccgtgctcagcctaaacagcagcgaggcactgtacccgatgccggtcatcctcgctggtggccctcagcccgagaacgtctcggaggctgttgatacggtggcgccctgggcagtggatgtgagcgggggcgtggagctcgaggatggctcaggcaaggaccttgagaaggttcgggccttcgtgaaggcggcaaaaaagctctaa

SEQ ID NO: 90090 - protein, 788 aa, Phanerochaete chrysosporium
MSLPPHLCVPIDILMIDNFDSFTWNLYQSLCLLGADVTVIRNDAIPRSAIPQLRIKRLIVSPGPGHPQTDSGISREAIKYFAGKVPIMGVCMGLECVVDVFGGQIAYAGEIMHGKVSGIRHDARGCFKDLPQGIQSTRYHSLSAGVKTLPDELAVTAVTEHERVIMGIRHRKYTVEAVQYHPESILSESGDDLLRHFMKLKGGTWEENPEFRVLDPSLPAFEIGSQPAASTSAKIPTILEKICAQRQKDVDQAKATPGTTPEDLKTLLSMKLSPPQISFPDRLKAAEVKPALMAEVKRASPSKGPIAMNGNAAQQALTYALAGASVISVLTEPTWFKGSLLDMRLARQAIDNLPHRPAILRKDFIIDEYQIDEARLHGADTVLLIVATLTEKRLEELYAYSQSLGMEPLVEVNNAKEMEIALKLGAKVIGVNNRNLHDFNVDMGTTSRLAEMVRERDVILCALSGIKDAQDVNTYVEQGVGAVLVGESLMRAPDTRAFIRQLLSIPESEAKGKGKETTPLSRSCGIRTEEEALAAAEAGADMLGLMFVPKSKRYVSLEKAQQIAAAIHSRRLSKPVLTSGKTLENEPWFTAQQPPSRSFVWRFAARPLLVGVFQNQPLSVYLTPCVPQLDLVQLHGSEPAELAKHYPVPVIRVFHVSADGRGLADLARPGLHQFALLDAVLPGSASALSGGTGTTVDWALARDAVRSGEVRVARSAQGDGPVLSLNSSEALYPMPVILAGGPQPENVSEAVDTVAPWAVDVSGGVELEDGSGKDLEKVRAFVKAAKKL

SEQ ID NO: 90091 - DNA, 2280 bp, Schizosaccharomyces pombe; identical to SEQ ID NO: 76227
  CDS (1)..(2280)

SEQ ID NO: 90092 - protein, 759 aa, Schizosaccharomyces pombe; identical to SEQ ID NO: 76228

SEQ ID NO: 90093 - DNA, 807 bp, Zea mays
  CDS (1)..(807)
atgctgttggcaagctcaacaagacgctatgagcaatttcctttagcacgaaacaatggacttccaagattttcaagagtaaaaatgtcatgcttgggaacaaaccaaagtaaccatcattctgataccgtcagatcttcatcccctagttgtggagataccagaaagatccaccctgtagtcaaaatgtgtggcatcacatcagctagagatgcagaaatggctgtaaaagcaggagctgagcttataggcatgatactatggcccaactctaaacgctctgtctcgttattggaggcaaaagaaatatcaagagttgcgcaatcttatggcgctgaatcagttggtgtctttgtggatgataatgaagagagaattctacgggtgtctgattcatgtgaccttaactttgtccagcttcatggtgatgaatctcgtgcattggttcatactctttcaaagaataatcgtatcatttatgtactaaatgctgatgacgatggaaaactaatcaacattcctgatattgaatacgaacttgattggtacttagtggacagtgcaaagggcggaagtggaaagggattcaactggcagaagttccagatgccatctgtcaaaagcaagaatggatggctattagctggagggcttcatgcagataatgtttgtgaagccttttctgctctgaaaccagatggtgttgatgttagcagcggcatatgtggtcgagatggtatccgaaaagatgcagacaggattaattccttcataagtaatgtgaaatccctaaatttgcacaggtga

SEQ ID NO: 90094 - protein, 268 aa, Zea mays
MLLASSTRRYEQFPLARNNGLPRFSRVKMSCLGTNQSNHHSDTVRSSSPSCGDTRKIHPVVKMCGITSARDAEMAVKAGAELIGMILWPNSKRSVSLLEAKEISRVAQSYGAESVGVFVDDNEERILRVSDSCDLNFVQLHGDESRALVHTLSKNNRIIYVLNADDDGKLINIPDIEYELDWYLVDSAKGGSGKGFNWQKFQMPSVKSKNGWLLAGGLHADNVCEAFSALKPDGVDVSSGICGRDGIRKDADRINSFISNVKSLNLHR

SEQ ID NO: 90095 - DNA, 807 bp, Zea mays
  CDS (1)..(807)
atgctgttggcaagctcaacaagacgctatgagcaatttcctttagcacgaaacaatggacttccaagattttcaagagtaaaaatgtcatgcttgggaacaaaccaaagtaaccatcattctgataccgtcagatcttcatcccctagttgtggagataccagaaaggtccaccctgtagtcaaaatgtgtggcatcacatcagctagagatgcagaaatggctgtaaaagcaggagctgagcttataggcatgatactatggcccaactctaaacgctctgtctcgttattggaggcaaaagaaatatcaagagttgtgcaatcttatggcgctgaatcagttggtgtctttgtggatgataatgaagagagaattctacgggtgtctgattcatgtgaccttaactttgtccagcttcatggtgatgaatctcgtgcattggttcatactctttcaaagaataatcgtatcatttatgtactaaatgctgatgacgatggaaaactaatcaacattcctgatattgaatacgaacttgattggtacttagtggacagtgcaaagggcggaagtggaaagggattcaactggcagaagttccagatgccatctgtcaaaagcaagaatggatggctattagctggagggcttcatgcagataatgtttgtgaagccttttctgctctgaaaccagatggtgttgatgttagcagcggcatatgtggtcgagatggtatccgaaaagatgcagacaggattaattccttcataagtaatgtgaaatccctaaatttcctatcgtaa

SEQ ID NO: 90096 - protein, 268 aa, Zea mays
MLLASSTRRYEQFPLARNNGLPRFSRVKMSCLGTNQSNHHSDTVRSSSPSCGDTRKVHPVVKMCGITSARDAEMAVKAGAELIGMILWPNSKRSVSLLEAKEISRVVQSYGAESVGVFVDDNEERILRVSDSCDLNFVQLHGDESRALVHTLSKNNRIIYVLNADDDGKLINIPDIEYELDWYLVDSAKGGSGKGFNWQKFQMPSVKSKNGWLLAGGLHADNVCEAFSALKPDGVDVSSGICGRDGIRKDADRINSFISNVKSLNFLS

SEQ ID NO: 90097 - DNA, 807 bp, Zea mays
  CDS (1)..(807)
atgctgttggcaagctcaacaagacgctatgagcaatttcctttagcacgaaacaatggacttccaagattttcaagagtaaaaatgtcatgcttgggaacaaaccaaagtaaccatcattctgataccgtcagatcttcatcccctagttgtggagataccagaaaggtccaccctgtagtcaaaatgtgtggcatcacatcagctagagatgcagaaatggctgtaaaagcaggagctgagcttataggcatgatactatggcccaactctaaacgctctgtctcgttattggaggcaaaagaaatatcaagagttgtgcaatcttatggcgctgaatcagttggtgtctttgtggatgataatgaagagacaattctacgagtgtctgattcatgtgaccttaactttgtccagcttcatggtgatgaatctcgtgcattggttcatactctttcaaagaataatcgtatcgtttatgtactaaatgctgatgacgatggaaaactaatcaacattcctgatattgaatacgaacttgattggtacttagtggacagtgcaaagggcggaagtggaaagggattcaactggcagaagttccagatgccatctgtcaaaagcaagaatggatggctattagctggagggcttcatgcagataatgtttgtgaagccttttctgctctgaaaccagatggtgttgatgttagcagcggcatatgtggtcgagatggtatccgaaaagatgcagacaggattaattccttcataagtaatgtgaaatccctaaattttctatcgtaa

SEQ ID NO: 90098 - protein, 268 aa, Zea mays
MLLASSTRRYEQFPLARNNGLPRFSRVKMSCLGTNQSNHHSDTVRSSSPSCGDTRKVHPVVKMCGITSARDAEMAVKAGAELIGMILWPNSKRSVSLLEAKEISRVVQSYGAESVGVFVDDNEETILRVSDSCDLNFVQLHGDESRALVHTLSKNNRIVYVLNADDDGKLINIPDIEYELDWYLVDSAKGGSGKGFNWQKFQMPSVKSKNGWLLAGGLHADNVCEAFSALKPDGVDVSSGICGRDGIRKDADRINSFISNVKSLNFLS

SEQ ID NO: 90099 - DNA, 26 bp, Artificial sequence
  primer
atgtctgttattaatttcacaggtag

SEQ ID NO: 90100 - DNA, 27 bp, Artificial sequence
  primer
ctatttcttagcatttttgacgaaatt

SEQ ID NO: 90101 - protein, 324 aa, Artificial sequence
  consensus sequence
  Variant (2)..(2): Xaa in position 2 is any amino acid
  Variant (5)..(12): Xaa in position 5 to 12 is any amino acid
  Variant (13)..(13): Xaa in position 13 is any or no amino acid
  Variant (15)..(17): Xaa in position 15 to 17 is any amino acid
  Variant (20)..(22): Xaa in position 20 to 22 is any amino acid
  Variant (24)..(30): Xaa in position 24 to 30 is any amino acid
  Variant (31)..(31): Xaa in position 31 is any or no amino acid
  Variant (33)..(37): Xaa in position 33 to 37 is any amino acid
  Variant (38)..(38): Xaa in position 38 is any or no amino acid
  Variant (40)..(50): Xaa in position 40 to 50 is any amino acid
  Variant (51)..(96): Xaa in position 51 to 96 is any or no amino acid
  Variant (99)..(99): Xaa in position 99 is any amino acid
  Variant (101)..(119): Xaa in position 101 to 119 is any amino acid
  Variant (120)..(120): Xaa in position 120 is any or no amino acid
  Variant (125)..(158): Xaa in position 125 to 158 is any amino acid
  Variant (159)..(186): Xaa in position 159 to 186 is any or no amino acid
  Variant (188)..(188): Xaa in position 188 is any amino acid
  Variant (190)..(191): Xaa in position 190 to 191 is any amino acid
  Variant (192)..(200): Xaa in position 192 to 200 is any or no amino acid
  Variant (203)..(203): Xaa in position 203 is any amino acid
  Variant (205)..(208): Xaa in position 205 to 208 is any amino acid
  Variant (210)..(219): Xaa in position 210 to 219 is any amino acid
  Variant (220)..(274): Xaa in position 220 to 274 is any or no amino acid
  Variant (280)..(282): Xaa in position 280 to 282 is any amino acid
  Variant (285)..(285): Xaa in position 285 is any amino acid
  Variant (286)..(286): Xaa in position 286 is any or no amino acid
  Variant (288)..(294): Xaa in position 288 to 294 is any amino acid
  Variant (295)..(300): Xaa in position 295 to 300 is any or no amino acid
  Variant (305)..(305): Xaa in position 305 is any amino acid
  Variant (309)..(310): Xaa in position 309 to 310 is any amino acid
  Variant (311)..(312): Xaa in position 311 to 312 is any or no amino acid
  Variant (314)..(314): Xaa in position 314 is any amino acid
  Variant (317)..(318): Xaa in position 317 to 318 is any amino acid
  Variant (320)..(322): Xaa in position 320 to 322 is any amino acid
  Variant (323)..(323): Xaa in position 323 is any or no amino acid
KXCGXXXXXXXXXAXXXGAXXXGXXXXXXXXRXXXXXXAXXXXXXXXXXXXXXXXXXXXXXXXXXXXXXXXXXXXXXXXXXXXXXXXXXXXXXXXXVGXFXXXXXXXXXXXXXXXXXXXXQLHGXXXXXXXXXXXXXXXXXXXXXXXXXXXXXXXXXXXXXXXXXXXXXXXXXXXXXXXXXXXXXXLXDXXXXXXXXXXXGGXGXXXXWXXXXXXXXXXXXXXXXXXXXXXXXXXXXXXXXXXXXXXXXXXXXXXXXXXXXXXXXXXXXXXXXXLAGGLXXXNVXXAXXXXXXXXXXXXXVDVSXGVEXXXXGXKDXXKXXXXF

SEQ ID NO: 90102 - protein, 29 aa, Artificial sequence
  protein pattern
  Variant (2)..(2): Xaa in position 2 is any or no amino acid
  Variant (6)..(6): Xaa in position 6 is Ile, Leu, Pro or Val
  Variant (7)..(9): Xaa in position 7 to 9 is any amino acid
  Variant (11)..(20): Xaa in position 11 to 20 is any amino acid
  Variant (21)..(23): Xaa in position 21 to 23 is any or no amino acid
  Variant (25)..(25): Xaa in position 25 is any amino acid
  Variant (26)..(26): Xaa in position 26 is Ala, Asn, Ser or Val
  Variant (27)..(27): Xaa in position 27 is any amino acid
  Variant (29)..(29): Xaa in position 29 is Ile or Val
LXAGGXXXXNXXXXXXXXXXXXXDXXXGX

SEQ ID NO: 90103 - DNA, 693 bp, Saccharomyces cerevisiae
  CDS (1)..(693)
atggaagataaattagacagatactacacaaatgtgctttcaaatgctgaaaaggataaacacacaactgtcgatagcgatgacaaaagtagtggcgaggaaaatttagatgaactacttaatgaattggatagagaattagacgaggatcatgaatttttgagtgcttatcggtcggagaggctacaacaaatatcagatcatttaaaacaggtcaagaagaatgttgaggatgacggatacggtagattgcagtgcattgataacgaggcagatgctatccaaatatgtacaaagactactatggtggtcatacattttgaattagaaacattcggtaagtgccagtatatgaatgaaaaactggaaaacttggcaaagaggtatctaaccacgagatttattaaagtaaacgtccaaacatgtccatttttggttaataaactgaatattaaagtacttccgtttgtagttggatacaagaatggcctagaaaaagttcgctacgtaggatttagtaaactgggaaatgaccctaatgggtttgatattaggaggctagagcaatctttagcccattcaggtgttatagaagacacattcgaaataagaaagcattcatctgtgaatacggaacgcttcgcttctacaaatcatgatagaagtgaaagtgatagtgatttagatatataa

SEQ ID NO: 90104 - protein, 230 aa, Saccharomyces cerevisiae
MEDKLDRYYTNVLSNAEKDKHTTVDSDDKSSGEENLDELLNELDRELDEDHEFLSAYRSERLQQISDHLKQVKKNVEDDGYGRLQCIDNEADAIQICTKTTMVVIHFELETFGKCQYMNEKLENLAKRYLTTRFIKVNVQTCPFLVNKLNIKVLPFVVGYKNGLEKVRYVGFSKLGNDPNGFDIRRLEQSLAHSGVIEDTFEIRKHSSVNTERFASTNHDRSESDSDLDI

SEQ ID NO: 90105 - DNA, 693 bp, Oryza sativa (japonica cultivar-group)
  CDS (1)..(693)
atggatcccgacgcggtgaagtcgacgctctccaacctggccttcggcaacgtcatggccgccgccgcccgcgactaccagaaggaaattgtagctaaagagaaagcccaagcagcaagtgcaagccatgatgaagttgatcttgacgaattattggatgacccagagcttgagaagttgcatgcggagagaattgctgctctcaagaaagaggtcgagaagcgtgaagtgctaaaaaggcaaggtcatggtgaatatagggagataactgaaggggacttcctaggagaggtcactggcagtgaaaaagtcatctgccatttctaccaccgtgaattttaccgttgcaagatcatggataagcatttgaaggcccttgcaccaatctatttgggaactaaattcatcaagcttgatgctgaaaatgctccgttctttgtcacgaaactgggaatcaaaacattgccctgtgtgatactgttcaagaagggcattgctgctgatcggttaattgggtttcaagacctcggcagcaaagatgatttttcaacaagagcattggaaaatatactcaagatgaaaggtataattgacgaaaagaagaaggatgaggatgatgaagatgatgaaacctatatgtcaatgaacaggagggtcagatcttcaaccgctcaagattctgattctgattga

SEQ ID NO: 90106 - protein, 230 aa, Oryza sativa (japonica cultivar-group)
MDPDAVKSTLSNLAFGNVMAAAARDYQKEIVAKEKAQAASASHDEVDLDELLDDPELEKLHAERIAALKKEVEKREVLKRQGHGEYREITEGDFLGEVTGSEKVICHFYHREFYRCKIMDKHLKALAPIYLGTKFIKLDAENAPFFVTKLGIKTLPCVILFKKGIAADRLIGFQDLGSKDDFSTRALENILKMKGIIDEKKKDEDDEDDETYMSMNRRVRSSTAQDSDSD

SEQ ID NO: 90107 - DNA, 693 bp, Arabidopsis thaliana
  CDS (1)..(693)
atggatccagatgcagtcaaatcgactctctcgaatctagcatttggaaatgtaatggcggctgctgcaagaaattatcaaaaggaagttcttgcaaatgagaaggcgcaaggatcaaatcctgttaatgaagaggttgatcttgatgaacttatggatgatccagagctagaaagattgcacgcagataggattgcagcactaaagagagaggttgagaagagagaatcgtttaaaagacaagggcatggtgaatatcgagaggtgagtgaaggagatttcttgggtgaagtcaccaggagtgagaaagtgatatgtcatttctaccataaggaattttaccggtgcaagattatggacaagcatctgaaaactcttgcacctagacatgtggacacaaagttcattaaagtggacgcagagaatgctcctttctttgtcacgaagcttgcaataaagactttgccttgcgttgtgcttttcagcaagggagttgcgatggataggctagttgggttccaggatctgggaaccaaggacgatttcacaacgaataaactagagaacgttcttcttaaaaagggaatgctcagcaagaagaagaaagaggaagatgatgaagacgccgaatatcaagagagcatacggaggtctgttaggtcttcagagaatctggactctgattctgactga

SEQ ID NO: 90108 - protein, 230 aa, Arabidopsis thaliana
MDPDAVKSTLSNLAFGNVMAAAARNYQKEVLANEKAQGSNPVNEEVDLDELMDDPELERLHADRIAALKREVEKRESFKRQGHGEYREVSEGDFLGEVTRSEKVICHFYHKEFYRCKIMDKHLKTLAPRHVDTKFIKVDAENAPFFVTKLAIKTLPCVVLFSKGVAMDRLVGFQDLGTKDDFTTNKLENVLLKKGMLSKKKKEEDDEDAEYQESIRRSVRSSENLDSDSD

SEQ ID NO: 90109 - DNA, 651 bp, Drosophila melanogaster
  CDS (1)..(651)
atggccaacatcctggagaaccaactgttcacggccgccaagaccatcgagcagcagctggaccagcagctcgaccgcctggacaacctcgattcggatgacctaaaggtcctgcgggagcagcggctccgcgaaatgaaggacctgaacaacaagaagcaggagtggctcagaaacggtcatggcacctacaccgagctggccgacgaaaaagagttcttcgagatgtcgaaaaagtcgcccaacattgtttgccacttttaccgcgacagcaccgagcgctgcaagatcgtggacatgcacctgaagatcctcgcggccaagcacgtggaggccaagttttgcaaggtgaatgccgaaaagactccattcctcacccagcgactgcgcatcaaggtgatacccaccatcgccctggtgaaggacagcaagaccaaggacttcattgtcggattcaccgatctgggcaactgcgacgacttcgccaccgaaatgctggagtggcgcatcgcccactcgggggccattgactacaagggcgatctgatgcagccaccagatgtgaaacgcaaaccattcatcaaccgcccacagaagacaatacgtggaggctacgactcggatgactccgatatagatctggatgactaa

SEQ ID NO: 90110 - protein, 216 aa, Drosophila melanogaster
MANILENQLFTAAKTIEQQLDQQLDRLDNLDSDDLKVLREQRLREMKDLNNKKQEWLRNGHGTYTELADEKEFFEMSKKSPNIVCHFYRDSTERCKIVDMHLKILAAKHVEAKFCKVNAEKTPFLTQRLRIKVIPTIALVKDSKTKDFIVGFTDLGNCDDFATEMLEWRIAHSGAIDYKGDLMQPPDVKRKPFINRPQKTIRGGYDSDDSDIDLDD

SEQ ID NO: 90111 - DNA, 675 bp, Strongylocentrotus purpuratus
  CDS (1)..(675)
atggaccaggttcttcaacagcagctttccctggtagcagagattatggagggtcaggtggatgcagagatccatcgccttgataatctagatgaagatgaacttgatgtcctacgtcagaggagattggtggctttgaagaagcagcgggaaaaggaggatgagtggagaagtataggacatgggcaataccaggagatccctgttgagaaggacttcttcgctgaatgtaagaagagcaccaacgtggtgtgtcacttctaccgtgaaagcgctgaacgttgtaggatagttgacatgcaccttcacagactggctcctaaacacatggagacacgcttcttgaagatcaatgcagagaaatgcccattcctggctgagaggctgaggatagtcgtcataccgaccatagccctcatcaaggatggaaagagcaaggattacattgtagggtttgatgatatgggaggtagagatgacttcccgactgagatgctagaatggagactgggttgtgccgaggtcatcaattacagcggtagtcttaccgacccacctacaggaggtaagggagccaagcctacatccaaggcatctgatctccttgggaggagaactcagaagatcatcaaaggaggcagatacaatgattcggattctgatctagaggactga

SEQ ID NO: 90112 - protein, 224 aa, Strongylocentrotus purpuratus
MDQVLQQQLSLVAEIMEGQVDAEIHRLDNLDEDELDVLRQRRLVALKKQREKEDEWRSIGHGQYQEIPVEKDFFAECKKSTNVVCHFYRESAERCRIVDMHLHRLAPKHMETRFLKINAEKCPFLAERLRIVVIPTIALIKDGKSKDYIVGFDDMGGRDDFPTEMLEWRLGCAEVINYSGSLTDPPTGGKGAKPTSKASDLLGRRTQKIIKGGRYNDSDSDLED

SEQ ID NO: 90113 - DNA, 708 bp, Nasonia vitripennis
  CDS (1)..(708)
atgcaagatccaaatgaagataccgagtggaatgatatccttcgagcaaagggaatcattcctgaaaagaagaaagatgccgaagtcacagaagatcagattgtgcaaatgttggaaaacacgatcgaccaaaggactggaagagtacaaacaaacttggatgacaagactcttgatgaactcgatgagttagaggatgaagaggacgaaagagttcttttggagtataggcgcaagaggatggcagaatttcaagaacttgcatcaaaagcaaagtatggtgatgttaaggaaatatctgcacaggactacgttcaagaagttaacaaagctggagaggatgtttgggttgttctgcatttatacaaatcaggtatacctttatgtacacttgtgaatcaacacttagcagctctagcaagaaaattcccaacaacaaagtttttaaaaagtatctctactacgtgcattcctaacttccctgatgccaatcttccaacgatatttatctacaaagatggaagcatggagaaacaatatgttgggcctattgaactgagagggatgaagctcacagaagaagaattagaatggatgctgggttcagttggtgctgtaccatccaagatcaaagacgatcctaaaccaaaagtgcgagatgtgatgtttgccaaactggctgctgaaaatgatgacaatgattggtaa

SEQ ID NO: 90114 - protein, 235 aa, Nasonia vitripennis
MQDPNEDTEWNDILRAKGIIPEKKKDAEVTEDQIVQMLENTIDQRTGRVQTNLDDKTLDELDELEDEEDERVLLEYRRKRMAEFQELASKAKYGDVKEISAQDYVQEVNKAGEDVWVVLHLYKSGIPLCTLVNQHLAALARKFPTTKFLKSISTTCIPNFPDANLPTIFIYKDGSMEKQYVGPIELRGMKLTEEELEWMLGSVGAVPSKIKDDPKPKVRDVMFAKLAAENDDNDW

SEQ ID NO: 90115 - DNA, 648 bp, Anopheles gambiae str. PEST
  CDS (1)..(648)
atggagcagctcatacagaaccaaatgatctcggccgccgtccagctggagaagcatctggacagtgagctggaccggctggagacgctgaacgcggacgatctggacaagctgcgggaacagcgcatccagcagatgaagaaacaggcccagcagcggcaggagtggaaaaacaacggccacggcgagtacgcggagctggcggacgagaaggagttctttgcgatatcgaaaaagtcgcccaacatcgtgtgccacttctatcgcgactctacgccccgctgccggatcgtcgatatgcacctgaaggtgctggccaccaagcatctggaggcgcggttttgcaaggtgaatgcggaacggtgccccttcctcacagagcgcctccggatcaaggtgataccgagcatcgcactgataaaggacagcaaaacgaaggactacatcgtcggctttaccgatctgggcaactgtgacgacttcagcaccgagatgctcgagtggcgcattgcccagtccggtgcgatcgagtacagtggcgatctcttaactccaccggatgtgaaaaagcaaaagaaaccgaccaacatgaagacgatccgtggtgggtacgattcggatgattctgacattgacttcgatgattaa

SEQ ID NO: 90116 - protein, 215 aa, Anopheles gambiae str. PEST
MEQLIQNQMISAAVQLEKHLDSELDRLETLNADDLDKLREQRIQQMKKQAQQRQEWKNNGHGEYAELADEKEFFAISKKSPNIVCHFYRDSTPRCRIVDMHLKVLATKHLEARFCKVNAERCPFLTERLRIKVIPSIALIKDSKTKDYIVGFTDLGNCDDFSTEMLEWRIAQSGAIEYSGDLLTPPDVKKQKKPTNMKTIRGGYDSDDSDIDFDD

SEQ ID NO: 90117 - DNA, 624 bp, Candida glabrata CBS 138
  CDS (1)..(624)
atgtcaacgagtgatgaaagcataaatgaattgcttgaagaattagaacaagaggatgaaaggaatgacgatttcatagataggtatagagctcagcgaatgcaggagatgcatgattactttggctcaattcagcggaagaaggaggaaggatttggaaaggttaactacatggataatgaatcacaggtaatgaaaattacaactagcaccgccagagtggtaatacacttcgaacttgagacattcaaaaaatgccaatatatggacgagaaactggaagagatagcaaggaattatttaagtactaagtttatcagtatcagtgttgaaaatgctccctttttagtggaaaagttaggaatcaaagtattaccatttgtgatctgctacttgaacggtaatgaatgtgagagaattattgggtttaataaaatgggtaatgatccaaatggtttcagaacatctaaattggaaggtgttttgatgagagcaggtattctcgaaaggcggcctcaagatgccgatagaataagtaacctaagaatagccaacaagaataccgatcttgtatcaaaattgagagaaaagaacgattctgatacctctgacttggatatctga

SEQ ID NO: 90118 - protein, 207 aa, Candida glabrata CBS 138
MSTSDESINELLEELEQEDERNDDFIDRYRAQRMQEMHDYFGSIQRKKEEGFGKVNYMDNESQVMKITTSTARVVIHFELETFKKCQYMDEKLEEIARNYLSTKFISISVENAPFLVEKLGIKVLPFVICYLNGNECERIIGFNKMGNDPNGFRTSKLEGVLMRAGILERRPQDADRISNLRIANKNTDLVSKLREKNDSDTSDLDI

SEQ ID NO: 90119 - DNA, 666 bp, Kluyveromyces lactis NRRL Y-1140
  CDS (1)..(666)
atggcagtaccaaaggaaaatattacaacagcacatccactaactgcagagataacgactaaagatgaagatgacaaatcccttgattcccttctagagcaattagacgaagaagaaagcgagttcttgtcacagtatcgtgatcaaaggctggaagaactcagtgaacacatgaaaaagatagagaaaaacgtcgaatctggagactacggatccgtgcagacattcctagacgaacaacggttgattcaagtaactgcatctgcagaaagatgtgtagtacatttttttgtagattcattccgaaaatgtcaagttatggacagtaagctacaagtaatggccgaatcacatttgtccacaagattcttcaggatatccgtcgctgattgtccatttttggtggaaaaattatcgttaaaggtactgcctgttgtaattgcataccaaaatggaaaagagcaggataggctgattggatttgcaaagctcggcaacaatgcgaacgatttctctatagaccatcttgaaaaatggcttcaaagatctggtgtagttccaatgagagacacaaagttgacaataatatctaacagaagtaaacaaatccgatcgaaaaacaaaaccaatagtgatcaggaagactctggttctgattgggattaa

SEQ ID NO: 90120 - protein, 221 aa, Kluyveromyces lactis NRRL Y-1140
MAVPKENITTAHPLTAEITTKDEDDKSLDSLLEQLDEEESEFLSQYRDQRLEELSEHMKKIEKNVESGDYGSVQTFLDEQRLIQVTASAERCVVHFFVDSFRKCQVMDSKLQVMAESHLSTRFFRISVADCPFLVEKLSLKVLPVVIAYQNGKEQDRLIGFAKLGNNANDFSIDHLEKWLQRSGVVPMRDTKLTIISNRSKQIRSKNKTNSDQEDSGSDWD

SEQ ID NO: 90121 - DNA, 654 bp, Debaryomyces hansenii CBS767
  CDS (1)..(654)
atggaccaaaaacaatccgagttagtcgaaaagtatcaagagtctaagcttcgtaagcaaataaaagatgatgaggttcatgaatctgaaagcgacgatgatttattggagttgttagaggatgatgaagcgatatcaaaatatagagaggcaaggatccaacaactatcagcggaatttaaaagaattgacgacgaggagactgaaagaaacgggtccttgggaagcgtaatagagattagtgacgagaaacagataatggaaatagtaactaactccgaattaaccttagttcatttttatcagcctgagttcgacaaatgcaaaatcatgaacagcagattaacagtcattgctgagaagtatttaaacttgaaagttctcacaattaaagctgaaagtgcaccatttttagtaacaaaattgaaaattaaagtactaccatttgttgtgatttacaagaacggcaaggaaatcaatagaatagtggggtttgaaaaattgggcaatgaccccaataacatatctattgaatctttagaacacttcttgtatgccaatggaataaccaataggcgaatagtaaattatgggtctatacagagccgtaccaaaccaataaacgaagattctgatgatggtttagatgtatga

SEQ ID NO: 90122 - protein, 217 aa, Debaryomyces hansenii CBS767
MDQKQSELVEKYQESKLRKQIKDDEVHESESDDDLLELLEDDEAISKYREARIQQLSAEFKRIDDEETERNGSLGSVIEISDEKQIMEIVTNSELTLVHFYQPEFDKCKIMNSRLTVIAEKYLNLKVLTIKAESAPFLVTKLKIKVLPFVVIYKNGKEINRIVGFEKLGNDPNNISIESLEHFLYANGITNRRIVNYGSIQSRTKPINEDSDDGLDV

SEQ ID NO: 90123 - DNA, 648 bp, Apis mellifera
  CDS (1)..(648)
atggaaactattttacaaaaaaaaataatagaagcgactcattgtgttgagaaacaattagatgctgagatagaaaaattagataatttggatattagtgattttgaaaaattgcgtgaacaacgttttaagaaattaaaattacttcaacaacaaaaacaaaattggctatcattgggtcatggagaatattcagaattatatgatgaaaaagaattttttgaaatatcaaaaaaatcggaaaacattgtctgtttattttataaagatgattcaccaagatgcaaaatagtagattatcactttaaaattcttgcaaaaaaacatatagaagcaaagttttgtaaattgaatgtaatgcaatgtccatttttaactgaacgcttaaggatcaaaattattcctacaattgctcttatcgttaatggtaaaactaaagattatattgtgggatttactgatttaggaaatcgtgatgatttttcaactgaaatgttagaatatagaatttcactttctggtgcaattacttttgaagaaaacatttcttcagaaaataataaaaaatcatggttgtctcatatttcaaaacctaaaactattaaaggacctaatgattcaaattctgatgattcagatgaaaattaa

SEQ ID NO: 90124 - protein, 215 aa, Apis mellifera
METILQKKIIEATHCVEKQLDAEIEKLDNLDISDFEKLREQRFKKLKLLQQQKQNWLSLGHGEYSELYDEKEFFEISKKSENIVCLFYKDDSPRCKIVDYHFKILAKKHIEAKFCKLNVMQCPFLTERLRIKIIPTIALIVNGKTKDYIVGFTDLGNRDDFSTEMLEYRISLSGAITFEENISSENNKKSWLSHISKPKTIKGPNDSNSDDSDEN

SEQ ID NO: 90125 - DNA, 699 bp, Aspergillus nidulans FGSC A4
  CDS (1)..(699)
atgcctcaagaaaccccgccacccatccaacaagaaacagacaagcacgatctctccgacgacgacgacgcccttttcaaagctctagaggaagaagacaacaccggttaccgcgcccaccgccttgaacaattaagcgcagaatttgcaacggcgcagaaatctagcagtcaaaagaccaccctcgttgaagactcgctctacccaactctgaaaggcgatcaagtgcttctagactacacaactcagacgcaacgatgcgtaattcacttcgcgcatccagaatttgtgcgctgcgccaccatggataaccatatccgggcacttgcggcgcgacatcaggatgttcggttcgcaagggttgacgtgcgcgaaacgccctttgtcgtcgagaagttgaaaatcagaatcctcccctgcgtaattgggtttttggatggagtggccgtggagagagttcttggcttcgaaggtttgggaccagggggaactgctggactggaaggatttaataccgctagtctggagaagaggttgctaggaaagggtattctgtcccaggcgagattcagcgccgatgacgaggaggaatcagatagggacagtgatgaggacaacgatgcaaggcagggcagacgcggtattcggactgggattacgcgagcctacaaggacgacgatgacagcgactgggactga

SEQ ID NO: 90126 - protein, 232 aa, Aspergillus nidulans FGSC A4
MPQETPPPIQQETDKHDLSDDDDALFKALEEEDNTGYRAHRLEQLSAEFATAQKSSSQKTTLVEDSLYPTLKGDQVLLDYTTQTQRCVIHFAHPEFVRCATMDNHIRALAARHQDVRFARVDVRETPFVVEKLKIRILPCVIGFLDGVAVERVLGFEGLGPGGTAGLEGFNTASLEKRLLGKGILSQARFSADDEEESDRDSDEDNDARQGRRGIRTGITRAYKDDDDSDWD

SEQ ID NO: 90127 - DNA, 636 bp, Strongylocentrotus purpuratus
  CDS (1)..(636)
atggatacagacgccggtgaagcaagtggatcgggatatgttggaagagatacggaaaaggattgtgatgatggatttgttgatgaagacgaactctttgatgagcttgagaatgaggacattccagcaaatatccgagaagccaggataggtcagatgaagagagaagctgcagctgccagggcaatggaagacaaggggcttggtctttatactgagatagaaaaggaagaagatttactgaagatgacgaccactattcctaaagtcatcgttcacttctacaaaacagacttcagaagatgttgcattatggataaacatttaaaaatactagcagagcaatatcgagacgtcaagttcagcaaggtgtgtgtggacatagttcctttcttcgtcacgagactccaaattcaggtcttaccagctgtactcctgtttattgatggagttgttgcagatagggttgtgggttttgatgagctgggaaacactgataacttcacaacagatacccttgaaaataggatagcaaaatcagaaatcatcaagcctctgaacgccgctggatccgctaataaaaccatctttgggttcgacaggagaagagatgacagcagtgatgaagactattga

SEQ ID NO: 90128 - protein, 211 aa, Strongylocentrotus purpuratus
MDTDAGEASGSGYVGRDTEKDCDDGFVDEDELFDELENEDIPANIREARIGQMKREAAAARAMEDKGLGLYTEIEKEEDLLKMTTTIPKVIVHFYKTDFRRCCIMDKHLKILAEQYRDVKFSKVCVDIVPFFVTRLQIQVLPAVLLFIDGVVADRVVGFDELGNTDNFTTDTLENRIAKSEIIKPLNAAGSANKTIFGFDRRRDDSSDEDY

SEQ ID NO: 90129 - DNA, 717 bp, Aspergillus oryzae
  CDS (1)..(717)
atgatccgaaatattgagcccaaacactccctaagagaccaagatgatgggacggacgacgacgatttgttgaaggccttggagaacgaagacgactctgcatatcgagcccaacgtatcgaacaactcaacgccgagctagcatccgcccaaaacaaccggtcagtggcccctggccagaccacaatcacccaagatagcatatatccaactcttgaaaatgaccaaatattgctcagtttcacaacggatacccatcggtgcgtgatccattttgcacaccctgatttctcacgctgtggcaccatggatgaacatatgcgggctttagcaacacggcattacgatgtgcgctttgcccgtgtcgatgttagggacattccgttcgtggtggaaaagctgaagatacgcgttctcccttgcgtgatcgggtttaaagatgggattgctgctgagcgtgtggttggctttgaaggtcttgctttgggcgggcgtgatgggaccgacagcttcagcacggcaactcttgaaaagaggctattatggaaaggagttctagtgcaggcaaagattaaagatggtaatgatgattccgatatgtctgatgcagatgacgaggatgaggacgatggcagacgacgaattcatgggggaggggccatccgcggcgggggagcacggtacaacagggatgatcacgatgacgattgggattga

SEQ ID NO: 90130 - protein, 238 aa, Aspergillus oryzae
MIRNIEPKHSLRDQDDGTDDDDLLKALENEDDSAYRAQRIEQLNAELASAQNNRSVAPGQTTITQDSIYPTLENDQILLSFTTDTHRCVIHFAHPDFSRCGTMDEHMRALATRHYDVRFARVDVRDIPFVVEKLKIRVLPCVIGFKDGIAAERVVGFEGLALGGRDGTDSFSTATLEKRLLWKGVLVQAKIKDGNDDSDMSDADDEDEDDGRRRIHGGGAIRGGGARYNRDDHDDDWD

SEQ ID NO: 90131 - DNA, 633 bp, Oryza sativa
  CDS (1)..(633)
atggatcagtccatcgtcggccagatcttggagaagcaggtgctgtcggtggccaaggcggtggaggacaagctcgacgagcagatcgccgcgctcgaccgcctcgacccggacgacatcgaggcgctccgcgagcgccggatcctgcagatgcgccgcgccgccgagcgcagggccaagtggcgcgccctcggccacggcgagtacggggaggtccccgagaaggagttcttcgccgccgccaaggccagcgaccgcctcgtctgccacttctaccgcgacaactggccctgcaaggttatggacaagcacttgtcaattctcgcgaaacagcatgtagaaacacgttttgtgaaagttcatgctgaaaaggctccctttttgacagagaaactaaggattgttgttctcccaactcttgcattggtaaagaacaccaaagttgaggattatgtggttgggtttgatgagcttggtggtaaagatgatttcagcactgaggatctggaggaacgtctagcgaaagctcaagtgatcttccttgatggagaagggcctgcacatgcatccaagcaggcaaccaaacgaagcgttcggcaatcagatactggcaactcatcggactctgaatag

SEQ ID NO: 90132 - protein, 210 aa, Oryza sativa
MDQSIVGQILEKQVLSVAKAVEDKLDEQIAALDRLDPDDIEALRERRILQMRRAAERRAKWRALGHGEYGEVPEKEFFAAAKASDRLVCHFYRDNWPCKVMDKHLSILAKQHVETRFVKVHAEKAPFLTEKLRIVVLPTLALVKNTKVEDYVVGFDELGGKDDFSTEDLEERLAKAQVIFLDGEGPAHASKQATKRSVRQSDTGNSSDSE

SEQ ID NO: 90133 - DNA, 693 bp, Brassica napus
  CDS (1)..(693)
atggatccagattcagtcaagtcgaccctctcgaatctggcgttcggaaacgtattggcagcagctgctagagattataaaaaggaagtgcttgcaaatgagaaggcgcaatcatcaaaacatgtcaatgaggaggttgatcttgatgaacttatggatgatccagagctggaaaaattgcacgctgataggattgctgcactcaagagagaagttgagaagagagaagccttcaaaagacaaggacatggtgaatatcgagaggtaaacgagggagatttcttgggagaagtcaccaggagtgagaaagtgatttgccatttctaccacaaggagttttaccgctgcaagattatggacaagcatttgaagactcttgcgcctagacatgtggacactaagttcattaaagtagacgcagagaatgctcctttctttgtcacgaagctagcaataaagacattgccttgcgttttgcttttcagcaagggaattgcgatagataggctagttgggttccaggatctgggcacaaaggacgatttcaccacgaccagactggaaaacgttctgattaaaaaaggaatgctcagcaagaagaagaaagagcaagatgatgaagatgccgaataccaagagagcataaggcggtcggttaggtcttcagagaatctggactccgactctgaatga

SEQ ID NO: 90134 - protein, 230 aa, Brassica napus
MDPDSVKSTLSNLAFGNVLAAAARDYKKEVLANEKAQSSKHVNEEVDLDELMDDPELEKLHADRIAALKREVEKREAFKRQGHGEYREVNEGDFLGEVTRSEKVICHFYHKEFYRCKIMDKHLKTLAPRHVDTKFIKVDAENAPFFVTKLAIKTLPCVLLFSKGIAIDRLVGFQDLGTKDDFTTTRLENVLIKKGMLSKKKKEQDDEDAEYQESIRRSVRSSENLDSDSE

SEQ ID NO: 90135 - DNA, 642 bp, Glycine max
  CDS (1)..(642)
atggataagggtaagatcgaagaggtgatcgagaagcaagtcctgacggtggcgcaagccgtggaggacaagatcgacgacgagatcgccgccctggagcgtctggacgccgatgacatcgaggccctccgcgagcgccgcctccagcagatgaagaagatggcggagaagcgctcccgctggatctccctcggccactccgaatattccgagattccctccgagaaagacttcttccccgtcgtcaaggccagcgaacgcgtcgtctgccacttctaccgcgaaaactggccttgcaaggttatggacaaacacttaaatattttggcaaagcagcatatcgagactcgctttgtgaaactcaacgctgagaaaagtccgtttctggcggagaagctcaaaatcgtcgttcttccaactcttgccctcatcaaaaatgccaaagtcgatgattatgtggtggggtatgatgaacttggtgggactgatgagtttagcacagaggagctggaagaaagattggctaaagctcaagtgatcttttatgagggcgaatcatcgttcaatcatgcaaggtccagtgccaaaaccacaagaagtgttcgacagagctccagagcagactcctcagattctgagtaa

SEQ ID NO: 90136 - protein, 213 aa, Glycine max
MDKGKIEEVIEKQVLTVAQAVEDKIDDEIAALERLDADDIEALRERRLQQMKKMAEKRSRWISLGHSEYSEIPSEKDFFPVVKASERVVCHFYRENWPCKVMDKHLNILAKQHIETRFVKLNAEKSPFLAEKLKIVVLPTLALIKNAKVDDYVVGYDELGGTDEFSTEELEERLAKAQVIFYEGESSFNHARSSAKTTRSVRQSSRADSSDSE

SEQ ID NO: 90137 - DNA, 642 bp, Glycine max
  CDS (1)..(642)
atggataagggtaagatccaagaggtgatcgagaaccaagtcctgacggtggcgcaagccgtcgaggacaagatcgacgatgagatcgccgccctggaacgcctcgatgccgacgacatcgaagccctccgcgagcgccgcctccagcagatgaagaagatggcggagaagcgctcccgctggatctccctcggccactccgaatattccgagattccctccgagaaagacttcttctccgtcgtcaaggccagcgaacgcgtcgtctgccacttcttccgcgaaaactggccctgcaaggttatggacaaacacttaaatattttggcaaagcagcatatcgagactcggtttgtgaaactcaacgctgagaagagtccttttctcgctgagaagctcaagatcattgttcttccaacccttgccctcatcaaaaacgccaaagtcgatgattatgtggtggggtttgatgagcttggtgggactgatgagtttagcacagaggagctggaagaaagattggctaaagctcaagtcatcttttatgagggtgaatcatcgttcaatcatgttaggtctagtgccaaaaccacaagaagtgttcgacagagctccagagcagactcctcagattctgagtaa

SEQ ID NO: 90138 - protein, 213 aa, Glycine max
MDKGKIQEVIENQVLTVAQAVEDKIDDEIAALERLDADDIEALRERRLQQMKKMAEKRSRWISLGHSEYSEIPSEKDFFSVVKASERVVCHFFRENWPCKVMDKHLNILAKQHIETRFVKLNAEKSPFLAEKLKIIVLPTLALIKNAKVDDYVVGFDELGGTDEFSTEELEERLAKAQVIFYEGESSFNHVRSSAKTTRSVRQSSRADSSDSE

SEQ ID NO: 90139 - DNA, 696 bp, Glycine max
  CDS (1)..(696)
atggatccaaacgcggtgaagtccactctctccaatctggcgtttggaaacgtaatggcggcagctgcccgtgattatcagaaggaattgcatgctcaagagaagacacatgcatcaagttcagtacatcaggaggttgaccttgacgagttaatggatgatcctgagttggaaaaattgcatgcagataggattgcagctcttaagaaagaagcagagaaacgggaggaatggaagaagaaaggtcatggggaattcagggaagtaaccgagggtgatttcttaggtgaagtcactggaagtgaaaaagtgatttgtcacttctaccatagggagttctatagatgcaagataatggataagcatttaaagtctcttgcaccaatgcatattgatacgaagttcatcaagcttgatgcagagaatgcaccattctttgttacaaaactggctatcaagactttgccttgtgtcttgttgttcagacaaggagtagcagtagatagattggtaggatttcaagatgtgggaggtaaagatgattttaccacaagaacgctggaagctcttctgataaagaaaggtataattgaggagaagaaagctgaggatgatgaagatgatgaatatatagacagtacacgtagagtcgttagatcctccacaattgctggttctgattctgattctgaataa

SEQ ID NO: 90140 - protein, 231 aa, Glycine max
MDPNAVKSTLSNLAFGNVMAAAARDYQKELHAQEKTHASSSVHQEVDLDELMDDPELEKLHADRIAALKKEAEKREEWKKKGHGEFREVTEGDFLGEVTGSEKVICHFYHREFYRCKIMDKHLKSLAPMHIDTKFIKLDAENAPFFVTKLAIKTLPCVLLFRQGVAVDRLVGFQDVGGKDDFTTRTLEALLIKKGIIEEKKAEDDEDDEYIDSTRRVVRSSTIAGSDSDSE

SEQ ID NO: 90141 - DNA, 642 bp, Glycine max
  CDS (1)..(642)
atggataagggtaagatccaagaggtgatcgagaaccaagtcctgacggtggcgcaagccgtcgaggacaagatcgacgatgagatcgccgccctggaacgcctcgatgccgacgacatcgaagccctccgcgagcgccgcctccagcagatgaagaagatggcggagaagcgctcccgctggatctccctcggccactccgaatattccgagattccctccgagaaagacttcttctccgtcgtcaaggccagcgaacgcgtcgtctgccacttcttccgcgaaaactggccctgcaaggttatggacaaacacttaaatattttggcaaagcagcatatcgagactcgctttgtgaaactcaacgctgagaaaagtccttttctggcggagaagctcaaaatcgtcgttcttccaactcttgccctcatcaaaaatgccaaagtcgatgattatgtggtggggtttgatgaacttggtgggactgatgagtttagcacagaggagctggaagaaagattggctaaagctcaagtgatcttttatgagggcgaatcatcgttcaaccatgcaaggtccagtgccaaaaccacaagaagtgttcgacagagctccagagcagactcctcagattctgagtaa

SEQ ID NO: 90142 - protein, 213 aa, Glycine max
MDKGKIQEVIENQVLTVAQAVEDKIDDEIAALERLDADDIEALRERRLQQMKKMAEKRSRWISLGHSEYSEIPSEKDFFSVVKASERVVCHFFRENWPCKVMDKHLNILAKQHIETRFVKLNAEKSPFLAEKLKIVVLPTLALIKNAKVDDYVVGFDELGGTDEFSTEELEERLAKAQVIFYEGESSFNHARSSAKTTRSVRQSSRADSSDSE

SEQ ID NO: 90143 - DNA, 696 bp, Glycine max
  CDS (1)..(696)
atggatccaaacgcggtgaagtccactctctccaatctggcgtttggaaacgtaatggcggcagctgcccgtgattatcagaaggaattgcatgctcaagagaagacacatgcatcaagttcagtacatcaggaggttgaccttgacgagttaatggatgatcctgagttggaaaaattgcatgcagataggattgcagctcttaagaaagaagcagagaaacgggaggaatggaagaagaaaggtcatggggaattcagggaagtaaccgagggtgatttcttaggtgaagtcacaggaagtgaaaaagtgatttgtcacttctaccatagggagttctatagatgcaagataatggataagcatttaaagtctcttgcaccaaagcatatcgatacaaagttcatcaagcttgatgcagagaatgcaccattctttgttacaaaactggctatcaagactttgccttgtgtcttgttgttcagacaaggagtagcagtagatagattggtaggatttcaagatgtgggaggtaaagatgattttaccacaaaaacgctggaagctcttctgataaagaaaggtataattaaagagaataaaactgaagatgatgaacattataaatatatagacagtacacatatagtcattaaatcctgcacaattactaattctaattctaattctaaataa

SEQ ID NO: 90144 - protein, 231 aa, Glycine max
MDPNAVKSTLSNLAFGNVMAAAARDYQKELHAQEKTHASSSVHQEVDLDELMDDPELEKLHADRIAALKKEAEKREEWKKKGHGEFREVTEGDFLGEVTGSEKVICHFYHREFYRCKIMDKHLKSLAPKHIDTKFIKLDAENAPFFVTKLAIKTLPCVLLFRQGVAVDRLVGFQDVGGKDDFTTKTLEALLIKKGIIKENKTEDDEHYKYIDSTHIVIKSCTITNSNSNSK

SEQ ID NO: 90145 - DNA, 639 bp, Zea mays
  CDS (1)..(639)
atggacgaagtcgtcagccagattttggagaagcaagtgctgtctgccgcgaaggcggtggaggacaagctcgatgaggagatcgccgcgctcgatcgcctcgatccggacgacatcgaggcgctccgcgagcgccggatccagcagatgcgccgcgccgccgagcgccgcgccaagtggcgtgcgctggggcacggggagtacaccgaggtccccgagaaggagttcttctccatcgccaaggctagcgagcggctcgtctgccacttctaccgcgacaactggccctgcaaggtcgtggacaagcacttgtcggctctggcaaaacagcacgtggagacacggttcgtgaaggtccacgccgagaaggccccctttctgacagagaagctcaggatagtcgtcctcccgaccctcgccatagttaagaacgccaaggtcgaggactacgtggtcggcttcgacgagctcggcggcaaggacgacttcagcaccgaggacctggaagagcgcctggcgaggtcccaggtcgtcttcctggacggcgaagggtccgcgcacgcgtcgaagcaggccgccgccgccaccaaacggagcgtccggcagtcgggcaccggcgactcgtccgactccgagtag

SEQ ID NO: 90146 - protein, 212 aa, Zea mays
MDEVVSQILEKQVLSAAKAVEDKLDEEIAALDRLDPDDIEALRERRIQQMRRAAERRAKWRALGHGEYTEVPEKEFFSIAKASERLVCHFYRDNWPCKVVDKHLSALAKQHVETRFVKVHAEKAPFLTEKLRIVVLPTLAIVKNAKVEDYVVGFDELGGKDDFSTEDLEERLARSQVVFLDGEGSAHASKQAAAATKRSVRQSGTGDSSDSE

SEQ ID NO: 90147 - DNA, 690 bp, Zea mays
  CDS (1)..(690)
atggatccggactcggtgaagtcgacgctctctaacctggccttcggcaacgtcatcgccgccgccgcccgcgacctccaaaaggaaatggtggctaaagacaaggctcaagcagcacctgcaagccatgatgaagttgatcttgatgagctgttggatgacccagaacttgagaagttgcacgcggagagaattgctgcccttaagaaagaagttgagaagcgtgaagtgctaaaaaggcaaggtcatggtgaatacagggagataactgaaggggacttcctcggggaggttactggcagtgaaaaagtcatatgccatttttaccaccgtgaattttaccgttgcaagatcatggataagcatttgaaggcccttgccccagtctatgtgggaacaaaattcgtcaagcttgatgctgaaaatgctccattctttgtggccaaactggcaatcaagacactgccatgtgtaatattgttcaagaagggtattgctgttgaccgattagttgggtttcaagatctcagaagtaaagacgattttccgacaagagcgttggaaaatattctcaagacgaaagggataattgatgagaagaagaaagatgacgacgatgacgatgaagaaagcgaggctaagaataggagggttaggtcttcaactgctcaagactctgactcagactga

SEQ ID NO: 90148 - protein, 229 aa, Zea mays
MDPDSVKSTLSNLAFGNVIAAAARDLQKEMVAKDKAQAAPASHDEVDLDELLDDPELEKLHAERIAALKKEVEKREVLKRQGHGEYREITEGDFLGEVTGSEKVICHFYHREFYRCKIMDKHLKALAPVYVGTKFVKLDAENAPFFVAKLAIKTLPCVILFKKGIAVDRLVGFQDLRSKDDFPTRALENILKTKGIIDEKKKDDDDDDEESEAKNRRVRSSTAQDSDSD

SEQ ID NO: 90149 - DNA, 690 bp, Zea mays
  CDS (1)..(690)
atggatccggacgcagtgaagtcgacgctctctaaccttgccttcggcaacgtcatcgccgccgccgcccgcgacctccagaaggaaatggtggctaaagacaaggctcaagcagcacctgcaagccatgatgaagttgatcttgatgagttgatggatgaccctgaacttgagaagttgcacgcggagagaattgctgcccttaagaaagaggttgagaagcgtgaagtgctaaaaaggcaaggtcacggtgaatacagggaggtaattgaaggggacttccttggggaggttactggcagtgaaagagtcatatgtcatttctatcaccgtgaattttaccgttgcaagatcatggataagcatttgaaggcccttgctcctgtctatgtgggaacaaaattcatcaagcttgatgctgaaaatgctccattctttgtagccaaactggcaatcaaaaccttgccatgtgtaatattgttcaagaagggtattgctgttgaccggttagttgggtttcaagatctcggaagtaaagacgatttttcaacaagagcgttggaaaacattctcaagatgaaagggataatcgatgagaagaagaaagatgacgatgatgatgatgaagaaagcgagtctaagaataggaggattagatcttcaactgctcaagattctgactcggactga

SEQ ID NO: 90150 - protein, 229 aa, Zea mays
MDPDAVKSTLSNLAFGNVIAAAARDLQKEMVAKDKAQAAPASHDEVDLDELMDDPELEKLHAERIAALKKEVEKREVLKRQGHGEYREVIEGDFLGEVTGSERVICHFYHREFYRCKIMDKHLKALAPVYVGTKFIKLDAENAPFFVAKLAIKTLPCVILFKKGIAVDRLVGFQDLGSKDDFSTRALENILKMKGIIDEKKKDDDDDDEESESKNRRIRSSTAQDSDSD

SEQ ID NO: 90151 - DNA, 714 bp, Zea mays
  CDS (1)..(714)
atggatccggactcggtgaagtcgacgctctctaacctggccttcggcaacgtcatcgccgccgccgcccgcgacctccaaaaggaaatggtggctaaagacaaggctcaatcagcacctgcaagccatgatgaagttgatcttgatgagctgttggatgacccagaacttgagaagttgcacgcggagagaattgctgcccttaagaaagaagttgagaagcgtgaagtgctaaaaaggcaaggtcatggtgaatacagggagataactgaaggggacttcctcggggaggttactggcagtgaaaaagtcatatgccatttttaccaccgtgaattttaccgttgcaagatcatggataagcatttgaaggcccttgccccagtctatgtgggaacaaaattcgtcaagcttgatgctgaaaatgctccattctttgtggccaaactggcaatcaagatagtgccatgtgtaatattgttcaagaagggtattgttgttgaccgattagttgggtttcaagatctcagaagtaaagacgattttctgacaagagcgttggaacatattcttattctcaagacgaaagggataattgatgagaagaagaaagatgatgacgatgacgatgaagaaagcgaggctaagaataggagggttaggtcttcaactgctcaagcctctgactcagactggacctgggatgaggattga

SEQ ID NO: 90152 - protein, 237 aa, Zea mays
MDPDSVKSTLSNLAFGNVIAAAARDLQKEMVAKDKAQSAPASHDEVDLDELLDDPELEKLHAERIAALKKEVEKREVLKRQGHGEYREITEGDFLGEVTGSEKVICHFYHREFYRCKIMDKHLKALAPVYVGTKFVKLDAENAPFFVAKLAIKIVPCVILFKKGIVVDRLVGFQDLRSKDDFLTRALEHILILKTKGIIDEKKKDDDDDDEESEAKNRRVRSSTAQASDSDWTWDED

SEQ ID NO: 90153 - DNA, 690 bp, Zea mays
  CDS (1)..(690)
atggatccggacgcagtgaagtcgacgctctctaaccttgccttcggcaacgtcatcgccgccgccgcccgcgacatccagaaggaaatggtggctaaagacaaggctcaagcagcacctgcaagccatgatgaagttgatcttgatgagttgatggatgaccctgaacttgagaagttgcacgcggagagaattgctgcccttaagaaagaggttgagaagcgtgaagtgctaaaaaggcaaggtcacggtgaatacagggaggtaattgaaggggacttccttggggaggttactggcagtgaaaaagtcatatgtcatttctatcaccgtgaattttaccgttgcaagatcatggataagcatttgaaggcccttgctcctgtctatgtgggaacaaaattcatcaagcttgatgctgaaaatgctccattctttgtagccaaactggcaatcaaaaccttgccatgtgtaatattgttcaagaagggtattgctgttgaccggttagttgggtttcaagatctcggaagtaaagacgatttttcaacaagagcgttggaaaacattctcaagatgaaagggataatcgatgagaagaagaaagatgacgacgatgatgatgaagaaagcgagtctaagaataggaggattagatcttcaactgctcaagattctgactcggactga

SEQ ID NO: 90154 - protein, 229 aa, Zea mays
MDPDAVKSTLSNLAFGNVIAAAARDIQKEMVAKDKAQAAPASHDEVDLDELMDDPELEKLHAERIAALKKEVEKREVLKRQGHGEYREVIEGDFLGEVTGSEKVICHFYHREFYRCKIMDKHLKALAPVYVGTKFIKLDAENAPFFVAKLAIKTLPCVILFKKGIAVDRLVGFQDLGSKDDFSTRALENILKMKGIIDEKKKDDDDDDEESESKNRRIRSSTAQDSDSD

SEQ ID NO: 90155 - DNA, 27 bp, Artificial sequence
  primer
atggaagataaattagacagatactac

SEQ ID NO: 90156 - DNA, 28 bp, Artificial sequence
  primer
ttatatatctaaatcactatcactttca

SEQ ID NO: 90157 - protein, 198 aa, Artificial sequence
  consensus sequence
  Variant (2)..(18): Xaa in position 2 to 18 is any amino acid
  Variant (19)..(26): Xaa in position 19 to 26 is any or no amino acid
  Variant (28)..(28): Xaa in position 28 is any amino acid
  Variant (30)..(32): Xaa in position 30 to 32 is any amino acid
  Variant (34)..(35): Xaa in position 34 to 35 is any amino acid
  Variant (36)..(36): Xaa in position 36 is any or no amino acid
  Variant (38)..(52): Xaa in position 38 to 52 is any amino acid
  Variant (53)..(54): Xaa in position 53 to 54 is any or no amino acid
  Variant (57)..(62): Xaa in position 57 to 62 is any amino acid
  Variant (63)..(63): Xaa in position 63 is any or no amino acid
  Variant (65)..(67): Xaa in position 65 to 67 is any amino acid
  Variant (69)..(69): Xaa in position 69 is any amino acid
  Variant (72)..(73): Xaa in position 72 to 73 is any amino acid
  Variant (76)..(82): Xaa in position 76 to 82 is any amino acid
  Variant (84)..(84): Xaa in position 84 is any amino acid
  Variant (86)..(91): Xaa in position 86 to 91 is any amino acid
  Variant (94)..(96): Xaa in position 94 to 96 is any amino acid
  Variant (97)..(97): Xaa in position 97 is any or no amino acid
  Variant (99)..(99): Xaa in position 99 is any amino acid
  Variant (101)..(102): Xaa in position 101 to 102 is any amino acid
  Variant (105)..(118): Xaa in position 105 to 118 is any amino acid
  Variant (122)..(123): Xaa in position 122 to 123 is any amino acid
  Variant (126)..(128): Xaa in position 126 to 128 is any amino acid
  Variant (129)..(134): Xaa in position 129 to 134 is any or no amino acid
  Variant (136)..(136): Xaa in position 136 is any amino acid
  Variant (138)..(139): Xaa in position 138 to 139 is any amino acid
  Variant (142)..(143): Xaa in position 142 to 143 is any amino acid
  Variant (144)..(145): Xaa in position 144 to 145 is any or no amino acid
  Variant (147)..(173): Xaa in position 147 to 173 is any amino acid
  Variant (174)..(197): Xaa in position 174 to 197 is any or no amino acid
RXXXXXXXXXXXXXXXXXXXXXXXXXGXGXXXEXXXEXXXXXXXXXXXXXXXXXHFXXXXXXXCXXXDXHLXXLAXXXXXXXFXKXXXXXXPFXXXXLXIXXLPXXXXXXXXXXXXXXVGFXXLGXXXXXXXXXFXTXXLEXXXXLXXXXXXXXXXXXXXXXXXXXXXXXXXXXXXXXXXXXXXXXXXXXXXXXXXXD

SEQ ID NO: 90158 - protein, 27 aa, Artificial sequence
  protein pattern
  Variant (2)..(2): Xaa in position 2 is any amino acid
  Variant (4)..(5): Xaa in position 4 to 5 is any amino acid
  Variant (6)..(6): Xaa in position 6 is Ile, Leu or Val
  Variant (8)..(8): Xaa in position 8 is any amino acid
  Variant (9)..(9): Xaa in position 9 is Ile, Leu or Val
  Variant (10)..(10): Xaa in position 10 is Ala, Ile, Leu or Val
  Variant (11)..(11): Xaa in position 11 is Gly, Ile or Leu
  Variant (12)..(14): Xaa in position 12 to 14 is any amino acid
  Variant (15)..(15): Xaa in position 15 is Ala, Gly, Ser or Thr
  Variant (16)..(21): Xaa in position 16 to 21 is any amino acid
  Variant (24)..(24): Xaa in position 24 is Phe or Tyr
  Variant (25)..(25): Xaa in position 25 is Asp, Glu, Gln, Ser or Thr
  Variant (26)..(26): Xaa in position 26 is any amino acid
  Variant (27)..(27): Xaa in position 27 is Leu, Met or Val
LXIXXXPXXXXXXXXXXXXXXVGXXXX

SEQ ID NO: 90159 - DNA, 1098 bp, Saccharomyces cerevisiae
  CDS (1)..(1098)
atgggaaagaaaaatagaaagggaaaagaaaataatgctgctaaaacctcttttctaaaagtagagaatattaaaaacactaattcgggattggagcttccatcgcaagactatacaaacgttgaagaaaaagaaagtagcccgaaaactgactttccattaattacaaaggaacatgtaaacacgaaaactgacagcaatattctcgattatcccaccataggcgatttagtttcctcagtagagaaattatgtgtcttgaaagaattgaagatagcatttccagaagtagatgatacattaattaaagccattttaattgcctcccaaggggttttggagccggcattcaattctttactctactactcaagtccggaggaaaacactgactttgcattaccaatgaagccgataagtgtggaagactatagtaaaataaatgtgtctgagattttgcaacgtgaaatattcgatgatattgaagacgaattttctggtcaaggaataaatggctccatggtaatttcaaaaattgaatcagaactaagttctttggccgaacacattggcaacattagcacccccggatcgaatagagaagtcgccgaatcgactaggaacgtggctgttgcagagggccataatacaattttatcaaacgaagatagtatactcaagggaaaagagaagggaaaagaggaggaaaaggagaagggagaagaaaagggagttaacagcttaaaaggcgccgctgtgaaagttgttgcgaagtcattgaagaataatcgcattcccgtcactgtgaagagaaatgagccttcaaacaatttatttgacgttttaaactgcgacgaaagcgaggaagaagaagagcaagatgtcgaaaccaatacgtcgaatcaagaaaggaagaaccagggcggtaatactgaagtgccggaggctcagcgtgacagtgcagataggttacctgccaaggacgacggtggatacaaatctgcctttggcactgatagttgtggtctatttgcagctgacgctaaagatgaaaaaaagcaggttcatccatctagacaagaattaagttttacgtag

SEQ ID NO: 90160 - protein, 365 aa, Saccharomyces cerevisiae
MGKKNRKGKENNAAKTSFLKVENIKNTNSGLELPSQDYTNVEEKESSPKTDFPLITKEHVNTKTDSNILDYPTIGDLVSSVEKLCVLKELKIAFPEVDDTLIKAILIASQGVLEPAFNSLLYYSSPEENTDFALPMKPISVEDYSKINVSEILQREIFDDIEDEFSGQGINGSMVISKIESELSSLAEHIGNISTPGSNREVAESTRNVAVAEGHNTILSNEDSILKGKEKGKEEEKEKGEEKGVNSLKGAAVKVVAKSLKNNRIPVTVKRNEPSNNLFDVLNCDESEEEEEQDVETNTSNQERKNQGGNTEVPEAQRDSADRLPAKDDGGYKSAFGTDSCGLFAADAKDEKKQVHPSRQELSFT

SEQ ID NO: 90161 - DNA, 1227 bp, Candida glabrata CBS 138
  CDS (1)..(1227)
atgggcaagaagtcacagaaggccgaaaaggctgaggataaaccagtgctggagaaagaaacaggcgaggatcttgattcaaagcaacaagagccaattgaagaaccagtcgaggtgaagcaggacaaggacgaggcaaaggaagaagacttggaagaagttaaggaagatgtcggtgattctgccaagaaggacattacagaagacacaaccactaagaaagtcgagaacccactgctgttgcaactgaaagaggcgttccctaacatagaggagcagtacgtgaaggctgtcataattgcatcgcaaggtgccctagacccagctttcaatgcattgctgtttttgtctgatcccgaatccggtaaagatatagagttgcctcgtgagccagtgcaacagaacccatctttacccccaaggagaaagcagacgcaattggaacaagatgagatgctggcccgtcaattggacaaggagtacaaccgcaagcgcaggggcgagcgtcgccatcacaacgagcgtgaagctggtagaaactacgagagatacaacaatgacgacctggaggaggactcgtggtctcaatttgtagagaaggatctcccagagattactgcgagggccaagggatcgttgcaagaaacggctacgaaagttggaacttggtttaacggtgtcaagaagaacttcattggtgaaggtgaagagaacgattccgcttattaccaggatgattcacatggaagagacctagacgaggattacgggacctacgtcgaacaacaagagcgtcgccagaggagaggtgttcaagacccaggctacagaaggggtgatgaacaaagattaaacgctagacatagatttaattccttcggcgctagtgctacggatgatgttgaaggcggtatttctctgagagacgaagaatttggtgaggacgaggacgaggaagtgccaccccagttgccatccagagctagaagcaatgactccaagaaagacagcgaagaagtgaagcctcaagaaggtaaaaaggacaaagttgttgctgagactacctacatagacaccccagagaacaaagagaagaccaagaggaaatggcaaccattaccaccagagccactgaacgctacccctactaaagtcaacgcttccacaaagaagaataaaaatgaaagcgaggatgagtttttgattaacagtgacgaggaactttaa

SEQ ID NO: 90162 - protein, 408 aa, Candida glabrata CBS 138
MGKKSQKAEKAEDKPVLEKETGEDLDSKQQEPIEEPVEVKQDKDEAKEEDLEEVKEDVGDSAKKDITEDTTTKKVENPLLLQLKEAFPNIEEQYVKAVIIASQGALDPAFNALLFLSDPESGKDIELPREPVQQNPSLPPRRKQTQLEQDEMLARQLDKEYNRKRRGERRHHNEREAGRNYERYNNDDLEEDSWSQFVEKDLPEITARAKGSLQETATKVGTWFNGVKKNFIGEGEENDSAYYQDDSHGRDLDEDYGTYVEQQERRQRRGVQDPGYRRGDEQRLNARHRFNSFGASATDDVEGGISLRDEEFGEDEDEEVPPQLPSRARSNDSKKDSEEVKPQEGKKDKVVAETTYIDTPENKEKTKRKWQPLPPEPLNATPTKVNASTKKNKNESEDEFLINSDEEL

SEQ ID NO: 90163 - DNA, 26 bp, Artificial sequence
  primer
atgggaaagaaaaatagaaagggaaa

SEQ ID NO: 90164 - DNA, 26 bp, Artificial sequence
  primer
ctacgtaaaacttaattcttgtctag

SEQ ID NO: 90165 - DNA, 3429 bp, Saccharomyces cerevisiae; identical to SEQ ID NO: 18665
  CDS (1)..(3429)

SEQ ID NO: 90166 - protein, 1142 aa, Saccharomyces cerevisiae; identical to SEQ ID NO: 18666

SEQ ID NO: 90167 - DNA, 3312 bp, Candida glabrata CBS 138
  CDS (1)..(3312)
atgagcgctataagttcaaacaccgtgagtgttatcaagaacaatcagataggaccatggaaacttggtgaaactttgggatccggcagtacaggtaaagtactactggcatctaacgaaaccactaaacagcaagctgctgtgaaagtgatttcgaaggctgtatttgaggccatgaataacagcgagagcaatggtgacgccaccaatgctttgccttacaacatcgaacaagaaataattataatgaaactgctaaaccatccaaatgtattgagattatttgacgtttgggaaactaattccgatctatatcttgtgctagaatacgccgaaaagggggaactatttaatatgcttgttgagcgcggcccacttccggaaaatgaagctgttcgtgcctttaggcaaatcattatcggtatatcatattgtcatagtctaggtgtagttcaccgtgacctgaagcctgagaacttacttcttgacaacaaacttaacatcaaaatagctgattttggtatggccgcattagaatctgaagataaactgctagaaacttcttgtggatctcctcattatgcggcaccagagatcatctctggtctaccttatgaaggtttttctagtgatgtatggtcctgtggtgttatcttgtttgcattgttgacaggtaggcttccatttgatgaagaggatggtaatataagaaatttgctcctcaaagtccaaaagggtgaattcgaaatgcccgatgatgatgaaattacaaaagaggctcaagatctgcttgcaagattacttacagttgatcctagtaaaagaattacaataagagaaattctaaaacatccacttctacaaaaatatccaagcattaaggattcacgcagtatacgtaacttgcctagggaagatacatatctatcaccattagcagataccaactctaagattgatgatgctatattgcaaaatcttgtcatcctgtggcatggtaaagatgctagagaaattgcagcaaaactgagagaaccgggagctaatacagagaaaacattatatgctcttttgtacagatttaaatgtgatactcaaagagaagccaacagagctagaagacaatccaagatagtccaaaggaattccacaattagatctactgctccagagtcaccttccaaaaagaaaacttacactccgcaaaagaaaaataagagagcatcaataatagcatcttcttcaaaaagaccagtctctgtgacgaaaacggcaacaaatattacagtcaattccagtataactggcacaccaaaatctgcaaagcgtatgtcaatgaacaattctgccagaaaaagaatgtctgcattatatggtacaagagattcccctacaaaaacttctagaagtaggagatcctccataattacaaaagatttcttgggaaatagaccaagagacagtgttataagtatgtcgcataacaagcgcgcctcgaaatcaagcaaaagaatttccctggtccctaatctaaaaagacaatcggtgacaacgaaattaatggctacatatgccaaactttctgaagatgatgactgggaatacattgaaagagaaacaaagagaaccagttccgattttgctaccttgattgatgaaatttttgagtatgaaaagtatgaacaaataaggaaggaaaaggcagaattggaacgtaaagttagagagactaaagagcgtgaagaacgtgagagaaaggagcgccaagaaaaggagttacaggaaaggcttgaacgagaaagaatcgagaaacaaaaggaagatatagcgagacaaatggatgaagaaatttcaaatttgaaaaaagaactggtgggggaccaggataatgaagacaaatttagatctgtatcagaaccacttgaatctaagagtaaaaaaattgaagacatcgaggaagatattgacggcattcttcgtaatagaaaatattctttacaaacacgtccagtgtcacgtcttgatccaggtatcggctttatagacaaaccacgtcaaagtgagcaacacgttcctgaaactgtaaatctggaacctgaactggaagagacggaacaaaaaattttagaaacaataagaagatctaaattcttgggttcatcttttgacataaagaaagaacttgaaaatgtaaaaaggcacagacaaacttcacaaccaattgaaaaagaaatggcgcctcccgcattaccagaaaccctaccaaaagcggtcgagaagaagaatgtatctatggacccttccttgagaaaaatatcagatattaaggtgcctcagttcaccagaaaatctagacattttagcacttcaaacagaagactttctgtcctatctatgtattcaaccaaagaatcgtattcaaatctagctgacatccttaagaatggacctggcgaaaaagaaatgatccagacagcaccaacccccaaaagtgcagatgattctgaccagctgtttgatactatcgatgaagctgatacaccagccagtgtatcacgcgaggaaagactgtatgaggttgcagaagaatcagaaaatgagttggcaaataaaaagattgatattgctgacttgttgaattcggaaggatctaacttgaagtctgttgaggaacaagaagatagtatgaaactacctaaattaccaccgctgtttgaagatggctctactaaagaaacaaaggaacaatcgaagtcaatgatacctgaaaacatgcaatcaagcgaatcgcaaaagcaaattgaaaagaacaattctgatgagggtggctctttgaacccattcatgacgaaacacagagatgtctcagataaaggggtaacaaaagagaagcctacagtcaccatgaaaactacttccgaacaagttagcgccgataagaaaagaaatatgtctttcttaagaaaattgtcaaagggcagttcgtctagcaaagacaatgttgatgttactttatcaacgtctgttagttcaaaacaactattcagtggcttggtaaacctattgaaaggctggactaagtatggactaaagggcattgctatcgatagcactagtcagaccatcactggtaaacttgcaaatgataatatcctttcatttagatcaactgctttttctattttgatattctcacaagaaaagggtagtgctgtgacttttagaaaagtcagtggttcaggtaaagctgttagacgtctgtcggatgaggttaaaaaggtcctatcaaaagaaggtgtgttaagggattag

SEQ ID NO: 90168 - protein, 1103 aa, Candida glabrata CBS 138
MSAISSNTVSVIKNNQIGPWKLGETLGSGSTGKVLLASNETTKQQAAVKVISKAVFEAMNNSESNGDATNALPYNIEQEIIIMKLLNHPNVLRLFDVWETNSDLYLVLEYAEKGELFNMLVERGPLPENEAVRAFRQIIIGISYCHSLGVVHRDLKPENLLLDNKLNIKIADFGMAALESEDKLLETSCGSPHYAAPEIISGLPYEGFSSDVWSCGVILFALLTGRLPFDEEDGNIRNLLLKVQKGEFEMPDDDEITKEAQDLLARLLTVDPSKRITIREILKHPLLQKYPSIKDSRSIRNLPREDTYLSPLADTNSKIDDAILQNLVILWHGKDAREIAAKLREPGANTEKTLYALLYRFKCDTQREANRARRQSKIVQRNSTIRSTAPESPSKKKTYTPQKKNKRASIIASSSKRPVSVTKTATNITVNSSITGTPKSAKRMSMNNSARKRMSALYGTRDSPTKTSRSRRSSIITKDFLGNRPRDSVISMSHNKRASKSSKRISLVPNLKRQSVTTKLMATYAKLSEDDDWEYIERETKRTSSDFATLIDEIFEYEKYEQIRKEKAELERKVRETKEREERERKERQEKELQERLERERIEKQKEDIARQMDEEISNLKKELVGDQDNEDKFRSVSEPLESKSKKIEDIEEDIDGILRNRKYSLQTRPVSRLDPGIGFIDKPRQSEQHVPETVNLEPELEETEQKILETIRRSKFLGSSFDIKKELENVKRHRQTSQPIEKEMAPPALPETLPKAVEKKNVSMDPSLRKISDIKVPQFTRKSRHFSTSNRRLSVLSMYSTKESYSNLADILKNGPGEKEMIQTAPTPKSADDSDQLFDTIDEADTPASVSREERLYEVAEESENELANKKIDIADLLNSEGSNLKSVEEQEDSMKLPKLPPLFEDGSTKETKEQSKSMIPENMQSSESQKQIEKNNSDEGGSLNPFMTKHRDVSDKGVTKEKPTVTMKTTSEQVSADKKRNMSFLRKLSKGSSSSKDNVDVTLSTSVSSKQLFSGLVNLLKGWTKYGLKGIAIDSTSQTITGKLANDNILSFRSTAFSILIFSQEKGSAVTFRKVSGSGKAVRRLSDEVKKVLSKEGVLRD

SEQ ID NO: 90169 - DNA, 3339 bp, Kluyveromyces lactis NRRL Y-1140
  CDS (1)..(3339)
atgaacggtaacggaataacgacgttaaagggtgacacaattggcccgtggaagttgggctcgacactgggtgttggctcaacaggtaaagtcgtaatggcctataatgaaactaaaggacaacaagccgctgtgaaaattatatcaaaatcaatattcaacgctcaagggtcgacaatgattggtggtaacgatcctgatgtcttaccctatggtattgaacgtgaaattatcattatgaagttgttgaatcatcctaatgtcttgagattatacgatgtttgggaaacttcaaaagatttatatatggttttagagtacgttgaaaaaggtgagttattcaacttgttggtggaaaggggcccattacctgagaatgaggcagtcagatttttcagacagataattatcggtatttcttactgccatgcgttaggtatagttcatcgtgatttgaagcctgaaaatcttttattagaccataaattcaatgtcaaactagccgatttcggtatggcagcactagaatcaaaagataaattactggaaactagttgtggttcgcctcattacgcggcacccgaaattgtctcgggcttgccatatcacggttttgaatccgatgtttggtcatgtggtgttattctttacgctttactgaccggtaggttgccatttgatgaagaagatggcaatatcagaaatctcttgttaaaggttcaaagtgggaaatttgaaatgcctggagatgatgaaatatcatcggaagcccaagatttaatcgccagaatcttaacagtagatccagaacaaagaatcaagacaagagagatcctaaagcatccacttctaagaaaatacccaagcattaaggactctaaatccattagaaacttacctcgagaagatacctatttgaatccactatcattagaaggaggaaatcaatgcgtagatgaaactattttgcagaatttggttgttctatggcatggtagaaataaggaagacattattacgaagttgatggaacctggtgctaatttagaaaagactttttacgctttactgcatagatttaaacacgataattaccaagatcaattgaagcaacaagaattacaaaagaaacaatctgtctcttcgaattcgctgatgtacgttggatctttaccatctcctaataaatctgattccccagtcaccactccaaagaagaaaagaacatcaatcatagttgcctcatcttctcacaaaagacctgtatcaatgcaaaaactgagtagccaacatagctcaccagtgaaaaacggctcaataggtaaacgtttgagtaagactttcccttcaaacaagagaatttcacagctagtctccaattcgtcttctccaacccctgctgctcataaaagagtttccaggataaacgatagtgcagctccacccgtccctaaagaaatgcttcgtgactacaaaagacaatcaaagagacaatccaaaagattctctctactgcctaatatgaagcgtggatctataacaacgaaactgattgcaacgtatgcaaaactttccgaagacagtgaatgggaatacatcgaaaaggaaacgaaaaggacaagtcaggactttgctacattgatggatcagattttcgagcatgagaaatacgaacaaatacggaaagagaaggaagagttggaaagaaaagtcaacgaagctcgtgagaaggaggaagctgaaagaaaggaacgggaaaggatcgagcgggaggagcaagaaagacttgaaagagaagaacgaaagcgagctgaaagacagaaggaattgcaagaccaaatggaagacgaaattgctaagctcaaggcggaatatgaagctgttcaggggagctcggatgaaagaaacacagccaatggaagatctgtctctgctccgatagagaccgatagaactgcaaacaaaagagatagtacattcggtataaagaatgacatcaatgaactaatcaatacaagaaacttctctctacaaacgagaccagtttccagacttgaccctggtatcatagctgctgaaagtagactgtcagctaacctagaagatgaccaagcgtcaaaggaaaagactattctggaaaccattagacgctccaaattccttggatcgcaatttaacttgaacgttgaattagagaaagcccaaaaggatttagtatctaaagagagacaagaacaattgagaaagtactctgaacagactgcaaagtacgaggttcaaaagttacccaagaatgctaaagcagttgcaactctcagagatgacgaagttgaacccagaaagctctcagaagtcaaagttccacaatttacaaggaggtcaaaacatttctcttcctctaacaaaagattttctgtattgtcactgtattcaactaagacttcattcacgaaccttgtggatcatttgaagaacgataattatcttgaacctctacctggccaacctgaatactcatcatccaaggttgcacaggaaccagaattcatgtttgagaccgttgaagagcttgatgaaaattctaagctgttcgaagtaccagaaacagaggaaggaaaactagcttctgccgccagaaaggaatctactgatgccagaaaacaaagtactaatgataaggatattaacttgccgtcgttacctccattgcaggtatctcatgacgtagccgacgagaatggagcattagggcttggcatttaccagccaaacgatcagacacaaaagccccacaaaacaatgctcattgatgaatccattgatgaaaatatatcttcaacatcagatgtcagtagaactgaagtcgtaaaaaagcctccattgaatgatgttgtgaggaaaaacaataatgagcgtaagccactcgaagagatcacccccaaggtggaaaacaagagaaaaatctcattcttcaggaagttttctcaaggatctgagaagaaacttggcccggagagctttgattctcagctgaaggcaggcgtttctgctccaaaaatgtataaagctctggatagactcctgaatgaatggactaactatggtttgaagcatgttgaatcaagccctaatgattttgtcatttctggtaagctgaccagtgacaacatcttatctttaagatccactggattcaagattactgttctgcctggtgaaggaaatggatcaataatacagttcaccaagaaatcaggatctacaaagacttttaatagactagtaaaggagatcgaaaaaattttagagaaggaaaaggtgctagtattctctttctga

SEQ ID NO: 90170 - protein, 1112 aa, Kluyveromyces lactis NRRL Y-1140
MNGNGITTLKGDTIGPWKLGSTLGVGSTGKVVMAYNETKGQQAAVKIISKSIFNAQGSTMIGGNDPDVLPYGIEREIIIMKLLNHPNVLRLYDVWETSKDLYMVLEYVEKGELFNLLVERGPLPENEAVRFFRQIIIGISYCHALGIVHRDLKPENLLLDHKFNVKLADFGMAALESKDKLLETSCGSPHYAAPEIVSGLPYHGFESDVWSCGVILYALLTGRLPFDEEDGNIRNLLLKVQSGKFEMPGDDEISSEAQDLIARILTVDPEQRIKTREILKHPLLRKYPSIKDSKSIRNLPREDTYLNPLSLEGGNQCVDETILQNLVVLWHGRNKEDIITKLMEPGANLEKTFYALLHRFKHDNYQDQLKQQELQKKQSVSSNSLMYVGSLPSPNKSDSPVTTPKKKRTSIIVASSSHKRPVSMQKLSSQHSSPVKNGSIGKRLSKTFPSNKRISQLVSNSSSPTPAAHKRVSRINDSAAPPVPKEMLRDYKRQSKRQSKRFSLLPNMKRGSITTKLIATYAKLSEDSEWEYIEKETKRTSQDFATLMDQIFEHEKYEQIRKEKEELERKVNEAREKEEAERKERERIEREEQERLEREERKRAERQKELQDQMEDEIAKLKAEYEAVQGSSDERNTANGRSVSAPIETDRTANKRDSTFGIKNDINELINTRNFSLQTRPVSRLDPGIIAAESRLSANLEDDQASKEKTILETIRRSKFLGSQFNLNVELEKAQKDLVSKERQEQLRKYSEQTAKYEVQKLPKNAKAVATLRDDEVEPRKLSEVKVPQFTRRSKHFSSSNKRFSVLSLYSTKTSFTNLVDHLKNDNYLEPLPGQPEYSSSKVAQEPEFMFETVEELDENSKLFEVPETEEGKLASAARKESTDARKQSTNDKDINLPSLPPLQVSHDVADENGALGLGIYQPNDQTQKPHKTMLIDESIDENISSTSDVSRTEVVKKPPLNDVVRKNNNERKPLEEITPKVENKRKISFFRKFSQGSEKKLGPESFDSQLKAGVSAPKMYKALDRLLNEWTNYGLKHVESSPNDFVISGKLTSDNILSLRSTGFKITVLPGEGNGSIIQFTKKSGSTKTFNRLVKEIEKILEKEKVLVFSF

SEQ ID NO: 90171 - DNA, 3945 bp, Debaryomyces hansenii CBS767
  CDS (1)..(3945)
atgtcttcacatcaaagacaagattcgatagcgtcgttgagctcgacggcgacgggtaatatccatccacagaagatagggccatggaagctaggaaagactttgggaagaggagcaactggtagagtattgttggccacgcatcagagcactggacaaaaagctgccgttaaggttgtatcgaaatcggaattaaatgacgatgaaataaataagaagtctgcggacgaagcagggttgccatacggtatagaaagggaaattatcatcatgaagttgttgacgcatccaaatgtgttgagattgtatgatgtttgggagacatcaaaggcgctttacttggtccttgaatacgttgaaggaggtgagttattcgacttgttggttgaaaggggcccgttacaggaggttgaagccatcaaatacttcagacaaattatactaggcaccgcctattgtcacgcgttaggtatttgtcatagagatttgaagccagaaaacttgttattggactcaggattgaatgtcaagttggctgattttggaatggctgctttagaaagcaatggtaagttgcttgaaacttcatgtggttcacctcattatgctgctcctgaaattgttagtggattaaaataccatggagccgcatcagatatttggtcctgtggggttatattatttgccttattaacaggtagattaccatttgacgacgaaaatatcaggaacttgcttttgaaagttcaagcaggtagttttgaaatgccatgtgaattaagtcctgaagcagtggatttaatcgataaaatgttgaccgttgatcctatgaagagaattccaactgaaaggatattgtctcatcctttattaactaaatacccaattccaaacgaagatttaataagtgtcaaaagtttacctcatcccgaaactgcttataagtctttaggttcggaaaagaatatcgataaacaaattttgcaaaacttgtccattttatggcacgatagatctcaaggggatatcgttgattgtttattaaagacgggatctaatcctgaaaagactttctacgcgttattaatgagatatagacataaccaggaagaatctgctggttcttcgccaacaagatcaaactcacaaaactttaataataagattggaaataaggataataatagaaaaaagagaatgagtcaagtcagtgcttcaacgtcgagaaataggccagttctgtttcagtataaaaatggaataaagtcctctattggcaatggaaatggtagactttcatcaacctcaagtgtcagcaattctcctcgcaagtctcctgtgcgtcgttcttctaacagatactcgtttgctcagtcacccagaaagtttggtggaacaagtgatgaaacaactctccacagttcatcagttcccagaaacatttataatgaaattgtcagtgctcaaagaaatggccaaggtgttatgcctcctcctttgccatcaaaggataatatggattctaaatccaatccaattgttgacgaagtaagtaatcaggatttattatcatcggcgaaaatatcaccaacaaagaacaaaaggggttcagttatcagaaatagcatttctaaaaacaggttatcaagaagaaaatcaagaacttcgtttacaccgggacttaaacgtaattcgataactacaaaattattatctacttatgccaagttagccggtgaaacagattgggaattcatggataagcaaactaaaagaacttcagctaccttcgctacgttatgtgataagatctttaatcaagaacaatatgatgcagaagatgaaaaattgattgacgaagaagaaaaacaagcaaaggaatatgaaaggttaatggaaatagaaaggaaaaaacacgaagctgagttaagagctaggaaagaattagctaaacaaagaaaaagagaaaagagaaaatcgttgctttcttccagaaaattatctattttggtcaaagacgacgcaaacaacagtgaacaggatataacggtaactgattcggatgcgctttctcaaccaaaaagacaatccagaaaccaagctatgcgttcaatttcggaaggtcatggcaaagaaagtgatgatttaacaaaggaggaccttgagaatttaaaaagaagatcagtaactcaacctactcccagaagaagaaagactccagttttaaccagaagaccagtttcgagattggatccattatggactgcctatgaaaatgaagagatagagagagcccaagatgcattggaagctgaatacagggatgctgatttcaaaactaaaaagaaaattaatagagagtctatggtatcggttatggatgataaagaggttgataatgaaccacacgttgatgatgatgctactgacgaagtccaagatgaggaagcagttaaggccaaatctcgcggttatgaattgcctgaaccagacatggaaagatctgatttaagtgatgagtatatgagtgagatcagaaaatctagattattgaattcacaattgaacataaatgcaattgccaatggtgaaaaagaagttaagtcagaaaagagacaggataaagaacctaaaactcttattggtgacgtcagaatcccaacagtaacaagaaaatcgagatgttttaccaattcaaacaaaagattgtctgttctaagtatgtactccaccaaacaatcgtatcgtgatttaaattcaattttaggtgatgaaaatgacgagaataatgacgtagaggggcaattaccacagttaagaaccagttttgctgatagattggatagagccggattagcagatgctgaagaagaggacgacgagccattagatgaaggttctatcatggattttgatcaacatctcgctaataagcgttcttcatattacgctggtgacaagtctagaagacaatcaagatattccacaacaaaaagaaattctcaagcaccaactgttgatgttccagctattccaaagaagtcaaacaaggagcgtgatagagaagatgatacttttgttactaaagatgacgatgttcatagaagaaagagtgcttattctgcaaaaggtgctaataataatgatgatgaggatatgatatttgagaatataaaattgcccaacgaagatagaagacaatcggcatctactgcgaagtcaaacaaaaagaagtcattccaacctagtgctgagtctatgttaatacctaatgttgataatattcctgaagatgctaaaacgcgaaagccagatccacgctctcagccatatgaaaaggttcgtaaacctaaggtttctaatggagaattaaaatccacaggtccagaaggccaagttaaaaatccattagaagataccacaaacgagcctagggagaatcaaaagagaaagggatctattttccgtaagttatcatggggatccaaaaaaacaatggacaattcagccgcccaattgccatctccagcagattctagggctccatcagtcgaagaaaagccaaaatcaaaatcaggattctttagatggttctcaagtagttcaaatcaaccaggtattgaatctgagattagaaggtttaaagcaatcttaccaaaacaagagatgtcatcagctttatttgcattattaaattcttggtctaattttggattaaaaaatttaagaaatgatacagttggttataatataacaggtgaaatttcaaaaaataatgcgtttaatttgaagaattgtaagtttagaataaaggttaatccaagagaatttaaccaaaaatctgaaattgtttgtgcaagagttaaagggtcgaaggttactactgataccttatttaaagaaattgagaaggtcttacaaaaggagggagttatggacatttaa

SEQ ID NO: 90172 - protein, 1314 aa, Debaryomyces hansenii CBS767
MSSHQRQDSIASLSSTATGNIHPQKIGPWKLGKTLGRGATGRVLLATHQSTGQKAAVKVVSKSELNDDEINKKSADEAGLPYGIEREIIIMKLLTHPNVLRLYDVWETSKALYLVLEYVEGGELFDLLVERGPLQEVEAIKYFRQIILGTAYCHALGICHRDLKPENLLLDSGLNVKLADFGMAALESNGKLLETSCGSPHYAAPEIVSGLKYHGAASDIWSCGVILFALLTGRLPFDDENIRNLLLKVQAGSFEMPCELSPEAVDLIDKMLTVDPMKRIPTERILSHPLLTKYPIPNEDLISVKSLPHPETAYKSLGSEKNIDKQILQNLSILWHDRSQGDIVDCLLKTGSNPEKTFYALLMRYRHNQEESAGSSPTRSNSQNFNNKIGNKDNNRKKRMSQVSASTSRNRPVLFQYKNGIKSSIGNGNGRLSSTSSVSNSPRKSPVRRSSNRYSFAQSPRKFGGTSDETTLHSSSVPRNIYNEIVSAQRNGQGVMPPPLPSKDNMDSKSNPIVDEVSNQDLLSSAKISPTKNKRGSVIRNSISKNRLSRRKSRTSFTPGLKRNSITTKLLSTYAKLAGETDWEFMDKQTKRTSATFATLCDKIFNQEQYDAEDEKLIDEEEKQAKEYERLMEIERKKHEAELRARKELAKQRKREKRKSLLSSRKLSILVKDDANNSEQDITVTDSDALSQPKRQSRNQAMRSISEGHGKESDDLTKEDLENLKRRSVTQPTPRRRKTPVLTRRPVSRLDPLWTAYENEEIERAQDALEAEYRDADFKTKKKINRESMVSVMDDKEVDNEPHVDDDATDEVQDEEAVKAKSRGYELPEPDMERSDLSDEYMSEIRKSRLLNSQLNINAIANGEKEVKSEKRQDKEPKTLIGDVRIPTVTRKSRCFTNSNKRLSVLSMYSTKQSYRDLNSILGDENDENNDVEGQLPQLRTSFADRLDRAGLADAEEEDDEPLDEGSIMDFDQHLANKRSSYYAGDKSRRQSRYSTTKRNSQAPTVDVPAIPKKSNKERDREDDTFVTKDDDVHRRKSAYSAKGANNNDDEDMIFENIKLPNEDRRQSASTAKSNKKKSFQPSAESMLIPNVDNIPEDAKTRKPDPRSQPYEKVRKPKVSNGELKSTGPEGQVKNPLEDTTNEPRENQKRKGSIFRKLSWGSKKTMDNSAAQLPSPADSRAPSVEEKPKSKSGFFRWFSSSSNQPGIESEIRRFKAILPKQEMSSALFALLNSWSNFGLKNLRNDTVGYNITGEISKNNAFNLKNCKFRIKVNPREFNQKSEIVCARVKGSKVTTDTLFKEIEKVLQKEGVMDI

SEQ ID NO: 90173 - DNA, 4050 bp, Candida albicans SC5314
  CDS (1)..(4050): transl_table=12
atgccacattcaagacaaccttcgatatcgtcatcgattatgtcccaatcaaatcataatcatccacagaagatcggaccttggaaattaggtaaaactttaggaagaggtgccaccggtagagtcttattagctactcatcaaactactggtcaaaaagctgccgttaaagtagtttccaaatccgaattacaagacgaagaaaccgagaaaaatggagatggattaccatatggtatagaaagagaaattattataatgaaattattaactcatcctaatgttttgagattatatgatgtatgggaaacatctaaggctctttatcttgttctagaatacgttgaaggtggagaattatttgatttattggtggaacgtggtccattacctgaagtcgaggctatcaagtatttccgtcaaatcatattgggtacggcttattgtcatgctcttggtatatgtcacagagatttaaaaccagagaatttgttactagattctcaattgaatgtaaaattagccgattttggaatggcagctttagaaagtaacggcaaattattagagacttcttgtggttcacctcattatgctgctccagaaatcgttagtggattgaaatatcatggagctgcttctgatgtttggtcttgtggggttatattatttgccttgttgacaggtagattaccctttgatgatgaaaatattagaaatttacttcttaaagtccaggctggtaactttgaaatgcccgttgatgaagttagcagagaagctagagatttaattgctagaatgttagaggttgatcctatgagaagaatatctactgaaaaaatcttaagacacccattgttaaccaaatacccaatgtcaaacgaagatttaatcagtgaaaaatcattaccacatccacaaactggttacaaatctttagggtcagttagaaacattgataaacagattttatcaaacttgacaattttatggaatgatagacccgaagaggaaattgttgattgtcttttgaaagatggatccaatccagaaaaaacattctatgcattattgatgagatacaagcataatcaagaagataacactaataacaattcaccaaagaaatcaacgagtttcaataataaagtggtacgcagtgggtccaaatacagtcttaatggaacccctagaagaaaaagagccagtcacataagtgtgtcaagaccaacatctttccaatacaagtctaatcctggcgctggtgcaacagcaaatagaaactccgttgccagacattctgtggcttcctcggccaacaattctcctcgtaaatcaccatacaagtcaccatacagatcaccttatagatcaccatataaatcgccttctaagagatattcatataatcaatccccaactaaatctccttacggaagaagatcaaattcacaaagacaatttgaaaatgaaccattaaaggcaaagccaagaaatatttacaatgagattgttgatgcacaaagcaacttttctctacctccatcgcttccaccttccttaccttcaaaagattctcgttatatgatcgatgaacccaatcaaccccagttgcaacaacctgctttaagtcaagtccctgaaaatcctattgttgatgaatcccctgatttaatgcagtcagcaaaaatttctagtggaaagagaaattcaataataggaaagaacaacaacaacagcaacagcaacaagagaatgtctaagagaaaatcaattcgtgcatctatgaccacgggattgaaaagaaattccataaccatgaaattgttatctacttatgctaaattatcaggtgatgacgactgggaatacatggataaacaaacaaaaagaacatcggctacttttgcagcattgtgtgacaaaatatttaatcaagaagactatgacgaagaagacgaacaattagttgatcctgaagaaaaggaagccaaggaatatgaaaggttaatggaattggaaagaaagaaacatgaagctgagttgaaagctagaagagaattagaaaagaagaaaagaagacaaaagagacgttccattttgagttctaagaaattaagtattattgtcaagaatgatgctgatccaaataatagtgaacaagagttggtcgatgaaggtataaaacaaccaaaacgtcaatccaaaaacttgaccgctttaagagcattatctgaaggaaatcatgcatctgaagaattgacattggaagacgttgagaatttgaagagacgatcagcatcacagccggttccaaaaagaagacaaactccggttttgacaagaagacctgtatcaagattagatccattatggcaagcacacgagaatgaacagttagatagagcaaaagatgccttggaacaagaatggagggattcacaaaagagaagttctactgttagtcgtaaaaaagtcaacagagagtcgatgatatcagttatggatgatattgttgaagaggaccaaggccgtgtcaacaggagatcaacacgaaacacttactatgaaagggaaagagactatgaattaccagaaccaactgtggaagattccaacttgactgatgactacatgacagaaatcagaaaatcaagacttttgaacagtcagttaaatgttagggatccacttaatgaaaaaagaaaatctgaacccaagactcttattagcaatgttcaaataccgagtgttactagaaaatcaagaaatttcactacttccaacaaaaggttgtcggtattgtctatgtattcaacaaaggaatcataccgtgatttgaattctataattaactcaccagatgaaaaccccgaacagcatcaaaacatgaacaagccagcgttacgaaccagtattgctgatcgtttggataaagctggattggctgaaccagaatatgaaactgagactgatggtgaagataaagtgtctgttattgatttggatgatcatttagctgatagaaggacttcctattatgatggatctggaaagagagcatctagagcttcaacaactaaacgttacaatgttcattccagttcagggcaaagaccaaaatccaaagttcctgatttgccaaagaatgattatgatgacacatttgtcagtaatagtgatgaagttcataagcgtcagtataaatcgatggtttctgatgagtctagtgcatctgatgatgtatttgataagattaaattaccagatggtaaatcaactaaatcttccattgatgaattggctaacggcacgtctacaagtggtcatagaaaaccaaagataagacattctcaaccgggcccagaaatgttgattcctcatttgaatggaggtattgagtcgtctcaaccaatgtctaaagttcgtggtaacaattcaagtggtcatgatgatagtgttccaccaccaccgccagctcacaaggtgaataaaaaaccattggatgataagacgaatttccctccaccagaagtggatccaaaaagaaaaggttcattttttagaaaactttcttggggatccaaaaaaaccattgaaaataatacaaacgccgccactaataccacgactcaacaacaattaccaagtcctgctgaatcaaaagaggagaaaccaaaaagttcatttttcagatggttttcgtcatctaatactccatctgctgctgaaattagaaaattcaacactattttacccaaacatgaaatgtctactgctttatttgctttattgaattcttggtctaattttggtttgaaagatttacggaatgatcaagttggatattatattactggtgctatttctaaacataattcttttaatttaaagagttgtaaatttagaattaagattaatcaaagagattttaatcaaaaatcagaaattgtttgtgttagagtgaaaggatctaaagttacaactgatactttattttctgaaattgaaaaggtcttactcaaagaaggtgttttagataaataa

SEQ ID NO: 90174 - protein, 1349 aa, Candida albicans SC5314
MPHSRQPSISSSIMSQSNHNHPQKIGPWKLGKTLGRGATGRVLLATHQTTGQKAAVKVVSKSELQDEETEKNGDGLPYGIEREIIIMKLLTHPNVLRLYDVWETSKALYLVLEYVEGGELFDLLVERGPLPEVEAIKYFRQIILGTAYCHALGICHRDLKPENLLLDSQLNVKLADFGMAALESNGKLLETSCGSPHYAAPEIVSGLKYHGAASDVWSCGVILFALLTGRLPFDDENIRNLLLKVQAGNFEMPVDEVSREARDLIARMLEVDPMRRISTEKILRHPLLTKYPMSNEDLISEKSLPHPQTGYKSLGSVRNIDKQILSNLTILWNDRPEEEIVDCLLKDGSNPEKTFYALLMRYKHNQEDNTNNNSPKKSTSFNNKVVRSGSKYSLNGTPRRKRASHISVSRPTSFQYKSNPGAGATANRNSVARHSVASSANNSPRKSPYKSPYRSPYRSPYKSPSKRYSYNQSPTKSPYGRRSNSQRQFENEPLKAKPRNIYNEIVDAQSNFSLPPSLPPSLPSKDSRYMIDEPNQPQLQQPALSQVPENPIVDESPDLMQSAKISSGKRNSIIGKNNNNSNSNKRMSKRKSIRASMTTGLKRNSITMKLLSTYAKLSGDDDWEYMDKQTKRTSATFAALCDKIFNQEDYDEEDEQLVDPEEKEAKEYERLMELERKKHEAELKARRELEKKKRRQKRRSILSSKKLSIIVKNDADPNNSEQELVDEGIKQPKRQSKNLTALRALSEGNHASEELTLEDVENLKRRSASQPVPKRRQTPVLTRRPVSRLDPLWQAHENEQLDRAKDALEQEWRDSQKRSSTVSRKKVNRESMISVMDDIVEEDQGRVNRRSTRNTYYERERDYELPEPTVEDSNLTDDYMTEIRKSRLLNSQLNVRDPLNEKRKSEPKTLISNVQIPSVTRKSRNFTTSNKRLSVLSMYSTKESYRDLNSIINSPDENPEQHQNMNKPALRTSIADRLDKAGLAEPEYETETDGEDKVSVIDLDDHLADRRTSYYDGSGKRASRASTTKRYNVHSSSGQRPKSKVPDLPKNDYDDTFVSNSDEVHKRQYKSMVSDESSASDDVFDKIKLPDGKSTKSSIDELANGTSTSGHRKPKIRHSQPGPEMLIPHLNGGIESSQPMSKVRGNNSSGHDDSVPPPPPAHKVNKKPLDDKTNFPPPEVDPKRKGSFFRKLSWGSKKTIENNTNAATNTTTQQQLPSPAESKEEKPKSSFFRWFSSSNTPSAAEIRKFNTILPKHEMSTALFALLNSWSNFGLKDLRNDQVGYYITGAISKHNSFNLKSCKFRIKINQRDFNQKSEIVCVRVKGSKVTTDTLFSEIEKVLLKEGVLDK

SEQ ID NO: 90175 - DNA, 25 bp, Artificial sequence
  primer
atggcaatcaatggtaacagtattc

SEQ ID NO: 90176 - DNA, 25 bp, Artificial sequence
  primer
ctatttttgtagaacgccttcctta

SEQ ID NO: 90177 - protein, 1366 aa, Artificial sequence
  consensus sequence
  Variant (8)..(8): Xaa in position 8 is any amino acid
  Variant (12)..(12): Xaa in position 12 is any amino acid
  Variant (14)..(14): Xaa in position 14 is any amino acid
  Variant (17)..(17): Xaa in position 17 is any amino acid
  Variant (19)..(19): Xaa in position 19 is any amino acid
  Variant (22)..(25): Xaa in position 22 to 25 is any amino acid
  Variant (29)..(29): Xaa in position 29 is any amino acid
  Variant (35)..(35): Xaa in position 35 is any amino acid
  Variant (38)..(51): Xaa in position 38 to 51 is any amino acid
  Variant (52)..(58): Xaa in position 52 to 58 is any or no amino acid
  Variant (74)..(74): Xaa in position 74 is any amino acid
  Variant (88)..(90): Xaa in position 88 to 90 is any amino acid
  Variant (98)..(98): Xaa in position 98 is any amino acid
  Variant (100)..(100): Xaa in position 100 is any amino acid
  Variant (105)..(105): Xaa in position 105 is any amino acid
  Variant (116)..(116): Xaa in position 116 is any amino acid
  Variant (119)..(121): Xaa in position 119 to 121 is any amino acid
  Variant (127)..(127): Xaa in position 127 is any amino acid
  Variant (129)..(130): Xaa in position 129 to 130 is any amino acid
  Variant (138)..(138): Xaa in position 138 is any amino acid
  Variant (151)..(153): Xaa in position 151 to 153 is any amino acid
  Variant (155)..(155): Xaa in position 155 is any amino acid
  Variant (157)..(157): Xaa in position 157 is any amino acid
  Variant (168)..(169): Xaa in position 168 to 169 is any amino acid
  Variant (191)..(191): Xaa in position 191 is any amino acid
  Variant (193)..(193): Xaa in position 193 is any amino acid
  Variant (195)..(196): Xaa in position 195 to 196 is any amino acid
  Variant (218)..(218): Xaa in position 218 is any amino acid
  Variant (220)..(221): Xaa in position 220 to 221 is any amino acid
  Variant (232)..(232): Xaa in position 232 is any amino acid
  Variant (234)..(234): Xaa in position 234 is any amino acid
  Variant (239)..(239): Xaa in position 239 is any amino acid
  Variant (241)..(241): Xaa in position 241 is any amino acid
  Variant (243)..(243): Xaa in position 243 is any amino acid
  Variant (245)..(245): Xaa in position 245 is any amino acid
  Variant (248)..(248): Xaa in position 248 is any amino acid
  Variant (252)..(254): Xaa in position 252 to 254 is any amino acid
  Variant (260)..(261): Xaa in position 260 to 261 is any amino acid
  Variant (264)..(264): Xaa in position 264 is any amino acid
  Variant (266)..(267): Xaa in position 266 to 267 is any amino acid
  Variant (270)..(270): Xaa in position 270 is any amino acid
  Variant (275)..(275): Xaa in position 275 is any amino acid
  Variant (279)..(281): Xaa in position 279 to 281 is any amino acid
  Variant (282)..(282): Xaa in position 282 is any or no amino acid
  Variant (284)..(285): Xaa in position 284 to 285 is any amino acid
  Variant (287)..(289): Xaa in position 287 to 289 is any amino acid
  Variant (292)..(294): Xaa in position 292 to 294 is any amino acid
  Variant (296)..(299): Xaa in position 296 to 299 is any amino acid
  Variant (301)..(305): Xaa in position 301 to 305 is any amino acid
  Variant (306)..(308): Xaa in position 306 to 308 is any or no amino acid
  Variant (311)..(312): Xaa in position 311 to 312 is any amino acid
  Variant (318)..(318): Xaa in position 318 is any amino acid
  Variant (323)..(323): Xaa in position 323 is any amino acid
  Variant (325)..(328): Xaa in position 325 to 328 is any amino acid
  Variant (330)..(332): Xaa in position 330 to 332 is any amino acid
  Variant (334)..(336): Xaa in position 334 to 336 is any amino acid
  Variant (338)..(338): Xaa in position 338 is any amino acid
  Variant (340)..(340): Xaa in position 340 is any amino acid
  Variant (344)..(344): Xaa in position 344 is any amino acid
  Variant (349)..(349): Xaa in position 349 is any amino acid
  Variant (351)..(351): Xaa in position 351 is any amino acid
  Variant (353)..(366): Xaa in position 353 to 366 is any amino acid
  Variant (367)..(374): Xaa in position 367 to 374 is any or no amino acid
  Variant (376)..(390): Xaa in position 376 to 390 is any amino acid
  Variant (391)..(397): Xaa in position 391 to 397 is any or no amino acid
  Variant (400)..(400): Xaa in position 400 is any amino acid
  Variant (402)..(402): Xaa in position 402 is any amino acid
  Variant (404)..(405): Xaa in position 404 to 405 is any amino acid
  Variant (407)..(408): Xaa in position 407 to 408 is any amino acid
  Variant (409)..(410): Xaa in position 409 to 410 is any or no amino acid
  Variant (413)..(413): Xaa in position 413 is any amino acid
  Variant (415)..(422): Xaa in position 415 to 422 is any amino acid
  Variant (423)..(438): Xaa in position 423 to 438 is any or no amino acid
  Variant (441)..(443): Xaa in position 441 to 443 is any amino acid
  Variant (444)..(444): Xaa in position 444 is any or no amino acid
  Variant (446)..(448): Xaa in position 446 to 448 is any amino acid
  Variant (449)..(466): Xaa in position 449 to 466 is any or no amino acid
  Variant (469)..(469): Xaa in position 469 is any amino acid
  Variant (471)..(473): Xaa in position 471 to 473 is any amino acid
  Variant (475)..(476): Xaa in position 475 to 476 is any amino acid
  Variant (478)..(487): Xaa in position 478 to 487 is any amino acid
  Variant (488)..(521): Xaa in position 488 to 521 is any or no amino acid
  Variant (523)..(523): Xaa in position 523 is any amino acid
  Variant (525)..(532): Xaa in position 525 to 532 is any amino acid
  Variant (533)..(565): Xaa in position 533 to 565 is any or no amino acid
  Variant (567)..(591): Xaa in position 567 to 591 is any amino acid
  Variant (592)..(594): Xaa in position 592 to 594 is any or no amino acid
  Variant (596)..(596): Xaa in position 596 is any amino acid
  Variant (598)..(599): Xaa in position 598 to 599 is any amino acid
  Variant (601)..(602): Xaa in position 601 to 602 is any amino acid
  Variant (605)..(605): Xaa in position 605 is any amino acid
  Variant (607)..(607): Xaa in position 607 is any amino acid
  Variant (612)..(613): Xaa in position 612 to 613 is any amino acid
  Variant (619)..(620): Xaa in position 619 to 620 is any amino acid
  Variant (622)..(622): Xaa in position 622 is any amino acid
  Variant (627)..(628): Xaa in position 627 to 628 is any amino acid
  Variant (630)..(630): Xaa in position 630 is any amino acid
  Variant (636)..(637): Xaa in position 636 to 637 is any amino acid
  Variant (642)..(642): Xaa in position 642 is any amino acid
  Variant (644)..(644): Xaa in position 644 is any amino acid
  Variant (647)..(648): Xaa in position 647 to 648 is any amino acid
  Variant (650)..(650): Xaa in position 650 is any amino acid
  Variant (652)..(658): Xaa in position 652 to 658 is any amino acid
  Variant (659)..(661): Xaa in position 659 to 661 is any or no amino acid
  Variant (664)..(664): Xaa in position 664 is any amino acid
  Variant (666)..(666): Xaa in position 666 is any amino acid
  Variant (668)..(669): Xaa in position 668 to 669 is any amino acid
  Variant (671)..(675): Xaa in position 671 to 675 is any amino acid
  Variant (677)..(680): Xaa in position 677 to 680 is any amino acid
  Variant (682)..(692): Xaa in position 682 to 692 is any amino acid
  Variant (693)..(695): Xaa in position 693 to 695 is any or no amino acid
  Variant (698)..(705): Xaa in position 698 to 705 is any amino acid
  Variant (706)..(707): Xaa in position 706 to 707 is any or no amino acid
  Variant (709)..(721): Xaa in position 709 to 721 is any amino acid
  Variant (723)..(731): Xaa in position 723 to 731 is any amino acid
  Variant (732)..(739): Xaa in position 732 to 739 is any or no amino acid
  Variant (741)..(747): Xaa in position 741 to 747 is any amino acid
  Variant (748)..(748): Xaa in position 748 is any or no amino acid
  Variant (750)..(758): Xaa in position 750 to 758 is any amino acid
  Variant (759)..(763): Xaa in position 759 to 763 is any or no amino acid
  Variant (765)..(771): Xaa in position 765 to 771 is any amino acid
  Variant (772)..(777): Xaa in position 772 to 777 is any or no amino acid
  Variant (779)..(783): Xaa in position 779 to 783 is any amino acid
  Variant (785)..(786): Xaa in position 785 to 786 is any amino acid
  Variant (795)..(825): Xaa in position 795 to 825 is any amino acid
  Variant (826)..(841): Xaa in position 826 to 841 is any or no amino acid
  Variant (843)..(860): Xaa in position 843 to 860 is any amino acid
  Variant (861)..(868): Xaa in position 861 to 868 is any or no amino acid
  Variant (870)..(876): Xaa in position 870 to 876 is any amino acid
  Variant (877)..(880): Xaa in position 877 to 880 is any or no amino acid
  Variant (882)..(886): Xaa in position 882 to 886 is any amino acid
  Variant (888)..(909): Xaa in position 888 to 909 is any amino acid
  Variant (910)..(926): Xaa in position 910 to 926 is any or no amino acid
  Variant (929)..(932): Xaa in position 929 to 932 is any amino acid
  Variant (934)..(935): Xaa in position 934 to 935 is any amino acid
  Variant (941)..(941): Xaa in position 941 is any amino acid
  Variant (943)..(944): Xaa in position 943 to 944 is any amino acid
  Variant (959)..(959): Xaa in position 959 is any amino acid
  Variant (961)..(963): Xaa in position 961 to 963 is any amino acid
  Variant (965)..(966): Xaa in position 965 to 966 is any amino acid
  Variant (969)..(992): Xaa in position 969 to 992 is any amino acid
  Variant (993)..(994): Xaa in position 993 to 994 is any or no amino acid
  Variant (996)..(1002): Xaa in position 996 to 1002 is any amino acid
  Variant (1003)..(1003): Xaa in position 1003 is any or no amino acid
  Variant (1005)..(1035): Xaa in position 1005 to 1035 is any amino acid
  Variant (1036)..(1048): Xaa in position 1036 to 1048 is any or no amino acid
  Variant (1050)..(1055): Xaa in position 1050 to 1055 is any amino acid
  Variant (1056)..(1062): Xaa in position 1056 to 1062 is any or no amino acid
  Variant (1064)..(1064): Xaa in position 1064 is any amino acid
  Variant (1067)..(1070): Xaa in position 1067 to 1070 is any amino acid
  Variant (1072)..(1144): Xaa in position 1072 to 1144 is any amino acid
  Variant (1145)..(1199): Xaa in position 1145 to 1199 is any or no amino acid
  Variant (1202)..(1203): Xaa in position 1202 to 1203 is any amino acid
  Variant (1205)..(1206): Xaa in position 1205 to 1206 is any amino acid
  Variant (1209)..(1209): Xaa in position 1209 is any amino acid
  Variant (1211)..(1211): Xaa in position 1211 is any amino acid
  Variant (1214)..(1218): Xaa in position 1214 to 1218 is any amino acid
  Variant (1220)..(1220): Xaa in position 1220 is any amino acid
  Variant (1221)..(1252): Xaa in position 1221 to 1252 is any or no amino acid
  Variant (1254)..(1270): Xaa in position 1254 to 1270 is any amino acid
  Variant (1271)..(1280): Xaa in position 1271 to 1280 is any or no amino acid
  Variant (1282)..(1283): Xaa in position 1282 to 1283 is any amino acid
  Variant (1286)..(1287): Xaa in position 1286 to 1287 is any amino acid
  Variant (1289)..(1291): Xaa in position 1289 to 1291 is any amino acid
  Variant (1295)..(1304): Xaa in position 1295 to 1304 is any amino acid
  Variant (1308)..(1312): Xaa in position 1308 to 1312 is any amino acid
  Variant (1314)..(1316): Xaa in position 1314 to 1316 is any amino acid
  Variant (1318)..(1318): Xaa in position 1318 is any amino acid
  Variant (1320)..(1321): Xaa in position 1320 to 1321 is any amino acid
  Variant (1323)..(1323): Xaa in position 1323 is any amino acid
  Variant (1325)..(1332): Xaa in position 1325 to 1332 is any amino acid
  Variant (1333)..(1334): Xaa in position 1333 to 1334 is any or no amino acid
  Variant (1336)..(1341): Xaa in position 1336 to 1341 is any amino acid
  Variant (1343)..(1343): Xaa in position 1343 is any amino acid
  Variant (1346)..(1351): Xaa in position 1346 to 1351 is any amino acid
  Variant (1353)..(1354): Xaa in position 1353 to 1354 is any amino acid
  Variant (1356)..(1356): Xaa in position 1356 is any amino acid
  Variant (1361)..(1361): Xaa in position 1361 is any amino acid
IGPWKLGXTLGXGXTGXVXLAXXXXTGQXAAVKVXSKXXXXXXXXXXXXXXXXXXXXXLPYGIEREIIIMKLLXHPNVLRLYDVWETXXXLYLVLEYXEXGELFXLLVERGPLPEXEAXXXFRQIIXGXXYCHALGIXHRDLKPENLLLDXXXNXKXADFGMAALESXXKLLETSCGSPHYAAPEIVSGLXYXGXXSDVWSCGVILFALLTGRLPFDXEXXNIRNLLLKVQXGXFEMPXDXEXSXEAXDLIXXXLTVDPXXRIXTXXILXHPLLXKYPXXXXDXXSXXXLPXXXTXXXXLXXXXXXXXIDXXILQNLXILWHXRXXXXIXXXLXXXGXNXEKTXYALLXRXKXXXXXXXXXXXXXXXXXXXXXXSXXXXXXXXXXXXXXXXXXXXXXKRXSXIXXSXXXXRPXSXXXXXXXXXXXXXXXXXXXXXXXXSSXXXXPXXXXXXXXXXXXXXXXXXXXXKRXSXXXSXXKXXXXXXXXXXXXXXXXXXXXXXXXXXXXXXXXXXXXXXXXXXXXPXPXXXXXXXXXXXXXXXXXXXXXXXXXXXXXXXXXXXXXXXXXIXXXXXXXXXXXXXXXXXXXXXXXXXXXXRXSXXPXXKRXSXTTKLXXTYAKLXXDXDWEYXXKXTKRTSXXFATLXDXIFXXEXYXXXXXXXXXXEEXEXKXXEXXXXXEXXXXEXXXXXXXXXXXXXXREXXXXXXXXXXLXXXXXXXXXXXXXEXXXXXXXXXXXXXXXXXNXXXXXXXXEXXXXXXXXXXXXXXEXXXXXXXXXXXXXRXXXXXLXXRPVSRLDPXXXXXXXXXXXXXXXXXXXXXXXXXXXXXXXXXXXXXXXXXXXXXXXKXXXXXXXXXXXXXXXXXXXXXXXXXXRXXXXXXXXXXXSXXXXXYXXXXXXXXXXXXXXXXXXXXXXXXXXXXXXXXXXXXXXXISXXXXPXXTRKSRXFXXSNKRLSVLSMYSTKXSXXXLXXILXXXXXXXXXXXXXXXXXXXXXXXXXXLXXXXXXXXEXXXXXXXXXXXXXXXXXXXXXXXXXXXXXXXXXXXXXXXXXXXXNXXXXXXXXXXXXXPXLPXXXXDXXXXXXXXXXXXXXXXXXXXXXXXXXXXXXXXXXXXXXXXXXXXXXXXXXXXXXXXXXXXXXXXXXXXXXXXXXXXXXXXXXXXXXXXXXXXXXXXXXXXXXXXXXXXXXXXXXXXXXXXXXXXXXXXKRXXSXXRKXSXGSXXXXXNXXXXXXXXXXXXXXXXXXXXXXXXXXXXXXXXXSXXXXXXXXXXXXXXXXXXXXXXXXXXXLXXLLXXWXXXGLKXXXXXXXXXXITGXXXXXNXXXLXSXXFXIXXXXXXXXXXSXXXXXXVXGSXXXXXXLXXEXEKVLXKEGVL

SEQ ID NO: 90178 - protein, 60 aa, Artificial sequence
  protein pattern
  Variant (7)..(7): Xaa in position 7 is Asn or Ser
  Variant (8)..(8): Xaa in position 8 is any amino acid
  Variant (9)..(9): Xaa in position 9 is Ala or Asp
  Variant (12)..(12): Xaa in position 12 is Leu or Met
  Variant (17)..(17): Xaa in position 17 is Ala or Val
  Variant (19)..(19): Xaa in position 19 is any amino acid
  Variant (24)..(24): Xaa in position 24 is Asp or Asn
  Variant (33)..(33): Xaa in position 33 is Pro or Gln
  Variant (35)..(35): Xaa in position 35 is any amino acid
  Variant (38)..(38): Xaa in position 38 is Ile or Val
  Variant (39)..(39): Xaa in position 39 is Lys or Arg
  Variant (40)..(40): Xaa in position 40 is Phe or Tyr
  Variant (46)..(46): Xaa in position 46 is Ile or Leu
  Variant (48)..(48): Xaa in position 48 is any amino acid
  Variant (49)..(49): Xaa in position 49 is Ala or Ser
  Variant (57)..(57): Xaa in position 57 is Cys or Val
YDVWETXXXLYXVLEYXEXGELFXLLVERGPLXEXEAXXXFRQIIXGXXYCHALGIXHRD

SEQ ID NO: 90179 - protein, 57 aa, Artificial sequence
  protein pattern
  Variant (2)..(3): Xaa in position 2 to 3 is any amino acid
  Variant (5)..(5): Xaa in position 5 is Gly, Asn or Ser
  Variant (6)..(6): Xaa in position 6 is Leu or Met
  Variant (9)..(9): Xaa in position 9 is Glu, Gly, Asn or Gln
  Variant (11)..(11): Xaa in position 11 is Ile or Val
  Variant (16)..(16): Xaa in position 16 is Ile, Leu or Met
  Variant (17)..(17): Xaa in position 17 is Ala or Ser
  Variant (23)..(23): Xaa in position 23 is Ala or Ser
  Variant (24)..(24): Xaa in position 24 is Glu or Gly
  Variant (25)..(25): Xaa in position 25 is Asp or Glu
  Variant (26)..(26): Xaa in position 26 is Asp, Ser or Thr
  Variant (27)..(27): Xaa in position 27 is Asp or Glu
  Variant (30)..(30): Xaa in position 30 is Phe or Tyr
  Variant (31)..(31): Xaa in position 31 is Ile or Met
  Variant (32)..(32): Xaa in position 32 is Asp or Glu
  Variant (33)..(33): Xaa in position 33 is Lys or Arg
  Variant (34)..(34): Xaa in position 34 is Glu or Gln
  Variant (40)..(40): Xaa in position 40 is Ala, Gln or Ser
  Variant (41)..(41): Xaa in position 41 is Asp, Asn or Thr
  Variant (46)..(46): Xaa in position 46 is any amino acid
  Variant (48)..(48): Xaa in position 48 is any amino acid
  Variant (51)..(51): Xaa in position 51 is Glu or Asn
  Variant (52)..(52): Xaa in position 52 is any amino acid
  Variant (54)..(54): Xaa in position 54 is any amino acid
  Variant (56)..(56): Xaa in position 56 is Asp or Glu
  Variant (57)..(57): Xaa in position 57 is Ala or Gln
SXXPXXKRXSXTTKLXXTYAKLXXXXXWEXXXXXTKRTSXXFATLXDXIFXXEXYXX

SEQ ID NO: 90180 - protein, 42 aa, Artificial sequence
  protein pattern
  Variant (5)..(5): Xaa in position 5 is Ser or Val
  Variant (6)..(6): Xaa in position 6 is Ile or Val
  Variant (10)..(10): Xaa in position 10 is Asp or Gly
  Variant (11)..(11): Xaa in position 11 is Lys or Arg
  Variant (12)..(12): Xaa in position 12 is Asp, Asn or Ser
  Variant (13)..(14): Xaa in position 13 to 14 is any amino acid
  Variant (15)..(15): Xaa in position 15 is Asp, Glu or Gly
  Variant (17)..(17): Xaa in position 17 is any amino acid
  Variant (18)..(18): Xaa in position 18 is Ala, Asp, Glu or Thr
  Variant (19)..(19): Xaa in position 19 is any amino acid
  Variant (21)..(21): Xaa in position 21 is any amino acid
  Variant (22)..(22): Xaa in position 22 is Glu or Lys
  Variant (23)..(23): Xaa in position 23 is Pro or Thr
  Variant (25)..(25): Xaa in position 25 is Ala or Ser
  Variant (27)..(27): Xaa in position 27 is any amino acid
  Variant (31)..(31): Xaa in position 31 is Phe or Leu
  Variant (36)..(36): Xaa in position 36 is any amino acid
  Variant (38)..(38): Xaa in position 38 is Phe or Tyr
  Variant (39)..(39): Xaa in position 39 is Lys or Arg
  Variant (40)..(40): Xaa in position 40 is any amino acid
  Variant (41)..(41): Xaa in position 41 is Asp or Asn
  Variant (42)..(42): Xaa in position 42 is Asn, Gln or Thr
LQNLXXLWHXXXXXXIXXXLXXXGXNXEKTXYALLXRXXXXX

SEQ ID NO: 90181 - protein, 43 aa, Artificial sequence
  protein pattern
  Variant (8)..(8): Xaa in position 8 is Glu or Lys
  Variant (12)..(12): Xaa in position 12 is any amino acid
  Variant (14)..(14): Xaa in position 14 is Ala or Ser
  Variant (17)..(17): Xaa in position 17 is Lys or Arg
  Variant (19)..(19): Xaa in position 19 is any or no amino acid
  Variant (21)..(21): Xaa in position 21 is any or no amino acid
  Variant (23)..(24): Xaa in position 23 to 24 is any amino acid
  Variant (25)..(25): Xaa in position 25 is Glu, Gly or Gln
  Variant (26)..(26): Xaa in position 26 is Ser or Thr
  Variant (28)..(28): Xaa in position 28 is any amino acid
  Variant (30)..(30): Xaa in position 30 is any amino acid
  Variant (36)..(36): Xaa in position 36 is Ile or Val
  Variant (39)..(39): Xaa in position 39 is Ala or Ser
  Variant (40)..(40): Xaa in position 40 is any amino acid
  Variant (41)..(41): Xaa in position 41 is Phe or Leu
  Variant (42)..(42): Xaa in position 42 is Glu, Asn or Gln
  Variant (43)..(43): Xaa in position 43 is Ala, Asp or Thr
IGPWKLGXTLGXGXTGXVXLXAXXXXTXQXAAVKVXSKXXXXX

SEQ ID NO: 90182 - protein, 41 aa, Artificial sequence
  protein pattern
  Variant (2)..(2): Xaa in position 2 is any amino acid
  Variant (3)..(3): Xaa in position 3 is any or no amino acid
  Variant (5)..(6): Xaa in position 5 to 6 is any or no amino acid
  Variant (8)..(8): Xaa in position 8 is Gln, Ser or Thr
  Variant (9)..(9): Xaa in position 9 is Phe or Val
  Variant (15)..(15): Xaa in position 15 is any amino acid
  Variant (17)..(17): Xaa in position 17 is Ser or Thr
  Variant (18)..(18): Xaa in position 18 is Glu, Asn or Thr
  Variant (21)..(21): Xaa in position 21 is Lys or Arg
  Variant (33)..(33): Xaa in position 33 is Glu or Gln
  Variant (35)..(35): Xaa in position 35 is Phe or Tyr
  Variant (36)..(36): Xaa in position 36 is any amino acid
  Variant (37)..(37): Xaa in position 37 is Asp or Asn
  Variant (39)..(39): Xaa in position 39 is Ala, Asn or Val
  Variant (40)..(40): Xaa in position 40 is Asp or Ser
IXXVXXPXXTRKSRXFXXSNXRLSVLSMYSTKXSXXXLXXI

SEQ ID NO: 90183 - protein, 40 aa, Artificial sequence
  protein pattern
  Variant (2)..(2): Xaa in position 2 is any or no amino acid
  Variant (4)..(4): Xaa in position 4 is Ile or Val
  Variant (5)..(5): Xaa in position 5 is Ser or Thr
  Variant (6)..(6): Xaa in position 6 is any amino acid
  Variant (9)..(9): Xaa in position 9 is Gln or Arg
  Variant (12)..(12): Xaa in position 12 is any amino acid
  Variant (13)..(13): Xaa in position 13 is any or no amino acid
  Variant (15)..(15): Xaa in position 15 is any amino acid
  Variant (16)..(16): Xaa in position 16 is any or no amino acid
  Variant (18)..(18): Xaa in position 18 is Glu or Thr
  Variant (22)..(23): Xaa in position 22 to 23 is any amino acid
  Variant (26)..(27): Xaa in position 26 to 27 is any amino acid
  Variant (28)..(28): Xaa in position 28 is Glu or Arg
  Variant (29)..(29): Xaa in position 29 is Asp, Glu or Lys
  Variant (32)..(32): Xaa in position 32 is Lys or Arg
  Variant (37)..(37): Xaa in position 37 is any amino acid
DXEXXXEAXDLXXRXXLXVDPXXRIXXXXILXHPLLXKYP

SEQ ID NO: 90184 - protein, 21 aa, Artificial sequence
  protein pattern
  Variant (15)..(15): Xaa in position 15 is Asn or Thr
PYGIEREIIIMKLLXHPNVLR

SEQ ID NO: 90185 - protein, 53 aa, Artificial sequence
  protein pattern
  Variant (2)..(2): Xaa in position 2 is Ala, Asn or Ser
  Variant (3)..(3): Xaa in position 3 is Gly or Leu
  Variant (5)..(6): Xaa in position 5 to 6 is any amino acid
  Variant (7)..(10): Xaa in position 7 to 10 is any or no amino acid
  Variant (12)..(12): Xaa in position 12 is Ser or Thr
  Variant (13)..(13): Xaa in position 13 is any amino acid
  Variant (14)..(14): Xaa in position 14 is Phe or Tyr
  Variant (18)..(18): Xaa in position 18 is Asp, Gly or Asn
  Variant (19)..(19): Xaa in position 19 is Ile or Leu
  Variant (20)..(21): Xaa in position 20 to 21 is any amino acid
  Variant (22)..(22): Xaa in position 22 is Asp or His
  Variant (23)..(23): Xaa in position 23 is Pro, Gln, Ser or Thr
  Variant (24)..(24): Xaa in position 24 is Asn, Thr or Val
  Variant (25)..(25): Xaa in position 25 is Gly, Asn or Ser
  Variant (26)..(27): Xaa in position 26 to 27 is any amino acid
  Variant (28)..(28): Xaa in position 28 is Ile or Leu
  Variant (31)..(31): Xaa in position 31 is any amino acid
  Variant (32)..(32): Xaa in position 32 is Ile or Leu
  Variant (33)..(33): Xaa in position 33 is Ala or Ser
  Variant (34)..(35): Xaa in position 34 to 35 is any amino acid
  Variant (37)..(37): Xaa in position 37 is any amino acid
  Variant (38)..(38): Xaa in position 38 is Phe or Leu
  Variant (39)..(39): Xaa in position 39 is Asn or Ser
  Variant (40)..(40): Xaa in position 40 is Phe or Leu
  Variant (41)..(41): Xaa in position 41 is Lys or Arg
  Variant (42)..(42): Xaa in position 42 is Asn or Ser
  Variant (43)..(43): Xaa in position 43 is Cys or Thr
  Variant (44)..(44): Xaa in position 44 is any amino acid
  Variant (46)..(46): Xaa in position 46 is Glu, Arg or Ser
  Variant (47)..(47): Xaa in position 47 is Ile or Val
  Variant (48)..(48): Xaa in position 48 is any amino acid
  Variant (49)..(49): Xaa in position 49 is Ile or Val
  Variant (50)..(50): Xaa in position 50 is any amino acid
  Variant (51)..(51): Xaa in position 51 is Pro, Gln or Ser
  Variant (52)..(52): Xaa in position 52 is Gln or Arg
  Variant (53)..(53): Xaa in position 53 is Asp, Glu or Gly
FXXLXXXXXXWXXXGLKXXXXXXXXXXXTGXXXXXNXXXXXXXXFXXXXXXXX

SEQ ID NO: 90186 - protein, 19 aa, Artificial sequence
  protein pattern
  Variant (2)..(2): Xaa in position 2 is Asn or Arg
  Variant (3)..(5): Xaa in position 3 to 5 is any amino acid
  Variant (6)..(6): Xaa in position 6 is Ser or Val
  Variant (8)..(8): Xaa in position 8 is any or no amino acid
  Variant (11)..(11): Xaa in position 11 is any or no amino acid
  Variant (19)..(19): Xaa in position 19 is Gly or Leu
RXXXXXLXTRXPVSRLDPX

SEQ ID NO: 90187 - protein, 29 aa, Artificial sequence
  protein pattern
  Variant (2)..(4): Xaa in position 2 to 4 is any amino acid
  Variant (7)..(10): Xaa in position 7 to 10 is any amino acid
  Variant (11)..(15): Xaa in position 11 to 15 is any or no amino acid
  Variant (17)..(18): Xaa in position 17 to 18 is any amino acid
  Variant (20)..(20): Xaa in position 20 is Ile or Val
  Variant (21)..(21): Xaa in position 21 is Glu or Lys
  Variant (22)..(22): Xaa in position 22 is any amino acid
  Variant (25)..(25): Xaa in position 25 is any amino acid
VXXXKVXXXXXXXXXLXXEXXXVLXKEGV

SEQ ID NO: 90188 - protein, 12 aa, Artificial sequence
  protein pattern
  Variant (2)..(2): Xaa in position 2 is Lys or Arg
  Variant (4)..(4): Xaa in position 4 is Lys or Arg
  Variant (5)..(5): Xaa in position 5 is Phe or Leu
  Variant (7)..(7): Xaa in position 7 is Gly or Asn
  Variant (9)..(9): Xaa in position 9 is Gln or Ser
  Variant (10)..(10): Xaa in position 10 is Phe or Leu
  Variant (12)..(12): Xaa in position 12 is Ile, Leu or Val
RXSXXLXSXXNX

SEQ ID NO: 90189 - DNA, 1158 bp, Saccharomyces cerevisiae; identical to SEQ ID NO: 68630
  CDS (1)..(1158)

SEQ ID NO: 90190 - protein, 385 aa, Saccharomyces cerevisiae; identical to SEQ ID NO: 68631

SEQ ID NO: 90191 - DNA, 1209 bp, Oryza sativa (japonica cultivar-group); identical to SEQ ID NO: 68538
  CDS (1)..(1209)

SEQ ID NO: 90192 - protein, 402 aa, Oryza sativa (japonica cultivar-group); identical to SEQ ID NO: 68539

SEQ ID NO: 90193 - DNA, 1155 bp, Sulfolobus solfataricus P2
  CDS (1)..(1155): transl_table=11
atggataaactgctacttcatgtaggccctactactatcaaggaagatgttttagttgcggggcttgaaaataacgttggctttacttctaaagaattcgtagaagcactggcatattcgctaaagggattaagatatgtaatgggtgcaagtaagaactatcagccattaataatccctggaggtggaacatctgctatggaaagtgttacatcattgctcaaacctaatgataaaatactagtagtttcgaatggagtttttggtgatagatgggagcaaatattcaagagatatccagttaatgtaaaggtattaagaccttctcctggcgattacgttaaaccaggggaggttgaggaagaagttaggaagagtgagtataagttagttgccttgactcacgtagagactagcaccggagttagagagccagtaaaggatgtgataaataaaataagaaaatacgtagagctgatagtggtagacggtgtttcaagcgttggggctgaggaagttaaggctgaagaatggaatgtcgacgtttatctgacagccagtcaaaaggcattgggttcggcagctggtttaggcttgctattactttctcctaaggctttatcaatattggattcccaaaattcaatcgccgggtattatctggatttaagaaattggctaccagttatgagaggggctgaagaaggtaaggctgcttattttgctactcctccagttcatgtaattttacaattagccgaagcctttagactgatagagaaagaaggtatagaaaatagaataaaaagacacacaatggtagctagcgcaattagggctggcttagaagctttaggattagagatagtagccagaagaccagagtcttatagtaatactgtaactggagtaatcctaaaggttgcggacccacaaaaggttctcgcggggaccgttaatgagggggtagaatttgcacctggagtccatcctgcatttaaatatttcagaataggtcatatgggctgggtaacgcccaacgatgcgataattgcaataagtgtcattgagagaaccctaaggaaattaggtgaacctataaggtttggtgaaggagtaaaggcagttgaagaggttctattctcagcccgctga

SEQ ID NO: 90194 - protein, 384 aa, Sulfolobus solfataricus P2
MDKLLLHVGPTTIKEDVLVAGLENNVGFTSKEFVEALAYSLKGLRYVMGASKNYQPLIIPGGGTSAMESVTSLLKPNDKILVVSNGVFGDRWEQIFKRYPVNVKVLRPSPGDYVKPGEVEEEVRKSEYKLVALTHVETSTGVREPVKDVINKIRKYVELIVVDGVSSVGAEEVKAEEWNVDVYLTASQKALGSAAGLGLLLLSPKALSILDSQNSIAGYYLDLRNWLPVMRGAEEGKAAYFATPPVHVILQLAEAFRLIEKEGIENRIKRHTMVASAIRAGLEALGLEIVARRPESYSNTVTGVILKVADPQKVLAGTVNEGVEFAPGVHPAFKYFRIGHMGWVTPNDAIIAISVIERTLRKLGEPIRFGEGVKAVEEVLFSAR

SEQ ID NO: 90195 - DNA, 1170 bp, Sulfolobus tokodaii str. 7
  CDS (1)..(1170): transl_table=11
atgattcaaaaagaaaaaaagctcttaatgcatgtaggcccagtaaatattttagacagagtactatatgcaggtttaaaaaataatgtggggtttacgtctcaagaatttgtggaagctttccaattctcgttaaagaaaacaagagaattgttccaggctgacaatacataccaaccatttttaataccaggtggcgggacatcagcaatggaaagtgtaacatcattacttaaagaaggtgaaaaagtattagtagttactaacggagtctttggagatagatggataaatatattcagaaaatatccagtgaaagttaatgtattaagcgcagaaccaggttattatgttgaaccagagacagttgaaaaagaagtaaaaaaggacaaatatacattagttacttttacacatgtggagacaagtaccggagtaaggcaaccaatcaaggatagtgtgaaagccgtaagggattatgttgatttggtagttgttgatggagtttcaagtgttggtgcagaagaagtaaaggcaaaggattggagagttgatgtttatttaacagctagtcaaaaagccctaggtgttcctccagggttaggaattttagtactttccgaaagggctatggaaaggttaaaagatgaaaaaagtattgctggttattacttagacttaaggaattggttaccagttatgaatagtatggaaaatggaaaagcctcatatttctctacacctccagtgcatacaatattaatgctgtctgaggcattaaaaataattatagatgaagagggattagaaagtagaattaaaagacatgaaaaagtggctagtgcaataagagctggaatagagggaatgggattagaaatcgttgctaaaaaaccagaagcatatagtaacactgtaacaggagtagttgttaagaaagttaatgctggtaacgtactttctgaaatagtttcagagggtgttgaattagctccaggggttcatccaaaattgcaaggaaagtactttaggattggccatatgggatgggtgactgaaaatgatgccatagtaacaatagcttcaatagaaagagtgctgaataaattaggagaagagataagattaggagaaggcataaaagcaactcagttatatttagcaaaataa

SEQ ID NO: 90196 - protein, 389 aa, Sulfolobus tokodaii str. 7
MIQKEKKLLMHVGPVNILDRVLYAGLKNNVGFTSQEFVEAFQFSLKKTRELFQADNTYQPFLIPGGGTSAMESVTSLLKEGEKVLVVTNGVFGDRWINIFRKYPVKVNVLSAEPGYYVEPETVEKEVKKDKYTLVTFTHVETSTGVRQPIKDSVKAVRDYVDLVVVDGVSSVGAEEVKAKDWRVDVYLTASQKALGVPPGLGILVLSERAMERLKDEKSIAGYYLDLRNWLPVMNSMENGKASYFSTPPVHTILMLSEALKIIIDEEGLESRIKRHEKVASAIRAGIEGMGLEIVAKKPEAYSNTVTGVVVKKVNAGNVLSEIVSEGVELAPGVHPKLQGKYFRIGHMGWVTENDAIVTIASIERVLNKLGEEIRLGEGIKATQLYLAK

SEQ ID NO: 90197 - DNA, 1185 bp, Drosophila melanogaster; identical to SEQ ID NO: 68544
  CDS (1)..(1185)

SEQ ID NO: 90198 - protein, 394 aa, Drosophila melanogaster; identical to SEQ ID NO: 68545

SEQ ID NO: 90199 - DNA, 1203 bp, Nasonia vitripennis; identical to SEQ ID NO: 68552
  CDS (1)..(1203)

SEQ ID NO: 90200 - protein, 400 aa, Nasonia vitripennis; identical to SEQ ID NO: 68553

SEQ ID NO: 90201 - DNA, 1182 bp, Nasonia vitripennis; identical to SEQ ID NO: 68554
  CDS (1)..(1182)

SEQ ID NO: 90202 - protein, 393 aa, Nasonia vitripennis; identical to SEQ ID NO: 68555

SEQ ID NO: 90203 - DNA, 1191 bp, Anopheles gambiae str. PEST; identical to SEQ ID NO: 68556
  CDS (1)..(1191)

SEQ ID NO: 90204 - protein, 396 aa, Anopheles gambiae str. PEST; identical to SEQ ID NO: 68557

SEQ ID NO: 90205 - DNA, 1158 bp, Magnaporthe grisea 70-15
  CDS (1)..(1158)
atgtcttctcaacctgagcatcccaccctgctcattcccggccctatcgagtttgacgatgctgtcctccagtccatgagccattacagcgagagccacgttggtccggcttttgtcaacgtttttggcgagaccttgaccctccttcgcaaactgttccagactacggattcgggctcgcagccatttgtcatctcagggtccggcacccttggatgggatctggtctctgccaaccttgtcgaagccggcgaggatgtgctggttcttggcactggctacttcagtgacggtttcgccgactgcctgcgaacctatggcgccaacgtaacggagctcaaggcccccgttggatccaggcctcaactgcccgagattgagaaggctcttagtgccaagaagtacaaagtcctcaccgtcacgcacgttgacacctcaaccggcgtgctcagcgagctgaaggacctcagcgccatggtgcacaaggtctcccctgagaccctcatcatcgccgatggtgtatgcagtgtggcttctgaggagattgcgtttgatgagtggggtctggacggtgtgatcactgccagccaaaaggctatcggatgcccggctggtctctcgatctcaatgttcagctcaagggcaatcaaggcatttgaggctaggaaaacccctcccgcctcctactttgcatccatgaagaactggctgccaatcatgcgcaactacgaggccaagaagccttcatactttgctaccccgtcgcctcagctcatccacgccctccacacggccctgacccagataatgtcaaggccacttgctgagcgcttcgctaagcacaaggaggcctcaagcaagatcaagaaggctatcgccgatcttggcctcaagcaggttgcctcgaaccctgccgaccaggctaatggcatgacggcagtctacctccctgagagcgtgaagccgaccgatatcttgccgaagctgttcagcaaaggagttatctttgccggtggtattcacaaggagattgcccccaagtatatcagattcggccacatgggcgtcagcgtgttgaacccggaaaggggtgatcttgatcgtgccatcaaggctctcgagtctggactgtcggagtgcggttatcaaaaagcatag

SEQ ID NO: 90206 - protein, 385 aa, Magnaporthe grisea 70-15
MSSQPEHPTLLIPGPIEFDDAVLQSMSHYSESHVGPAFVNVFGETLTLLRKLFQTTDSGSQPFVISGSGTLGWDLVSANLVEAGEDVLVLGTGYFSDGFADCLRTYGANVTELKAPVGSRPQLPEIEKALSAKKYKVLTVTHVDTSTGVLSELKDLSAMVHKVSPETLIIADGVCSVASEEIAFDEWGLDGVITASQKAIGCPAGLSISMFSSRAIKAFEARKTPPASYFASMKNWLPIMRNYEAKKPSYFATPSPQLIHALHTALTQIMSRPLAERFAKHKEASSKIKKAIADLGLKQVASNPADQANGMTAVYLPESVKPTDILPKLFSKGVIFAGGIHKEIAPKYIRFGHMGVSVLNPERGDLDRAIKALESGLSECGYQKA

SEQ ID NO: 90207 - DNA, 1368 bp, Gibberella zeae PH-1
  CDS (1)..(1368)
atggagggaaggaaagtgccccgcgttccggagctgtccaccgaaggcccctcttcggcgggcttcaagacatattcggccgctgtgtcggccgataggatctctctcgtatcgggccatctgtcgcatcagacctcttcttataacgcagcttcccctgctctttcatcggccactcaagctcgttctctatcgacaaccacagccaacatgtcttctcaacctgaacacgctactctgctcattcccggacccattgagttcgacgatgatgtcctcaagtctatgggccactacagtgagagccatgtcggtcctggctttgtcaacacctttggcgagaccctctctatgacccgcaagctcttccaatcgaccgacccctccgcccaaccttatattatctccggttccggtactctaggatgggatatcgtcgctgccaacctcgttgaggctggcgaggatgcccttgttcttagcactggatactttggcgatggctttgccgactgcctgcgcgcctacggtgccaacgtcaccaagctcgacggtgaggttggtggccgacctcagcttcccgaaatcgagaaggcactttccgagaagaagtataagattcttacagttacacacgtcgacacatcaactggtgttctgagcgagctcaagaacctcgccgctactgtgaagcgagtctctcctgagactcttgtcattgtcgatggtgtttgcagtgttgcttgtgaggagatcgcattcgacgagtggggtctggatggtgttgttactgctagtcaaaaggccattggcgttcctgctggtctctccatctctttcttcagtggccgagctgttgctgccgctcttgagaaccgcaagactcctatccccgcctactttgcttccatgaagaactggactcccattatgaagaactatgaggccaagaagccctcttacttcgccactccctctcctcagctcgtccacgcccttcacaccagtctgacccagatcctctccaagcccttgtctgagcgattccagggccacattgaggtctccaacaaggtcaagaaggccatcaccgacctcggcctcaagattgttgccaccaagcccgaagaccaggctcacgccatgactgccatctacctgcccgagggtgttggcgcccccgatgttctgcccaagctggctggtaagggtgtcgtctttgctggtggcattcacaaggccattgcctccaagtacatccgattcggtcacatgggtgtcagcgctctggatcctagccgaaaccacatggagaaggccattaatgctctcaaggagagcttgttcgaggctggctacaaggcttag

SEQ ID NO: 90208 - protein, 455 aa, Gibberella zeae PH-1
MEGRKVPRVPELSTEGPSSAGFKTYSAAVSADRISLVSGHLSHQTSSYNAASPALSSATQARSLSTTTANMSSQPEHATLLIPGPIEFDDDVLKSMGHYSESHVGPGFVNTFGETLSMTRKLFQSTDPSAQPYIISGSGTLGWDIVAANLVEAGEDALVLSTGYFGDGFADCLRAYGANVTKLDGEVGGRPQLPEIEKALSEKKYKILTVTHVDTSTGVLSELKNLAATVKRVSPETLVIVDGVCSVACEEIAFDEWGLDGVVTASQKAIGVPAGLSISFFSGRAVAAALENRKTPIPAYFASMKNWTPIMKNYEAKKPSYFATPSPQLVHALHTSLTQILSKPLSERFQGHIEVSNKVKKAITDLGLKIVATKPEDQAHAMTAIYLPEGVGAPDVLPKLAGKGVVFAGGIHKAIASKYIRFGHMGVSALDPSRNHMEKAINALKESLFEAGYKA

SEQ ID NO: 90209 - DNA, 1194 bp, Apis mellifera; identical to SEQ ID NO: 68558
  CDS (1)..(1194)

SEQ ID NO: 90210 - protein, 397 aa, Apis mellifera; identical to SEQ ID NO: 68559

SEQ ID NO: 90211 - DNA, 1125 bp, Candida glabrata CBS 138
  CDS (1)..(1125)
atgtccaccgaagctgatactctattgattcctggtccagttattcttagttctaaagtacaaagggcattagatgttccatccttatcccatacttccccagagtttggtgcaatttttcaaagaacactgaaaaataccaggaaacttttcaaagcagatgagaaagagggtcaaccattcgttattgcaggttcaggtacattgggatgggatattgttggtgcaaacttgattgacaacaacgacagtgccttggttgtatctacaggtgtcttctccgaattttttgccgagtgtttggaactttatggagctaacgttgataaattaactgctgaagttggcgatgtcgttccaactgaaaagatcagagagaagctgaaggaaaagaactataaattgattactttaacacatgtcgacacttcgacagcggtgttgttgaacgttaaagaaattgcagaaattgttcgtcaaatatcccccgagacatatatcattgttgatggtgtctgttcaattggttgtgaggaatttgagttcaaaaaatggggtattgattattgtttgactgcatctcaaaaggcgttaggagcacctgctggtttgagtatctcatttgcaagtcaaagagtggtcgattttgttaaatctgataaatataagccaaagtcgtactttacatctttaaaaaaatggctgccaattatggaaggttacgaaaatggtacaccaaagtattttgctacacctgctattcaaagcatcaacagtttggatgctgctcttcaagaaattttggaagatggattagaagctaggtggacgaaacatgcaaaaatgagtaccgaatttaaagacaaattaaccaaagaactaggcttaaaattagtatctaaatatccagctgaatcagcagcccatggtctaacagccatttatgttgatgagccaggtaaagtcatttctcatctgaaggcccacggtgttgttattgccggcggtataatgccatcaattgcaactaaatatatccgtgttggtcatatgggtgtcacagcttgtgacccaagtgtcgactatattccaacatgttacaagctaatatcagaagctaaataa

SEQ ID NO: 90212 - protein, 374 aa, Candida glabrata CBS 138
MSTEADTLLIPGPVILSSKVQRALDVPSLSHTSPEFGAIFQRTLKNTRKLFKADEKEGQPFVIAGSGTLGWDIVGANLIDNNDSALVVSTGVFSEFFAECLELYGANVDKLTAEVGDVVPTEKIREKLKEKNYKLITLTHVDTSTAVLLNVKEIAEIVRQISPETYIIVDGVCSIGCEEFEFKKWGIDYCLTASQKALGAPAGLSISFASQRVVDFVKSDKYKPKSYFTSLKKWLPIMEGYENGTPKYFATPAIQSINSLDAALQEILEDGLEARWTKHAKMSTEFKDKLTKELGLKLVSKYPAESAAHGLTAIYVDEPGKVISHLKAHGVVIAGGIMPSIATKYIRVGHMGVTACDPSVDYIPTCYKLISEAK

SEQ ID NO: 90213 - DNA, 1104 bp, Kluyveromyces lactis NRRL Y-1140
  CDS (1)..(1104)
atgtcagatttattattaattccaggtccaattatggtgtcttcggctgtcgaggaagccgccagcattcaatcgttggctcatacctctccagaatttgttaagatctttcaaggggcgttgcaaaagttgagaacagttttccaaacaagtaatgctggtgaccaacctattgtcatttctggttccggtaccctaggatgggatatcgtcggtaacaacttgttaaagtccggagactcagcgttgacaatttctaccggattcttctcagattcatttgctgaatgtttgaaaacgtacggtgctgatgtcgatgtgttaaagagcgaaccaggtaaagtcgttgcgttagacaaaattgaatctcaattaaagtccaagaaataccaattgatcactttgactcacgtcgatacctctactgctaccctattggatctcccatcaatcacctcgttggtgaagaaagtttctccagaaactttcattattgttgacggtgtttgttccattggatgcgaagaatttaaattctccgaatggtctgtcgatttcgttttgaccgcatctcaaaaggcgttatcatgtccttctgggttaagtgtttctttgatcagtgaacgcgccttatcatacgctttgagcaacgaatccacccatggattctatgctaacttaaagaaatggatcccaatcatgaaagcatacgaagctggtgtaggccaatatttcgctactccatcaattcaattagttaacgcattaaacgtctcccttggagaaatcttgtcctatggactcgaggccagaatcgccaagaacaagaaaacttctgaccagttcaaaaataacttgaaacaattgggtctcactttggtctcagaggattccaacagcgctcatggattgactgccgtatacgtcgaccaaccaggtaaagtgatctcttccttgaaatcaaagggtatagtcatcgccggtggaatcttacccggcatcaaggacaagtatatccgaattggtcacatgggtatctctgccatcgatgacaacttgcaccacatcgacaaggtattcgaagcaatcaaggaatctatttaa

SEQ ID NO: 90214 - protein, 367 aa, Kluyveromyces lactis NRRL Y-1140
MSDLLLIPGPIMVSSAVEEAASIQSLAHTSPEFVKIFQGALQKLRTVFQTSNAGDQPIVISGSGTLGWDIVGNNLLKSGDSALTISTGFFSDSFAECLKTYGADVDVLKSEPGKVVALDKIESQLKSKKYQLITLTHVDTSTATLLDLPSITSLVKKVSPETFIIVDGVCSIGCEEFKFSEWSVDFVLTASQKALSCPSGLSVSLISERALSYALSNESTHGFYANLKKWIPIMKAYEAGVGQYFATPSIQLVNALNVSLGEILSYGLEARIAKNKKTSDQFKNNLKQLGLTLVSEDSNSAHGLTAVYVDQPGKVISSLKSKGIVIAGGILPGIKDKYIRIGHMGISAIDDNLHHIDKVFEAIKESI

SEQ ID NO: 90215 - DNA, 1161 bp, Debaryomyces hansenii CBS767; identical to SEQ ID NO: 68560
  CDS (1)..(1161)

SEQ ID NO: 90216 - protein, 386 aa, Debaryomyces hansenii CBS767; identical to SEQ ID NO: 68561

SEQ ID NO: 90217 - DNA, 1140 bp, Yarrowia lipolytica CLIB122
  CDS (1)..(1140)
atgaccgacattaccatgatccccggccccattgagttcgaccccgaggtcctctcagccatgtcgcaccagtcggtggcccacaactctccccagtttgtggaggtgtttggctccgtgctcaccgatctgcgggctctgttcaagtccaccgaccccaaggcccagccctttgtcattgctggcggaggaaccctcggctgggagattgttggagccaaccttctcaagcgagatgacaaggctctggtcatttctaccggattcttttccgacgcattcgccgactgcctcaaggtcttctgcgaccacgtcgacgtcatctctgcccccgctggcgaggccccctctctcggtgagatcgagaccgccctcaagaaggagaagtacaacctcatcaccctgacccacgtcgacacctcttccggagtcgtgatcgacatcaaggccatctccgagctcgtccacaaggtctctcctgacacgctcgttgtcgtggacggtgtctgctccgtcggagttgagcccatctcctttgacgactggggattggactttgtgctcaccgccccccagaaggccattggtgcccctgccggcctctccatctccatggcctccccccgagccgttgccaaggttgagtctctcgagaagatccccgtctactttggcaacctcaagaaatggctgcctatcatgcaggcctacgaggcccgaaagcccgcctacttctccacccccgccgtgcagaacgtgtacgccctgcaggttgccctcaagcagattcttcacaacggtatctcgctggaccagcgtttcgagaaccacaagcaggtctccgacaagatcaagaagcagatcaacgactggggtctcgagattatcgccaagcccggtctcggcgctcacggcctcacttgcatctacctccccgagggcgtgactctccccgactttctccccaaggttgccgctaagggcgtgactctggccggcggtctgttcaagggcatcaacacaaagtacttccgattcggccacatgggtgtttctgccgtcgaccccaagcgggatgatgttgaccgaactcttaaggccatccacgactctcttgtcgaggctggttacaagtgctaa

SEQ ID NO: 90218 - protein, 379 aa, Yarrowia lipolytica CLIB122
MTDITMIPGPIEFDPEVLSAMSHQSVAHNSPQFVEVFGSVLTDLRALFKSTDPKAQPFVIAGGGTLGWEIVGANLLKRDDKALVISTGFFSDAFADCLKVFCDHVDVISAPAGEAPSLGEIETALKKEKYNLITLTHVDTSSGVVIDIKAISELVHKVSPDTLVVVDGVCSVGVEPISFDDWGLDFVLTAPQKAIGAPAGLSISMASPRAVAKVESLEKIPVYFGNLKKWLPIMQAYEARKPAYFSTPAVQNVYALQVALKQILHNGISLDQRFENHKQVSDKIKKQINDWGLEIIAKPGLGAHGLTCIYLPEGVTLPDFLPKVAAKGVTLAGGLFKGINTKYFRFGHMGVSAVDPKRDDVDRTLKAIHDSLVEAGYKC

SEQ ID NO: 90219 - DNA, 1176 bp, Aspergillus nidulans FGSC A4
  CDS (1)..(1176)
atgtcgactcaacccgctcaccccaccttgctcattccgggccctatcgaattcgatgatgccgttcttcatccatcgaccccaactaacctgtcaatcaccagcgagagccatgtggcccccggtttcgtaaaggtctttggagagacattgtccatgacccggaagctcttccagtctacaaacccggcagcccagccctttgtcatctccggaagtggcactctaggctgggatttcgttgcttccaaccttgtcgagaagggcgagaatgccctcgtcctgcactccggctacttcgcggactcgttcgcgtcctgtctagagacatacggcgccaatgctacacagctcaaggcacccattggggagcggccatccttcgaggcgattgagcaggcattgaaggagaaaccatacaagatcatcacaatcacccatgttgatacctctactggtgttctaagcgacatcaagacggtggcagagattgttcgccgagtcagccctcagactttggttgttgtggatggtgtatgcagtgtcggctgcgaggagattgcttttgacgagtgggatttggacgtcgttctcaccgcaagccaaaaggccattggctgccctcccggtctcagcatcatcatgttctccggccgcgctatcgagaccttcaagtcccgcaagactcctccatcgtcatactactcctctatggccaactggcttcccatcatgcagaactacgagaatttcaagccgtcctacttcgccactccctccacccaactcattcacgccctgcacacaaccctctcccagatcacatcccggccgatggcagagcgcttcgccgcacaccgccgggcctccgaccgcgtcaaggccgctgtcgcagaactcggcttgcagcagctggcctccaaggtcgagaaccaggctcatgccatgacagccatctggctgcctgatggactggccccgccagatgtccttcctggtctgctgaagcgtggagttatctttgctgcaggcctgcacaaggaggttgcaacaaagtacattcgctttgggcacatgggtgttagcattatggaccccgctcgggatgacattgagaaggccattgcagccctcaaggaggccattgccgatgcgaaacgtgctaagggtctgtga

SEQ ID NO: 90220 - protein, 391 aa, Aspergillus nidulans FGSC A4
MSTQPAHPTLLIPGPIEFDDAVLHPSTPTNLSITSESHVAPGFVKVFGETLSMTRKLFQSTNPAAQPFVISGSGTLGWDFVASNLVEKGENALVLHSGYFADSFASCLETYGANATQLKAPIGERPSFEAIEQALKEKPYKIITITHVDTSTGVLSDIKTVAEIVRRVSPQTLVVVDGVCSVGCEEIAFDEWDLDVVLTASQKAIGCPPGLSIIMFSGRAIETFKSRKTPPSSYYSSMANWLPIMQNYENFKPSYFATPSTQLIHALHTTLSQITSRPMAERFAAHRRASDRVKAAVAELGLQQLASKVENQAHAMTAIWLPDGLAPPDVLPGLLKRGVIFAAGLHKEVATKYIRFGHMGVSIMDPARDDIEKAIAALKEAIADAKRAKGL

SEQ ID NO: 90221 - DNA, 1365 bp, Ustilago maydis 521
  CDS (1)..(1365)
atgcatccacgccgcctatcatcgctttctgggccaatgcctgtggacaataccgaacatatccgcttacgacaaccttcggtttctaccaaaacgtcgactcatcatgattcaactgcagtagcgcgaaatcgaattcagcaagtaacacggcacattacgcacaagcttccttccacattacaaaaagacatgtcgacgcaagagttcaagcaggcgccgcacaagctgcttgtcattccgggacccatcgaggtcgccgacgacgtgctcctggccaatgctcacccggccatgtcgcacgtttcacctgacttcattcccgtctttggtgactgcatccgcatgcttcgagaggtactctttgcgcccaactcgcagcccgtgttgactgctggttccggcacgcttggctgggaccatgtcgccgccaatgtcattcaacctggcgaggaggcgctcgttctcaactcgggctactttggcgacagctttgccgattgcctggagacctacggtgccaaggtggaccagatcaaggcacccattggctctaagccttcgctcactgaggtggaagaagccctgaaaaagaagcagtacaaggtgctgactttcactcacgtcgacacttccactggtgtgttgagcgacgccaagggactcggagagcttgtcaagcgcgtcagccccgaaaccatcttggtgctcgacggcgtctgcagtgtgggaagcgaggaaatccgtatggaggagtggggcatcgatgttgtcctgaccgccacccagaagggtctcggctgccctcctggcctgatggtgctcgctgccagcaaaaaggccatcgccgcctttgagaagcgtacggtgcctcccaacagctactttgcctcttggtcgaggtggctgcctgttatgaaggcgtacgaggctggcactggtgcttactttgctacgcctcctaccaacctcatctacgcactgcacgccagtctgaccacaattaccaagggatcgccttcgctcgaggaccgattccagcagcacgtggctgcgtcggaccgtgtcaaggactttgtttcgcagctcgggctgaagcagctcgccgctgacggcaagaaggatggcgcacacggcatgactgctgtgcgctacccagagggcctcaaggcgaccgacctgctgcctaaacttgtggccaagaacattgtagtggctgctggtctacacaagcaggtcaaggacgagtacttccgtattggtcacatgggtatcacggttgtcaacgacaaggagcgtggtgacatcgagtacctgcttaccagcatcaaagaagctctcgccgaggcaggctacaagccctag

SEQ ID NO: 90222 - protein, 454 aa, Ustilago maydis 521
MHPRRLSSLSGPMPVDNTEHIRLRQPSVSTKTSTHHDSTAVARNRIQQVTRHITHKLPSTLQKDMSTQEFKQAPHKLLVIPGPIEVADDVLLANAHPAMSHVSPDFIPVFGDCIRMLREVLFAPNSQPVLTAGSGTLGWDHVAANVIQPGEEALVLNSGYFGDSFADCLETYGAKVDQIKAPIGSKPSLTEVEEALKKKQYKVLTFTHVDTSTGVLSDAKGLGELVKRVSPETILVLDGVCSVGSEEIRMEEWGIDVVLTATQKGLGCPPGLMVLAASKKAIAAFEKRTVPPNSYFASWSRWLPVMKAYEAGTGAYFATPPTNLIYALHASLTTITKGSPSLEDRFQQHVAASDRVKDFVSQLGLKQLAADGKKDGAHGMTAVRYPEGLKATDLLPKLVAKNIVVAAGLHKQVKDEYFRIGHMGITVVNDKERGDIEYLLTSIKEALAEAGYKP

SEQ ID NO: 90223 - DNA, 1185 bp, Strongylocentrotus purpuratus; identical to SEQ ID NO: 68562
  CDS (1)..(1185)

SEQ ID NO: 90224 - protein, 394 aa, Strongylocentrotus purpuratus; identical to SEQ ID NO: 68563

SEQ ID NO: 90225 - DNA, 1170 bp, Tribolium castaneum; identical to SEQ ID NO: 68564
  CDS (1)..(1170)

SEQ ID NO: 90226 - protein, 389 aa, Tribolium castaneum; identical to SEQ ID NO: 68565

SEQ ID NO: 90227 - DNA, 1167 bp, Tribolium castaneum; identical to SEQ ID NO: 68566
  CDS (1)..(1167)

SEQ ID NO: 90228 - protein, 388 aa, Tribolium castaneum; identical to SEQ ID NO: 68567

SEQ ID NO: 90229 - DNA, 1167 bp, Tribolium castaneum; identical to SEQ ID NO: 68568
  CDS (1)..(1167)

SEQ ID NO: 90230 - protein, 388 aa, Tribolium castaneum; identical to SEQ ID NO: 68569

SEQ ID NO: 90231 - DNA, 1149 bp, Carboxydothermus hydrogenoformans Z-2901; identical to SEQ ID NO: 68584
  CDS (1)..(1149): transl_table=11

SEQ ID NO: 90232 - protein, 382 aa, Carboxydothermus hydrogenoformans Z-2901; identical to SEQ ID NO: 68585

SEQ ID NO: 90233 - DNA, 1161 bp, Myxococcus xanthus DK 1622
  CDS (1)..(1161): transl_table=11
gtgagagacttgctgatgattccagggccggtggagttcgagcccgaggtgctccaggcgctgggcgctcccaccctcggccacaccgaccccgctttcattgccgtcttcggccgggccctgaagcggcttcgggaggtgtgcctggcgccctccgcgcagcccttcgtggtgtccggctccggcacgctggccatggagttggcggtggccaacctggtggagcccggggacgcggccctggtggtgaacaccggctatttcagcgaccggatggcgaagattctcgagcgccacggcgcccgggtgacgcacgtgcgcgctccgccgggggacgtgccctccctggacgaggtggagacgcacctgtcgaagggtggcttcaaggtgctgtccgtcacccatgtggacacgtccacgggggtgctcgcacccgcggaggcgctggtgcgggccgcgcgcaagcacggcgtgctgtcggtggtggatggtgtgtgcgccaccgcggcggagaccttccgccaggatgcgtgggaggcggacgtgtacctcacggccagccagaaggcggtgggggttcctcccggtctggcgctgctcaccgtgggcccgcgggccatggaggcctggcgcaagcgcaagacgccggtggccagcgtctacgcggacttcgcggagtggctgcccatcatggaggcgtacgaagcgggcaagccggcctacttcgccaccccgcccgtgaacctggtggccgcgctggacgtgagcctgggtcagattctggccgagggcatggacgcccgcttcgcccggcaccagcggatggcgcgggccttccgcgcggcgtggaaggccatggggctgcgcctgttgcccacctccgacgccgtggccgccaacgcgctgagcgccgtgtactacccggacggcgtggacgcggcgctggtgggcggggtgaaggggcagggcgtcgtcgtcgccggcggcctccacccggacctcaagacgcgctacttccgcgtgggccacatgaaccgcgtggggcccgcggacgtcctggccacggtgggagccctggagcgcgcgctcatcgccgccggtcaccgctcggagcccggcgccgccgtggccgccgcccaggcgtcactcatcgtgggctga

SEQ ID NO: 90234 - protein, 386 aa, Myxococcus xanthus DK 1622
MRDLLMIPGPVEFEPEVLQALGAPTLGHTDPAFIAVFGRALKRLREVCLAPSAQPFVVSGSGTLAMELAVANLVEPGDAALVVNTGYFSDRMAKILERHGARVTHVRAPPGDVPSLDEVETHLSKGGFKVLSVTHVDTSTGVLAPAEALVRAARKHGVLSVVDGVCATAAETFRQDAWEADVYLTASQKAVGVPPGLALLTVGPRAMEAWRKRKTPVASVYADFAEWLPIMEAYEAGKPAYFATPPVNLVAALDVSLGQILAEGMDARFARHQRMARAFRAAWKAMGLRLLPTSDAVAANALSAVYYPDGVDAALVGGVKGQGVVVAGGLHPDLKTRYFRVGHMNRVGPADVLATVGALERALIAAGHRSEPGAAVAAAQASLIVG

SEQ ID NO: 90235 - DNA, 1161 bp, Aspergillus niger
  CDS (1)..(1161)
atgtcctcccaagcccctcaccccaccctgttgattccagggcccattgaattcgacgatgctgtcctccagtctatggctcactacgctgagagccatgtcgcccccggtttcgtcaagaccttcggagagaccctgtccatggtccggaaactcttccagtcctccaaccctgctgctcagcccttcgttatctccggtagcggtactctcggatgggatatcgtggcctccaacctgattgagaagggtgagaatgcgctggtcctgcacaccggttactttgccgactccttcgctacctgcctggaaacctacggcgccaatgccacccagctcaaggcccccatcggtgaacgcccctctttcgaggaaatcgagcaggccctcaaggagaagccctacaagatcattaccatcacccacgtcgacacctcgaccggtgtcctcagcgacatcaagcgcgtggccgaggtcgtccgtcgcgtcagcccccagaccctggtcgtcgtcgacggtgtctgcagtgtcggctgtgaagagattgccttcgacgaatgggacattgatgtcgtcctcacggccagccagaaggccatcggctgcccgcccggcctcagcatcctgatgctgtccggccgcgccatcaacaccttcaagacccgccagacccccccgtcctcctactacgcctccatcgccaactggctccctatcatgcagaactacgagaacttcaagccctcttacttcgccacccctcccacccagctcgtccatgctctgcacaccactctttcccagatcactgcccgtcccatgtcggagcgctacgccatccacgcccaggcctccgaccgcgtcaaggctgctgtcgctgatctcggtctgcagcaggtcgcttccaagcccgagaaccaggcccacgccatgacggccatctggctgccggagggtctggctcctccggatgtcctgccgggtctgctgaagcgcggcgtcatctttgcagcgggtctgcacaagcaggttgccaccaagtacatccgcttcggacacatgggcgtcagcgtcacggatcccaaccgttcggacgtcgacaaggccattgctgccttgaaggaagccttgacggaggcgaagcaggccaagggactgtaa

SEQ ID NO: 90236 - protein, 386 aa, Aspergillus niger
MSSQAPHPTLLIPGPIEFDDAVLQSMAHYAESHVAPGFVKTFGETLSMVRKLFQSSNPAAQPFVISGSGTLGWDIVASNLIEKGENALVLHTGYFADSFATCLETYGANATQLKAPIGERPSFEEIEQALKEKPYKIITITHVDTSTGVLSDIKRVAEVVRRVSPQTLVVVDGVCSVGCEEIAFDEWDIDVVLTASQKAIGCPPGLSILMLSGRAINTFKTRQTPPSSYYASIANWLPIMQNYENFKPSYFATPPTQLVHALHTTLSQITARPMSERYAIHAQASDRVKAAVADLGLQQVASKPENQAHAMTAIWLPEGLAPPDVLPGLLKRGVIFAAGLHKQVATKYIRFGHMGVSVTDPNRSDVDKAIAALKEALTEAKQAKGL

SEQ ID NO: 90237 - DNA, 1182 bp, Glossina morsitans morsitans; identical to SEQ ID NO: 68604
  CDS (1)..(1182)

SEQ ID NO: 90238 - protein, 393 aa, Glossina morsitans morsitans; identical to SEQ ID NO: 68605

SEQ ID NO: 90239 - DNA, 1149 bp, Aeropyrum pernix
  CDS (1)..(1149): transl_table=11
  misc_feature (46)..(46): n is a, g, c or t
atggccaggctactcatgattccaggtcctacgcccgtcgacccanaagtgctgctcgccatggccaggccggttatcagccacacctcccccgagttcgacgaaatccacagcgaaacagtgtctatgctccaaaaactcttcaggacctccggcaaggtgtttctcctcccgggcagcggcagcctcggcatggagtttgccgttaggagcgttgcagggagggggtctagggctctggttttgaaggcaggctattttggagggtatttcgagaggatactaagatcccttggggctaccgtgactgtcgttgaatctccagtgggcaggggtttcactggtgctgatgtggaggaggctctagatagggctggcgatgttgatgtggtgtttgttcagcacgtcgagactagcacctcggtggctaaccctgtgagggagatagccggggttgtgaagaagaatggtgcaaggcttgttgtggacggtattgccagcgtgggaggcatggacctcaggctagatgagtggggtgttgatgtggccctgacgggtagccagaaagcgcttagcacgccgccggggctagctatagtcgctttcagcagcgaatattcggcggagctggagaagagggagcccagtggcatctacttcgacttcctctccctctcccgggagatggagtctaccagaaactaccatataacgccggcggtcaacctcgtcttcgccctgaacgccagtctaaagaggattttgagtgagggtttggaaaacaggtttgagaggcaccgtgtcctggctagagcgtttaccagtgctatggaggctctcggtctaaggctggtggctgaggagccttttagagcctggacagtgacggcggtctacctgccacagggtattgagtggtcccgattctacagcgcgatgaggaagaggggtgtggagatcgccgggggtctgggcggtttgaagggtaagatatttagggttggccacatgggtgaggtggatgctaacgatttgatagcgacgatagccgctatagagcgtagcctggtggagcttggctatagggaggcgaggctgggccaagggctagaggctgctcagaaggaactctctagcctaggcctctag

SEQ ID NO: 90240 - protein, 382 aa, Aeropyrum pernix
  misc_feature (16)..(16): The Xaa at location 16 stands for Stop, Gln, Glu, or Lys.
MARLLMIPGPTPVDPXVLLAMARPVISHTSPEFDEIHSETVSMLQKLFRTSGKVFLLPGSGSLGMEFAVRSVAGRGSRALVLKAGYFGGYFERILRSLGATVTVVESPVGRGFTGADVEEALDRAGDVDVVFVQHVETSTSVANPVREIAGVVKKNGARLVVDGIASVGGMDLRLDEWGVDVALTGSQKALSTPPGLAIVAFSSEYSAELEKREPSGIYFDFLSLSREMESTRNYHITPAVNLVFALNASLKRILSEGLENRFERHRVLARAFTSAMEALGLRLVAEEPFRAWTVTAVYLPQGIEWSRFYSAMRKRGVEIAGGLGGLKGKIFRVGHMGEVDANDLIATIAAIERSLVELGYREARLGQGLEAAQKELSSLGL

SEQ ID NO: 90241 - DNA, 1149 bp, Aeropyrum pernix
  CDS (1)..(1149): transl_table=11
atggccaggctactcatgattccaggtcctacgccagtcgacccagaagtgctgctagccatggccaggccggttatcagccacacctcccccgagttcgacgagatccacagcgaaacagtgtctatgctacaaaaactcttcaggacctctggcaaggtgtttctcctcccgggcagtggcagcctcggcatggagtttgccgttaggagcgttgcggggagggggtctagggctctggttttgaaggcaggctactttggaggatatttcgagaggatactaagatccctaggagcttccgtgactgtcgttgaatctcccgtgggcaggggtttcacgggtgctgatgtggaggaggctctggatagagctggggatgttgatgtggtgtttgttcagcacgtcgagacgagcacctcggtggctaaccctgtgagggagatagccggggttgtgaagaagaatggtgcaaggcttgttgtggacggtattgccagcgtgggaggcatggacctcaggctagacgagtggggtgtggatgtggccctgacgggtagccagaaagcgcttagcacgccgccggggctagctatagtcgcgttcagcagcgaatattcaagggagctggagaagagggaacccagtggcatctatttcgacttcctctccctctcccgggagatggagtctaccaggaactaccatataacgccggcggtcaaccttgtgtttgccctgaacgccagtctaaagaagattttgagcgagggcttggaaaacaggttcgagaggcaccgtgtcctggctagcgcgtttaccagtgctatggaggctctcggtctaaggctagtggctgaggagccttttagagcctggacggtgactgcggtctacctgccacagggtattgattggtcccgtttctacagtgtgatgaggaagaggggtgtggagatcgccgggggtctgggtggtttgaagggtaagatatttagggttggccacatgggtgaggtggatgctaacgatttgatagcgacgatagccgctatagagcgtagcctggtggagcttggctatagggaggcgaggctgggccaagggctagaggctgctcagaaagaactctctagcctaggcctctag

SEQ ID NO: 90242 - protein, 382 aa, Aeropyrum pernix
MARLLMIPGPTPVDPEVLLAMARPVISHTSPEFDEIHSETVSMLQKLFRTSGKVFLLPGSGSLGMEFAVRSVAGRGSRALVLKAGYFGGYFERILRSLGASVTVVESPVGRGFTGADVEEALDRAGDVDVVFVQHVETSTSVANPVREIAGVVKKNGARLVVDGIASVGGMDLRLDEWGVDVALTGSQKALSTPPGLAIVAFSSEYSRELEKREPSGIYFDFLSLSREMESTRNYHITPAVNLVFALNASLKKILSEGLENRFERHRVLASAFTSAMEALGLRLVAEEPFRAWTVTAVYLPQGIDWSRFYSVMRKRGVEIAGGLGGLKGKIFRVGHMGEVDANDLIATIAAIERSLVELGYREARLGQGLEAAQKELSSLGL

SEQ ID NO: 90243 - DNA, 1362 bp, Aspergillus oryzae
  CDS (1)..(1362)
atgagtcaattgcgacggacgacgcagcggcttagtctgatttccaggcacctggatcagcatttaccgttgcccgatcttaatactcccttctcgaccgagagaggatcccaccctcccgacgacatcgaatataaacccctcgatcgcactcttccttctacatctccttcgcaacaaccagaatccccctctaccaaaatgtcgtcccaagcccctcaccccaccttgttgattcccggacccatcgaattcgatgatgctgtcctccagtctatggcccactatgccgagagccacgttgctcctggctttgtcaagaccttcggagagacattgaccttggtgcgcaagctcttccagtccaccaaccccgccgcccagcccttcgtcatctccggtagcggtacccttggctgggatgtcgtcgcctccagcttggtcgagaagggagagaatgccctcgtcctgcacaccggctacttcgccgattccttcgccacatgcttgcaaacctacggtgcgaacgcaacacagctcaaggcacccatcggagagcgcccctcgttcgaggagattgagcaggccctgaaggagaagccctacaagatcatcaccatcacccacgtcgacacctcgaccggtgtgctcagtgacatcaagcgcatcgccgagatcgtccgccgcgtcagccccaacaccctggtggtcgtggacggtgtctgcagtgtcggctgcgaggagatcgcctttgatgaatgggatcttgacgttgtcctgactgccagccagaaggccatcggttgcccccccggcctcagcatcctgatgacctccccccgcgccatcgacgtcttcaagaaccgccagtccccccccgcttcatactactcctccatcggcaactggctccccatcatgcagaactacgagaacttcaagccctcctacttcgctaccccacccacccagctggtccacgccctgcacaccaccctgtcccagatcacctcccggcccatggctgagcgcttcgccgtgcacgcccaggcctcggaccgtgtcaaggctgctgtcgccgagctcggcttgaagcagctggccgcgaagccagagaaccaggcccacgccatgacggccatctggctgcccgagggtctggccccacccgacgtgctccccgggctgctgaagcggggcgtcatctttgcagcgggtctgcacaaggaggctgcgaccaagtacatccggttcggacacatgggcgtcagtgtctccgatcctgcccgcaaggacattgacaacgctattgccgctctgaaggaggccatggccgaagccaagcaggccaagggactgtaa

SEQ ID NO: 90244 - protein, 453 aa, Aspergillus oryzae
MSQLRRTTQRLSLISRHLDQHLPLPDLNTPFSTERGSHPPDDIEYKPLDRTLPSTSPSQQPESPSTKMSSQAPHPTLLIPGPIEFDDAVLQSMAHYAESHVAPGFVKTFGETLTLVRKLFQSTNPAAQPFVISGSGTLGWDVVASSLVEKGENALVLHTGYFADSFATCLQTYGANATQLKAPIGERPSFEEIEQALKEKPYKIITITHVDTSTGVLSDIKRIAEIVRRVSPNTLVVVDGVCSVGCEEIAFDEWDLDVVLTASQKAIGCPPGLSILMTSPRAIDVFKNRQSPPASYYSSIGNWLPIMQNYENFKPSYFATPPTQLVHALHTTLSQITSRPMAERFAVHAQASDRVKAAVAELGLKQLAAKPENQAHAMTAIWLPEGLAPPDVLPGLLKRGVIFAAGLHKEAATKYIRFGHMGVSVSDPARKDIDNAIAALKEAMAEAKQAKGL

SEQ ID NO: 90245 - DNA, 1182 bp, Aedes aegypti; identical to SEQ ID NO: 68610
  CDS (1)..(1182)

SEQ ID NO: 90246 - protein, 393 aa, Aedes aegypti; identical to SEQ ID NO: 68611

SEQ ID NO: 90247 - DNA, 1378 bp, Spirodela polyrrhiza; identical to SEQ ID NO: 68612
  CDS (36)..(1241)

SEQ ID NO: 90248 - protein, 401 aa, Spirodela polyrrhiza; identical to SEQ ID NO: 68613

SEQ ID NO: 90249 - DNA, 1149 bp, Cryptococcus neoformans
  CDS (1)..(1149)
atgtccgacttccatcaagctccccacaagcttttggtcattcctggccctatcgagttctctgaccccgttctcgctgccaacgcgactcccggtactgcgcacacatctcctgcctttattcctgtcttcggcgaagcgctatctctccttcgtgacgttcttttatccgctaaggagagcggatcccaacctcttctgattgcgggtagcggtactttgggctgggatgcagtcgctgccaacctcattgagaaagatgaagaggctgttgtcctcaacactggctactttagtgactctttcggcgagtgcctcgaagcttacggtgccaaggttactcatgtgaaggccgaggtcggtggcattcctactgatgatgccattatctcagccctggcttctaagcctaagcttcttaccatcacccatgtcgacacttccaccggtgtcctttcaccagctgatcacatagcttctcttgttaagaagcactctcctgacaccctcattgctcttgacgccgtgtgctcagtggcttccgaagaaatcaagtttgacgaatggggactggatgtcgtcctcagcgctactcagaagggccttggtgtacctcctggtttgagcgttgtgcttgccagcaagagggctgtggagaccgttgagaaaaggaagactcctatccccgcttactatgtctcttggaagaagtggatccccattatgcagaactacgaaagcggaaagccatcttactttgctactccccccgtccagctcgtgtatgcgcttcacacctctctcaaatccattacttctgcacctctggcagaccgtttcaaggctcacaaggctgccagcgcctatgttaaggacagcctcgccgaacttggtcttgaattcgtccccaagagccgtgacattgctgcgaacggtatgaccgctgtcaggttccctaaaggtgtgaaggcgcccgatgttcttcctaaattggccgagcgagacatcgttgtggccgctggcttgcataaggccattgttagcgaatactttcgaatcggacacatgggtatcaccgctgtcgacaggcaaaggggcgatctggaaaaggttgtcaagggtatcaaggaggttttgggcaaggcttga

SEQ ID NO: 90250 - protein, 382 aa, Cryptococcus neoformans
MSDFHQAPHKLLVIPGPIEFSDPVLAANATPGTAHTSPAFIPVFGEALSLLRDVLLSAKESGSQPLLIAGSGTLGWDAVAANLIEKDEEAVVLNTGYFSDSFGECLEAYGAKVTHVKAEVGGIPTDDAIISALASKPKLLTITHVDTSTGVLSPADHIASLVKKHSPDTLIALDAVCSVASEEIKFDEWGLDVVLSATQKGLGVPPGLSVVLASKRAVETVEKRKTPIPAYYVSWKKWIPIMQNYESGKPSYFATPPVQLVYALHTSLKSITSAPLADRFKAHKAASAYVKDSLAELGLEFVPKSRDIAANGMTAVRFPKGVKAPDVLPKLAERDIVVAAGLHKAIVSEYFRIGHMGITAVDRQRGDLEKVVKGIKEVLGKA

SEQ ID NO: 90251 - DNA, 1436 bp, Cucumis melo; identical to SEQ ID NO: 68616
  CDS (207)..(1412)

SEQ ID NO: 90252 - protein, 401 aa, Cucumis melo; identical to SEQ ID NO: 68617

SEQ ID NO: 90253 - DNA, 1536 bp, Cucumis melo
  CDS (197)..(1402)
cttctgcctttttctttccttttctcttttttttccttcttcctatcttgtgttgttctctttctttctctctttatttatttatttctcttttctgctctgctctgctctgctctgctttgtcatttcccccgcagccacacaccattccatttctctctcaaggtgaaaactgagaatttgagcattagaaaaaatggattacgtttatgcacctggaaagaaccatctctttgtcccagggccggtcaacattcccgaaccggttctgcgggcaatgaaccgaaacaatgaggattatcgttcgcctgccgttcctgctttggcgaaaactcttcttgaagatgtgaaaaagattttcaaatctactactggaaccacattcctgattcccacaacaggtactggtgcttgggaaagtgctcttacaaacacattgtctcctggagataggatcgtgtcctttctcattggccagttcagtctgctctggattgatcagcagcagcgccttaacttcaacgtcgatgtcgtcgagagcgactggggtcagggtgccaatcttgatgttctggaatcaaagcttgctaccgatggcggccacaccatcaaggcaatttgcattgtccacaatgagacagctactggtgtcactaatgacctgtctaaagttcggttcctacttgataagtacaagcatcctgctcttttgctggtcgacggagtgtcatccatatgtgcacttgattttcgaatggatgaatggggagtcgacgttgctttaactggttcccaaaaggctctttctctccctacaggacttggaattatttgtgccagtcccaaagcactagtagcatccaaaacttcaaaatctgtcaaagtcttctttgattggaaagactatctcaaattctacaatctaggaacatactggccatacaccccttccattcagctcttgtatggattaagagcagctctcgatcttcttttcgaggaaggtttggacaatgtgattgctcggcacagtcgtcttggcaaagcaacaaggcttgctgtggaggcttgggggttgaaaaattgtacacaaaaagaggaatggtttagtgacactgttactgctgtgcttgttccttcttacattgacagtgcagaaattgtgagaagggcatggaagagatacaatttgagcttgggacttggccttaacaaagttgctggcaaagtattcagaattggtcaccttggaaaccttaatgagttgcaactgttgggatgtcttgctggtgtagaaatgatactgaaggatgtcgggtaccctgttaaactagggagtggagttgctgcagctagtgcatatcttcaaaataacatccctctcattccttcaaggatttaatttatctcccatgtccatgtaattatttctcattttcttcatctctaatactctgtaaaaaaagcacttctcaatactctacttctgttatatattttgatactttttacttttctagaaaaaaaaaaaaaaaa

SEQ ID NO: 90254 - protein, 401 aa, Cucumis melo; identical to SEQ ID NO: 68619

SEQ ID NO: 90255 - DNA, 1206 bp, Cucumis melo; identical to SEQ ID NO: 68622
  CDS (1)..(1206)

SEQ ID NO: 90256 - protein, 401 aa, Cucumis melo; identical to SEQ ID NO: 68623

SEQ ID NO: 90257 - DNA, 1430 bp, Cucumis melo; identical to SEQ ID NO: 68624
  CDS (101)..(1306)

SEQ ID NO: 90258 - protein, 401 aa, Cucumis melo; identical to SEQ ID NO: 68625

SEQ ID NO: 90259 - DNA, 1543 bp, Cucumis melo
  CDS (130)..(1335)
agatctggtttcaacacttattattctccaagcttcttcctctttcacttcattttgctgaggtttgttgagaccagtaagttcacagtttgcaatttgttaacatttaacaagtttgagaagggaaacatggactatgtttatggacctggaaggaaccatctttttgtgccggggccggttaatatccccgaacaagtccttcgagcaatgaaccggaacaacgaggattatcgttctccagctgttccagcactgacaaagactctgcttgaggatgtcaaaaagatattcaaaaccacatcaggcactccatttttgttccctaccacaggtactggtgcatgggagagtgctctcacaaacacattgtctccgggagatcggatcgtgtcattccttattggtcaattcagtttgctttggattgatcagcaacagcgtctcaatttcaaagtcgacgtgattgaaagtgaatggggtgaaggtgctaagcttgatgttttagctgcaaagcttgcagctgatactgatcatactataaaggcagtttgcattgttcataatgagacagcaactggcgtgactaatgatttgtctctagtaagaagaatactacatgaatacaggcatccagctcttttcctcgtggatggagtgtcttcgatatgtgctcttgattttcgtatggatgattggggagtggatgtggctttaactggctctcaaaaagctctttcccttcccaccggaattggtattgtttgcgccagcccccgagcactcgaggcatctaaaacagcaaaatcactcagagttttctttgactggaaggactatctcaagttctataacttaggaacatactggccttacactccttccatccaactcttatatgggcttagaccagctttggacctcgtatttgaggaaggccttgaaaatgtgattgcgagacataaacgtttaggccaagcaacaaggcttgctgtggaggcatggggtttgaagaactgcacacaaaaggaggaatggcacagtgacactgtgactgctgttgttgttcctccatacattgacagtgcagaaattgttagaagggcttggaagagatacaatttgagtttaggtcttggcctcaacaaagttgctggtaaagtcttcagaattggccaccttggcaacctaaatgagttgcaactgttgggttgtcttgctggtgtggagatgattctgaaggatgttggttatccagtgaagcttggaagtggtgttgcagcagcttcttcatatttgcagaacaacatccctctcattccttctcggatttgatattcgatcggttcgaaaccgtgatccgttctcatgcatttgctttcgtctactttgtaaagaaagaactgtattgtaatatttgttgtctactttaactccatgaaagcattcatcagaatgaatgtttggcttggctggctatgtattgagaaacttcataaatcctatattacaaacactttcaaagaaattccaattgcaaaca

SEQ ID NO: 90260 - protein, 401 aa, Cucumis melo; identical to SEQ ID NO: 68627

SEQ ID NO: 90261 - DNA, 1206 bp, Arabidopsis thaliana; identical to SEQ ID NO: 68536
  CDS (1)..(1206)

SEQ ID NO: 90262 - protein, 401 aa, Arabidopsis thaliana [sequence omitted]

SEQ ID NO: 90263 - DNA, 1206 bp, Brassica napus; identical to SEQ ID NO: 68640
  CDS (1)..(1206)

SEQ ID NO: 90264 - protein, 401 aa, Brassica napus; identical to SEQ ID NO: 68641

SEQ ID NO: 90265 - DNA, 1206 bp, Brassica napus; identical to SEQ ID NO: 68642
  CDS (1)..(1206)

SEQ ID NO: 90266 - protein, 401 aa, Brassica napus; identical to SEQ ID NO: 68643

SEQ ID NO: 90267 - DNA, 1206 bp, Glycine max; identical to SEQ ID NO: 68644
  CDS (1)..(1206)

SEQ ID NO: 90268 - protein, 401 aa, Glycine max; identical to SEQ ID NO: 68645

SEQ ID NO: 90269 - DNA, 1206 bp, Triticum aestivum; identical to SEQ ID NO: 68646
  CDS (1)..(1206)

SEQ ID NO: 90270 - protein, 401 aa, Triticum aestivum; identical to SEQ ID NO: 68647

SEQ ID NO: 90271 - DNA, 1212 bp, Zea mays; identical to SEQ ID NO: 68648
  CDS (1)..(1212)

SEQ ID NO: 90272 - protein, 403 aa, Zea mays; identical to SEQ ID NO: 68649

SEQ ID NO: 90273 - DNA, 25 bp, Artificial sequence
  primer
atgactaaatctgtagatacgctgc

SEQ ID NO: 90274 - DNA, 25 bp, Artificial sequence
  primer
tcactttttcctctgaagagctagt

SEQ ID NO: 90275 - protein, 365 aa, Artificial sequence
  consensus sequence
  Variant (4)..(9): Xaa in position 4 to 9 is any amino acid
  Variant (11)..(12): Xaa in position 11 to 12 is any amino acid
  Variant (14)..(23): Xaa in position 14 to 23 is any amino acid
  Variant (24)..(28): Xaa in position 24 to 28 is any or no amino acid
  Variant (30)..(45): Xaa in position 30 to 45 is any amino acid
  Variant (47)..(58): Xaa in position 47 to 58 is any amino acid
  Variant (59)..(62): Xaa in position 59 to 62 is any or no amino acid
  Variant (64)..(72): Xaa in position 64 to 72 is any amino acid
  Variant (74)..(77): Xaa in position 74 to 77 is any amino acid
  Variant (78)..(80): Xaa in position 78 to 80 is any or no amino acid
  Variant (82)..(89): Xaa in position 82 to 89 is any amino acid
  Variant (91)..(106): Xaa in position 91 to 106 is any amino acid
  Variant (108)..(114): Xaa in position 108 to 114 is any amino acid
  Variant (115)..(115): Xaa in position 115 is any or no amino acid
  Variant (117)..(138): Xaa in position 117 to 138 is any amino acid
  Variant (139)..(143): Xaa in position 139 to 143 is any or no amino acid
  Variant (145)..(148): Xaa in position 145 to 148 is any amino acid
  Variant (152)..(167): Xaa in position 152 to 167 is any amino acid
  Variant (168)..(169): Xaa in position 168 to 169 is any or no amino acid
  Variant (171)..(172): Xaa in position 171 to 172 is any amino acid
  Variant (175)..(175): Xaa in position 175 is any amino acid
  Variant (177)..(177): Xaa in position 177 is any amino acid
  Variant (179)..(186): Xaa in position 179 to 186 is any amino acid
  Variant (188)..(188): Xaa in position 188 is any amino acid
  Variant (190)..(191): Xaa in position 190 to 191 is any amino acid
  Variant (193)..(195): Xaa in position 193 to 195 is any amino acid
  Variant (197)..(197): Xaa in position 197 is any amino acid
  Variant (201)..(204): Xaa in position 201 to 204 is any amino acid
  Variant (206)..(206): Xaa in position 206 is any amino acid
  Variant (208)..(213): Xaa in position 208 to 213 is any amino acid
  Variant (215)..(216): Xaa in position 215 to 216 is any amino acid
  Variant (218)..(247): Xaa in position 218 to 247 is any amino acid
  Variant (248)..(258): Xaa in position 248 to 258 is any or no amino acid
  Variant (260)..(263): Xaa in position 260 to 263 is any amino acid
  Variant (265)..(267): Xaa in position 265 to 267 is any amino acid
  Variant (269)..(271): Xaa in position 269 to 271 is any amino acid
  Variant (273)..(279): Xaa in position 273 to 279 is any amino acid
  Variant (280)..(281): Xaa in position 280 to 281 is any or no amino acid
  Variant (283)..(288): Xaa in position 283 to 288 is any amino acid
  Variant (290)..(303): Xaa in position 290 to 303 is any amino acid
  Variant (304)..(304): Xaa in position 304 is any or no amino acid
  Variant (307)..(319): Xaa in position 307 to 319 is any amino acid
  Variant (320)..(321): Xaa in position 320 to 321 is any or no amino acid
  Variant (323)..(326): Xaa in position 323 to 326 is any amino acid
  Variant (328)..(353): Xaa in position 328 to 353 is any amino acid
  Variant (354)..(356): Xaa in position 354 to 356 is any or no amino acid
  Variant (358)..(359): Xaa in position 358 to 359 is any amino acid
  Variant (361)..(361): Xaa in position 361 is any amino acid
  Variant (363)..(364): Xaa in position 363 to 364 is any amino acid
PGPXXXXXXVXXAXXXXXXXXXXXXXXXPXXXXXXXXXXXXXXXXFXXXXXXXXXXXXXXXXGXXXXXXXXXNXXXXXXXGXXXXXXXXGXXXXXXXXXXXXXXXXVXXXXXXXXGXXXXXXXXXXXXXXXXXXXXXXXXXXXHXXXXTGVXXXXXXXXXXXXXXXXXXLXXVDXVXSXXXXXXXXDXWXXDXXXTXSQKXXXXPXGXXXXXXSXXAXXXXXXXXXXXXXXXXXXXXXXXXXXXXXXXXXXXXXXXXXTXXXXLXXXLXXXLXXXXXXXXXLXXXXXXHXXXXXXXXXXXXXXXGLXXXXXXXXXXXXXXXTXXXXPXXXXXXXXXXXXXXXXXXXXXXXXXXXXXKXXRXGXXG

SEQ ID NO: 90276 - protein, 29 aa, Artificial sequence
  protein pattern
  Variant (2)..(3): Xaa in position 2 to 3 is any amino acid
  Variant (4)..(4): Xaa in position 4 is any or no amino acid
  Variant (8)..(10): Xaa in position 8 to 10 is any amino acid
  Variant (11)..(11): Xaa in position 11 is Asp, Glu, Pro or Ser
  Variant (12)..(13): Xaa in position 12 to 13 is any amino acid
  Variant (15)..(16): Xaa in position 15 to 16 is any amino acid
  Variant (17)..(17): Xaa in position 17 is Ala, Pro or Ser
  Variant (18)..(18): Xaa in position 18 is any amino acid
  Variant (19)..(19): Xaa in position 19 is Ala, Asp, Glu, Gly, Asn, Gln, Ser or Thr
  Variant (20)..(23): Xaa in position 20 to 23 is any amino acid
  Variant (24)..(24): Xaa in position 24 is Ala, Asp, Gly or Ser
  Variant (25)..(28): Xaa in position 25 to 28 is any amino acid
  Variant (29)..(29): Xaa in position 29 is Ala, Asp, Glu, Gly or Ser
LXXXPGPXXXXXXVXXXXXXXXXXXXXXX

SEQ ID NO: 90277 - protein, 17 aa, Artificial sequence
  protein pattern
  Variant (2)..(3): Xaa in position 2 to 3 is any or no amino acid
  Variant (5)..(5): Xaa in position 5 is any amino acid
  Variant (6)..(6): Xaa in position 6 is Ala, Pro or Ser
  Variant (7)..(7): Xaa in position 7 is any amino acid
  Variant (8)..(8): Xaa in position 8 is Asn, Gln, Ser or Thr
  Variant (10)..(10): Xaa in position 10 is Phe, Ile, Leu or Val
  Variant (11)..(11): Xaa in position 11 is any amino acid
  Variant (12)..(12): Xaa in position 12 is Ala, Gly or Ser
  Variant (14)..(15): Xaa in position 14 to 15 is any amino acid
  Variant (16)..(16): Xaa in position 16 is Ala, Gly, Ser or Thr
  Variant (17)..(17): Xaa in position 17 is Ile or Leu
YXXTXXXXLXXXLXXXX

SEQ ID NO: 90278 - DNA, 831 bp, Saccharomyces cerevisiae
  CDS (1)..(831)
atgggtactagcatagtaaatctaaaccaaaagattgaactgcccccaatccaggtcttattcgagtcacttaaccgagaaaatgaaacaaaaccccacttcgaggaacgcaggttatatcaacctaatccttcatttgttcctagaacaaatatagcagttggtagcccagttaacccggttccagtatcatcccctgtttttttcattggtccttctccacagagaagcattcagaatcacaacgctattatgactcaaaacatacgtcagtatccagttatatataataataaccgagaagttatatctacgggtgagagaaattacataataactgtaggggggcctccggtaacttcttcgcagcccgagtatgagcatatctcaactcccaatttctatcaagagcagagactggcacaacctcatccggtaaatgagagtatgatgataggtggttatacaaatcctcagcctattagcatttcccgaggtaaaatgctatccggcaacataagtacgaactcggtccgcggatctaataatggatattccgcaaaagaaaaaaaacataaggcacatggtaagaggtccaatttaccaaaggccaccgtttcaattctaaacaaatggttacatgagcacgtaaacaacccttacccaaccgtgcaggaaaaaagagaactgctcgcgaaaactggtctaactaaacttcaaatttccaattggttcattaatgctaggagaagaaaaatattttctggccagaatgacgcaaataatttcagaagaaaattcagttcttctacaaatttagctaagttctga

SEQ ID NO: 90279 - protein, 276 aa, Saccharomyces cerevisiae
MGTSIVNLNQKIELPPIQVLFESLNRENETKPHFEERRLYQPNPSFVPRTNIAVGSPVNPVPVSSPVFFIGPSPQRSIQNHNAIMTQNIRQYPVIYNNNREVISTGERNYIITVGGPPVTSSQPEYEHISTPNFYQEQRLAQPHPVNESMMIGGYTNPQPISISRGKMLSGNISTNSVRGSNNGYSAKEKKHKAHGKRSNLPKATVSILNKWLHEHVNNPYPTVQEKRELLAKTGLTKLQISNWFINARRRKIFSGQNDANNFRRKFSSSTNLAKF

SEQ ID NO: 90280 - DNA, 921 bp, Saccharomyces cerevisiae
  CDS (1)..(921)
atgaattataactgcgaaatacaaaacaggaacagtaagaatgttgacaatcaagtcagtctaccccctatccaagttctatttaactccatagaaaaacggagtatgcccgagttggcattttcgaacatagaatactcgcatgggaaccttcggtctagtaccgaggaacaaaactatcctgcgcctgtgttacttccacagcatcattcgattgcgtatcccgcaattaattctggcggtactagtactactgctactcctactgcttctacagttgaaacgtccaagacgagtagcagtgctatggatacacaatctcaatatggcagttcaaagaagtcaaaatcggcgtccgatgatgcaaagccctgctacaaatccgccccaatatatgaaataatcaataaggaaaaggatgcgggggcacaatacaacaggccattttcggattttgtagaatctaaatcaaggaggaagcaaaattcgggcaggaggtctaacctgccaaaggaaacagtgcagatactgaatacttggttgctgaaccacctgaataacccctacccaactcaacaagaaaagagggagttgttaatcaaaactgggctaaccaagattcaactttctaattggttcataaatgtgagaagacgcaaaatatttagtgattactataccctggtaaactcaattcctaatgacaacgcgaataataccccagtggaacgagttcaaaacgtctcagcatatcataacacattatctgccacaaataatactatgtacgatgctacgtcaacctgctccacggattatgaattatccaagagatttgctcatgcccccgttacacgccgtaaaaaactaattgataggctggaagaattgaaaaagctatccaaccctgatatgaattga

SEQ ID NO: 90281 - protein, 306 aa, Saccharomyces cerevisiae
MNYNCEIQNRNSKNVDNQVSLPPIQVLFNSIEKRSMPELAFSNIEYSHGNLRSSTEEQNYPAPVLLPQHHSIAYPAINSGGTSTTATPTASTVETSKTSSSAMDTQSQYGSSKKSKSASDDAKPCYKSAPIYEIINKEKDAGAQYNRPFSDFVESKSRRKQNSGRRSNLPKETVQILNTWLLNHLNNPYPTQQEKRELLIKTGLTKIQLSNWFINVRRRKIFSDYYTLVNSIPNDNANNTPVERVQNVSAYHNTLSATNNTMYDATSTCSTDYELSKRFAHAPVTRRKKLIDRLEELKKLSNPDMN

SEQ ID NO: 90282 - DNA, 26 bp, Artificial sequence
  primer
atgggtactagcatagtaaatctaaa

SEQ ID NO: 90283 - DNA, 26 bp, Artificial sequence
  primer
tcagaacttagctaaatttgtagaag

SEQ ID NO: 90284 - DNA, 1626 bp, Saccharomyces cerevisiae
  CDS (1)..(1626)
atgcctatcttatcactatcttcaacacggaacagcgtgttaacaaggatatatgactaccttaaagcattagtgcagcaagtgattgtgcccaatgtggaagacgacaaatcttcgaaaagtactcctttcgaaaagttagaacctgcgaaacagaaccatccacagaaagactgctgtgctaccgaaaaggacgatctggttgacgtgagcgaattatttcccaaacagaacaacaaacaattgagtctaacatcaaaatcttcagttgtaccctgtgctttaaatttggataacctagaaacacctttctcaattaaaattgataataatggtgcagtcactacacagttgaacttggacgaaccgattttacggggccctagccgcggcgagccagcaaagttacagaatgacttgataagttctcccccgctagaggaatcctatatcaataatgaccagtacaaagctcttttcccctctaatttccttccaatcacgcccgtaagtagcgtaatcactcctgcatcgaagaaaagtattgatgaatctcccctatccgatgaggttcaaggaattgctgatgagtcatccgaaactttaccatatatatgtcactattgcgatgctaggttccgaatcagaggttacttaacacgacacataaaaaagcatgcgaaaaggaaggcctatcactgtccattttttgataatagcatttcgcaagaattgcgatgccatacttctggggggtttagcagaagagatacctacaaaacacatttgaaatctagacatttcacttacccagaaggtgttaagcctcaggaccgtaataaatcacctggagtgtgcactcaatgtggggaacactttagcactagtgagagctgggtggaaaaccacattgaggctgggagttgcaaaggtttaccagaaggctattcagagggaatacgagagaagaaaaagacgtctaaaatgaaaatgataaagacttcggatggccaaacaaggttcatctcatccgacgaaagtgtttccgaaccagctttacaaaataagaattgtatagaagcgacagtaatgcagtccaaggaacgccctaatgacaagatcataccaaccaaaaccgaaaaaaacgattttggaataggcactcaatggtttgaacgcaaacaaatatcaagacctacacaaactacacaatcaagaggacctacagaagtccaaaatctcaaagagtggtcaataatatctcccccaattttgtcaccccaaaatgcatcttctgtaccacaagagtatcaatcatcaagatacacattgcatatggattctccagcattatcctctgcctcctcagcgctatctccactttcaggcgatccaataacaactacagaaacaaataagtcatacccattggattcagagcaatcgttgttggagccagacaaaaccgaggaggacgcaatcaatcagtcaaaggaaagcaatatgatttccattaatgagatgttacagaagcaaatggactttgaacttctgggtgagaatcatttgaaggagactcaagattatctggccctttacaaaaaagcttatgggatagaattttaa

SEQ ID NO: 90285 - protein, 541 aa, Saccharomyces cerevisiae
MPILSLSSTRNSVLTRIYDYLKALVQQVIVPNVEDDKSSKSTPFEKLEPAKQNHPQKDCCATEKDDLVDVSELFPKQNNKQLSLTSKSSVVPCALNLDNLETPFSIKIDNNGAVTTQLNLDEPILRGPSRGEPAKLQNDLISSPPLEESYINNDQYKALFPSNFLPITPVSSVITPASKKSIDESPLSDEVQGIADESSETLPYICHYCDARFRIRGYLTRHIKKHAKRKAYHCPFFDNSISQELRCHTSGGFSRRDTYKTHLKSRHFTYPEGVKPQDRNKSPGVCTQCGEHFSTSESWVENHIEAGSCKGLPEGYSEGIREKKKTSKMKMIKTSDGQTRFISSDESVSEPALQNKNCIEATVMQSKERPNDKIIPTKTEKNDFGIGTQWFERKQISRPTQTTQSRGPTEVQNLKEWSIISPPILSPQNASSVPQEYQSSRYTLHMDSPALSSASSALSPLSGDPITTTETNKSYPLDSEQSLLEPDKTEEDAINQSKESNMISINEMLQKQMDFELLGENHLKETQDYLALYKKAYGIEF

SEQ ID NO: 90286 - DNA, 1560 bp, Saccharomyces cerevisiae
  CDS (1)..(1560)
atgccctctaccacgctactgtttccgcagaaacatattagggccattccaggcaagatatacgcgttcttcagagagctcgtcagcggagttattatatccaagccagatctaagtcatcattattcttgtgaaaatgcgacaaaggaggaaggcaaagatgcagcagatgaagaaaagactaccacaagtttgtttcccgaatcaaataatatagaccgttctttaaatggtggctgctctgtgatcccttgctccatggatgtcagcgatttgaacacgccaatatcgatcacactatctcctgagaatcgtatcaaatcagaagtaaatgccaagtcactgctcggatcaaggccagaacaagatacaggcgcccctatcaaaatgtctactggtgtcacaagctctccattaagtccatcaggctccaccccagaacattccaccaaggtcttgaacaacggcgaagaggagttcatttgtcactactgtgacgctactttcaggattagaggatatctaacgagacatattaagaagcacgccatcgaaaaggcgtatcactgtccattttttaacagtgccactcctcctgatcttagatgccacaattcgggtggttttagcagacgcgatacttataaaactcatttgaaggcaaggcacgtgctgtaccccaaaggtgttaaaccacaagaccgtaacaagtcgtccggccattgcgctcaatgtggtgaatacttttccaccattgaaaatttcgttgagaatcacattgagtctggggactgtaaagctttaccgcaggggtataccaagaaaaatgaaaaaagatctggaaaattaaggaagatcaagacatctaatggtcattctagattcatatccacttcgcaaagtgttgtagaacctaaagtacttttcaacaaggatgccgtagaggctatgaccatagtggctaataacagttcgggcaatgatattatatccaagtacggaaacaacaaattaatgttaaactcggaaaactttaaagtcgacatacccaagagaaagagaaaatatatcaagaaaaagcagcaacaggtatctggatcgacggtaaccacaccagaggtagctacacaaaacaatcaagaagtggcacctgatgaaatctcatccgccacaattttttcaccttttgatactcatctactcgagcccgtcccttctagttcatcggaatcttccgctgaagttatgttccatggcaagcaaatgaagaattttttgattgacataaacagcttcacaaatcaacagcagcaggcacaagataatccttcgttcctgccactcgatattgaacaatcttcatatgatttgagcgaagacgcaatgtcatatcccatcatatccacacaaagcaaccgtgattgcacgcagtatgataacacaaaaatctcacaaatcttacaatcacaactaaatccagaatatctcagcgaaaatcacatgagagagacacaacaatatttgaatttttacaatgacaactttgggtcacaattttga

SEQ ID NO: 90287 - protein, 519 aa, Saccharomyces cerevisiae
MPSTTLLFPQKHIRAIPGKIYAFFRELVSGVIISKPDLSHHYSCENATKEEGKDAADEEKTTTSLFPESNNIDRSLNGGCSVIPCSMDVSDLNTPISITLSPENRIKSEVNAKSLLGSRPEQDTGAPIKMSTGVTSSPLSPSGSTPEHSTKVLNNGEEEFICHYCDATFRIRGYLTRHIKKHAIEKAYHCPFFNSATPPDLRCHNSGGFSRRDTYKTHLKARHVLYPKGVKPQDRNKSSGHCAQCGEYFSTIENFVENHIESGDCKALPQGYTKKNEKRSGKLRKIKTSNGHSRFISTSQSVVEPKVLFNKDAVEAMTIVANNSSGNDIISKYGNNKLMLNSENFKVDIPKRKRKYIKKKQQQVSGSTVTTPEVATQNNQEVAPDEISSATIFSPFDTHLLEPVPSSSSESSAEVMFHGKQMKNFLIDINSFTNQQQQAQDNPSFLPLDIEQSSYDLSEDAMSYPIISTQSNRDCTQYDNTKISQILQSQLNPEYLSENHMRETQQYLNFYNDNFGSQF

SEQ ID NO: 90288 - DNA, 2067 bp, Candida glabrata CBS 138
  CDS (1)..(2067)
atgccgtcgttttcgttgcttagaccaagggagacatctctttggaaggcggtgaagaacttgatagacgctatcattgttcctgattcagggaaggatgcgttgcctgtggagccagcgggtgtgagtgcagcgcctgcgaaggctgcgatgtctgcgatgtctgcgaagcctactagaaagtataggagaaacaagaaggttgctgacgactctagaagcactaaatcgcgtgattccttggataacgcttctacgatgttcccaaagatctcttataatggggacatcagcctgggtacagccaagccttgtgctctagacatgaactctatgaatggctccgggttcaacttcactttcaactcaaacgatgtcatagagaccaatttcgatatgatgcagctgcaactacctgatttcccacaacagccacaacaagattttgctatacacaacgacttaaacattaacttgcccgtgcaacctgaagtacaagtcaaacaggaacctaagccagtggacagcatcaccagcatcaagaaagacactaaggctaaatctgagactttggacgatgatgagaaggagtttgtttgtcactactgtgatgctaagttcaggataagaggatatttaacaaggcatatcaaaaaacacgccatagaaaaggcctaccattgtcccttctacaacggccaggaagtgccatcaaagagatgtcacaactctggtggtttcagcagacgtgacacatataagacacacatgaaggctcgccatttgatttacccagaaggtgtaaacttcgcctccagaaatgaatcttccggtcactgtgccaaatgcggaggttttatcgccaaggcggccacctacgtggaagatcatattgaatctggacaatgtccagcactaccagctggatactactcggagagcttaagaagaacctccaagagtgcttctaaatctgcaacaccagcaagcatttcatcacaatccgtttctcctaccactattccagccagcttgccaacaaattatcaaaagaagagaagaaataagatgaagaagatcacaacatcgaatggtactactagatacgtatcgacactacaaagttgggtggaaccaaaagtattggagaacaaagatgccttggaagctatggctatcgtagcttctgaaactggtagaaatgatgttttcactacattggatgacaataaaatattaatggactcccaatattatgtagccaaatcaggttcaagacagaactcaacccgcaaaaactctgataagaccataaaacaaaattctagacagagaaacagcactggcaaacctgataatgggaatggacttgtaactccagaatatggctatgaacaaataaaacaaggaagtcggagcaacagcaatagtaagggcgtgaacttacatattgcacctccaaacatgggagttaaattagagcacgccgacaacatgcttgcttctcctgctacatctatctctactggtgttatgaatagcatatcacctatatctaactcagccatggattcctccagtactcattcttcttatgcttcttcactgaatgataattgtggtatcaacacgacacagaaaatgcaacatacccaaacatcaaacattctgccaaataatgacatggcaaatgctggccctgatttcagtaatctagttgatctagataagataggttttgatgccatgcttgctctttgtccagtaaacaatgaccaagagaattataaagaggacaaaaacttcatgttaagcaatatgcaggcatctggcaacagaataaattttccagcggatattgaaacgaatttaaacaagtccgcagcagacatacaactcggcaatacctcaatgaggccacaaaattttgatacacagcactttccaagagagcatatggtagttgctgatgttgatcccaccaatgctgggttgatgtcagatttgcacgtcaaagaaaatcaaaaatatatgcaatattaccaacagtttttcagcatgaattga

SEQ ID NO: 90289 - protein, 688 aa, Candida glabrata CBS 138
MPSFSLLRPRETSLWKAVKNLIDAIIVPDSGKDALPVEPAGVSAAPAKAAMSAMSAKPTRKYRRNKKVADDSRSTKSRDSLDNASTMFPKISYNGDISLGTAKPCALDMNSMNGSGFNFTFNSNDVIETNFDMMQLQLPDFPQQPQQDFAIHNDLNINLPVQPEVQVKQEPKPVDSITSIKKDTKAKSETLDDDEKEFVCHYCDAKFRIRGYLTRHIKKHAIEKAYHCPFYNGQEVPSKRCHNSGGFSRRDTYKTHMKARHLIYPEGVNFASRNESSGHCAKCGGFIAKAATYVEDHIESGQCPALPAGYYSESLRRTSKSASKSATPASISSQSVSPTTIPASLPTNYQKKRRNKMKKITTSNGTTRYVSTLQSWVEPKVLENKDALEAMAIVASETGRNDVFTTLDDNKILMDSQYYVAKSGSRQNSTRKNSDKTIKQNSRQRNSTGKPDNGNGLVTPEYGYEQIKQGSRSNSNSKGVNLHIAPPNMGVKLEHADNMLASPATSISTGVMNSISPISNSAMDSSSTHSSYASSLNDNCGINTTQKMQHTQTSNILPNNDMANAGPDFSNLVDLDKIGFDAMLALCPVNNDQENYKEDKNFMLSNMQASGNRINFPADIETNLNKSAADIQLGNTSMRPQNFDTQHFPREHMVVADVDPTNAGLMSDLHVKENQKYMQYYQQFFSMN

SEQ ID NO: 90290 - DNA, 1872 bp, Kluyveromyces lactis NRRL Y-1140
  CDS (1)..(1872)
atgccttccgtgcaattgctagatacggataagtcaattctcaaacgactctcttggcgtttgactaattggttcaatgccatcgccagtcacgtcgtaggtgtttctttggactgtaagacattacaggatgattcaagtatggacgtgagaaacaagggcaataagtcggattttgaaacggaagatgaagatgaaggtgaagatgggaaacttaatgaaaatggaaagaactcgcaagaagatactgacaacaggcgcatttctcttttcccatcctcgcataatgtggacagacagttagaatataatgcctctgtcataccatgttctttgaacatcaatggattacaaagcccaatgtccgttgcaaggactcccgaaggtcaaatggaatggaagatgacgatagacactgaccctgttacctctaagagagctttcgcacagaatacatctccaaaggtaaatgaggatcgtgaaacgaaaactactcaggatattacccctaagactgacgctactccagagacaggagagacgtctgcgaatgatgattcgaagacatcattgaatgatcatgtggatgttatcaagtcagaagatagttctgtaggttcaacaccagaagtttctagtggtattgttcctgtctcatcaaccgacagtgagtctcaggtgcccactgataagtcagatgagaagaaggaaacagatatgaaatttgtgtgtcattattgtgatgcagaattcaaaatgagagggtatttaactcgccacatcaagaaacatgccatagaaaaggcatatcattgtcccttctgggatgcatctctaccttctgagaaacgttgtcactcgacaggtggcttctccagaagagattcttataagacccatttgagatcaaggcatttcatttatcctgataatgttaagaatgtggaccgtgtgaactctcatggacattgcggccgttgtaaaaaacactttgattcgacaaatgaatggattgaacatcatattgaaaatcgtgaatgtgaagctattttgccaactttcaagggtaacctgaagaagagtaaaaagtgtgggaagttgaaaatgatcatgacctctgatggacagtcacgtttcatttccaaccaagcaactatcagcgaagccaaggtgcctatcagcaacttcatgccagaaaataggaagaagttatcgagtgagtattctaaaccggcttctgcctccccgcccatcaaacaaaccatatctgacctggctttggataacacttttgctctggcttcaataccactaaactacaatggaaatatcaatggaaatatcaatgaacataacgacaatcagaattacggtcatttcgaaaaccaagtgtatggcaacggtgtcccatctctcgctccctcgaactctgtccccttcacaggacaaccacaactaatacctcattcgggatctcaaaatacagctactcatttacgcaaatgtacacaaccattcgatgaattctcctcattgaacaaatcaccagttgaagatgcagctttggacaccgtacggtctatctcatcccaatcctcccatgaacatactgttctccataaagaaatgaacttcatatctaccgatcaaaagtcacaaataaatcctgattgggaagtactccccctcgacatcgagcaagcaggcatgtctatggaagaagaagtgaaattcacgaataactcgaatgaacctaagattaatactactttacaaagacaaatgaatgagtacgctctgggtgagaggcacttcagagaaactcagcaattcatgaactttttcaattatacttacaattaccaagaatga

SEQ ID NO: 90291 - protein, 623 aa, Kluyveromyces lactis NRRL Y-1140
MPSVQLLDTDKSILKRLSWRLTNWFNAIASHVVGVSLDCKTLQDDSSMDVRNKGNKSDFETEDEDEGEDGKLNENGKNSQEDTDNRRISLFPSSHNVDRQLEYNASVIPCSLNINGLQSPMSVARTPEGQMEWKMTIDTDPVTSKRAFAQNTSPKVNEDRETKTTQDITPKTDATPETGETSANDDSKTSLNDHVDVIKSEDSSVGSTPEVSSGIVPVSSTDSESQVPTDKSDEKKETDMKFVCHYCDAEFKMRGYLTRHIKKHAIEKAYHCPFWDASLPSEKRCHSTGGFSRRDSYKTHLRSRHFIYPDNVKNVDRVNSHGHCGRCKKHFDSTNEWIEHHIENRECEAILPTFKGNLKKSKKCGKLKMIMTSDGQSRFISNQATISEAKVPISNFMPENRKKLSSEYSKPASASPPIKQTISDLALDNTFALASIPLNYNGNINGNINEHNDNQNYGHFENQVYGNGVPSLAPSNSVPFTGQPQLIPHSGSQNTATHLRKCTQPFDEFSSLNKSPVEDAALDTVRSISSQSSHEHTVLHKEMNFISTDQKSQINPDWEVLPLDIEQAGMSMEEEVKFTNNSNEPKINTTLQRQMNEYALGERHFRETQQFMNFFNYTYNYQE

SEQ ID NO: 90292 - DNA, 1626 bp, Saccharomyces cerevisiae
  CDS (1)..(1626)
atgcctatcttatcactatcttcaacacggaacagcgtgttaacaaggatatatgactaccttaaagcattagtgcagcaagtgattgtgcccaatgtggaagacgacaaatcttcgaaaagtactcctttcgaaaagttagaacctgcgaaacagaaccatccacagaaagactgctgtgctaccgaaaaggacgatctggttgacgtgagcgaattattccccaaacagaacaacaaacaattgagtctaacatcaaaatcttcagttgtaccctgtgctttaaatttggataacctaggaacacctttctcaattaaaattgataataatggtgcagtcactacacagttgaacttggacgaaccgattttacggggccctagccgcggcgagccagcaaagttacagaatgacttgataagttctcccccgctagaggaatcctatatcaataatgaccagtacaaagctcttttcccctctaatttccttccaatcacgcccgtaagtagcgtaatcactcctgcatcgaagaaaagtattgatgaatctcccctatccgatgaggttcaaggaattgctgatgagtcatccgaaactttaccatatatatgtcactattgcgatgctaggttccgaatcagaggttacttaacacgacacataaaaaagcatgcgaaaaggaaggcctatcactgtccattttttgataatagcatttcgcaagaattgcgatgccatacttctggggggtttagcagaagagatacctacaaaacacatttgaaatctagacatttcacttacccagaaggtgttaagcctcaggaccgtaataaatcacctggagtgtgcactcaatgtggggaacactttagcactagtgagagctgggtggaaaaccacattgaggctgggagttgcaaaggtttaccagaaggctattcagagggaatacgagagaagaaaaagacgtctaaaatgaaaatgataaagacttcggatggccaaacaaggttcatctcatccgacgaaagtgtttccgaaccagctttacaaaataagaattgtatagaagcgacagtaatgcagtccaaggaacgccctaatgacaagatcataccaaccaaaaccgaaaaaaacgattttggaataggcactcaatggtttgaacgcaaacaaatatcaagacctacacaaactacacaatcaagaggacctacagaagtccaaaatctcaaagagtggtcaataatatctcccccaattttgtcaccccaaaatgcatcttctgtaccacaagagtatcaatcatcaagatacacattgcatatggattctccagcattatcctctgcctcctcagcgctatctccactttcaggcgatccaataacaactacagaaacaaataagtcatacccattggattcagagcaatcgttgttggagccagacaaaaccgaggaggacgcaatcaatcagtcaaaggaaagcaatatgatttccattaatgagatgttacagaagcaaatggactttgaacttctgggtgagaatcatttgaaggagactcaagattatctggccctttacaaaaaagcttatgggatagaattttaa

SEQ ID NO: 90293 - protein, 541 aa, Saccharomyces cerevisiae
MPILSLSSTRNSVLTRIYDYLKALVQQVIVPNVEDDKSSKSTPFEKLEPAKQNHPQKDCCATEKDDLVDVSELFPKQNNKQLSLTSKSSVVPCALNLDNLGTPFSIKIDNNGAVTTQLNLDEPILRGPSRGEPAKLQNDLISSPPLEESYINNDQYKALFPSNFLPITPVSSVITPASKKSIDESPLSDEVQGIADESSETLPYICHYCDARFRIRGYLTRHIKKHAKRKAYHCPFFDNSISQELRCHTSGGFSRRDTYKTHLKSRHFTYPEGVKPQDRNKSPGVCTQCGEHFSTSESWVENHIEAGSCKGLPEGYSEGIREKKKTSKMKMIKTSDGQTRFISSDESVSEPALQNKNCIEATVMQSKERPNDKIIPTKTEKNDFGIGTQWFERKQISRPTQTTQSRGPTEVQNLKEWSIISPPILSPQNASSVPQEYQSSRYTLHMDSPALSSASSALSPLSGDPITTTETNKSYPLDSEQSLLEPDKTEEDAINQSKESNMISINEMLQKQMDFELLGENHLKETQDYLALYKKAYGIEF

SEQ ID NO: 90294 - DNA, 1554 bp, Saccharomyces kluyveri
  CDS (1)..(1554)
atgcaatacaaatataaactactcaaacaaataaaacaagctaatagaatgcctatagtttccttgctagatacggaaacatctgtgttaaagagattatcacttaaggtggtatcttttttcaaaaaattcgctaatgcggtgataatcgcgcatcctgaagaaccacaagaacaaactcacaaaaaagaatcaacgacaagacaaaatccatctttgttcccctcaagaaacaatgtcgacaactctctatctctgaattctacggtggtaccatgttctatggacatttctactttgcaaagtcctatgtccttaacaagaacacctgaaggtgctatggaatggaggctaaatgaccctgccagtattatgcctgggaatgctcttccaatttcaccatcaagtgggtcagaatctaagcacgactctcagaaccccaaagatggtgaagaaatcgacgacgaagaacaaagaggaaagtacgtctgccattattgtgatgcggagttccgtatcaggggttatttgactcgtcacataaaaaaacatgctgttgaaaaggcttaccattgccccttcttcaatagtaaactaccaccagaatcacgttgtcatactaccggtggcttctctaggagagacacatacaagactcatttgaagagtaggcatttcatatacccaaagggtataaaaacccaagagcgtaacaaatcttctgggaactgctctcattgtggagaatggtttgaaaacaccgaaaagtggattgaaaatcacatcgaaaccggcgattgcacgggccttcctgagggttttgttggacgtgttaaaaattctaggaagtcaggaaagttgaagatgatcaagacatcgactggccactccagatttatatccactgctcagagtgtcattgaaccaaatgttttacttaataaggatgctatcgaggctatggccatagtggttaacgaaactcgctctcatggaaacgtgcaacctgcaatcaccaagatgggtgacaacagattgatgctgcgctctgaaaactttaagggtgctccaaaacctaagaaaaataaactcaagaaaattcaaatgaaaaaatctccaggggaggaatgcttggcatcaacagtatcttctcacgacagcttcctaagcccaatggacgaaactccactggacgaaatatgtctatccatggatttgtcccctgtggaagatggtgcgctagaacctgtaaatactggctcttcagtatcttctcatgaaatttgtaagaaaactgatgttttgtcgtttcccgtcgctgccgtcaaaattccacccatcgactttaatgacccatgtaacgtgccgcttgatatggagcagtgctctatgtatcctttgatcgaagagcaattttataaacctattgagaagcctcatattaatgaaaccttggataggcaaatggatccagtgctggtgagtgagaggcaaatgcgggaaacacagcaatacctgaatttttataactctacatttcacagcaatctgtga

SEQ ID NO: 90295 - protein, 517 aa, Saccharomyces kluyveri
MQYKYKLLKQIKQANRMPIVSLLDTETSVLKRLSLKVVSFFKKFANAVIIAHPEEPQEQTHKKESTTRQNPSLFPSRNNVDNSLSLNSTVVPCSMDISTLQSPMSLTRTPEGAMEWRLNDPASIMPGNALPISPSSGSESKHDSQNPKDGEEIDDEEQRGKYVCHYCDAEFRIRGYLTRHIKKHAVEKAYHCPFFNSKLPPESRCHTTGGFSRRDTYKTHLKSRHFIYPKGIKTQERNKSSGNCSHCGEWFENTEKWIENHIETGDCTGLPEGFVGRVKNSRKSGKLKMIKTSTGHSRFISTAQSVIEPNVLLNKDAIEAMAIVVNETRSHGNVQPAITKMGDNRLMLRSENFKGAPKPKKNKLKKIQMKKSPGEECLASTVSSHDSFLSPMDETPLDEICLSMDLSPVEDGALEPVNTGSSVSSHEICKKTDVLSFPVAAVKIPPIDFNDPCNVPLDMEQCSMYPLIEEQFYKPIEKPHINETLDRQMDPVLVSERQMRETQQYLNFYNSTFHSNL

SEQ ID NO: 90296 - DNA, 1638 bp, Saccharomyces bayanus
  CDS (1)..(1638)
atgcctatcctatcactatcctcaacacgggacaacgtgtttgcaaaaatatacgattacctcaaggtactagttcaacaggtgattgtgcccaatttcgaggatgacaagtcgccaaaacgtactccttccgatataaaagaagccaccatacgggaccactctcacaaagactattctgctactaaggagagcgacccgagtgatgtttgccagctgtttccaagtcagaacaacaatcagctgagtttgacgtcaaaatcatcagttgttccttgcgctttgaactttgaaagcctgcaaacgcccttctctattgacatagacgaaaacggcacagtgagcacgcagttgaacttgggaggaaagattccacaggattctgttaacgatgacttaacaaagtcacagagcgatttgttaagttcacccttactcgatgaatcttacatgaataatgaacagtataaagcccttttcccctctagttttcttccgataacacctgtaagtaacgtgattacccctgcatcgaagaaaagtgttgacgactctccactatccgacagcgttcagggcaacaccgatgaatcatcggaaactttgccatacatctgccactattgtgattccaggttccgaattagaggatacctaacacggcatataaaaaagcatgcgaaaaggaaggcttaccactgtccattttttgatggcagcatctcacaagaattgcgctgccataattcgggagggttcagcagaagagatacgtacaagacacatctgaaatccagacacttcaactacccggaaggtatcaagcctcaataccgtaataaatcttccggagcatgtgctcaatgtggagaatattttagcagtagtgagagctgggtggaaaaccatattgaggctggaagttgcaaggggttaccagaaggatattcacacagaatacgagagaagaagaagacgtccaaaatgaaaatgataaagaccttagacggccaaacaagattcatttcctcggaggaaagtgttcttgaaccaagggggttactaaatggaaattccacggaaacagcagtaataaatgccaagcagtcgcatagagacaacaccctgccgacaaaaacggggggaagcgaaattgttatggacacccaatggtttgaacacaaacgaaaccccaaacattcgcaagctacaaggaaattacaatcacaggtaactacggacattcaaaactcccaaaatgcgtcgattatatctcctcccaccacgtcacctcaagacacatctcttgtaggccaggaatatcattcatccaaatacacactacatatggactccccagccttatcctccgtctcatcagcattgtctccactttcaggggacccaatcgcaagtgcagaatcggacaacttatacccgttggattcggagcaatcgttcttagaaccgaacgggatggacgagcacacgattggccacctgcagaggagtaacatgatctccataaatgagatattagagaagcaaatgaatttcgagttactagggcggaatcacttgaaggaaactcaggattatttagctctttacaagaaggctagcggggcggaattttaa

SEQ ID NO: 90297 - protein, 545 aa, Saccharomyces bayanus
MPILSLSSTRDNVFAKIYDYLKVLVQQVIVPNFEDDKSPKRTPSDIKEATIRDHSHKDYSATKESDPSDVCQLFPSQNNNQLSLTSKSSVVPCALNFESLQTPFSIDIDENGTVSTQLNLGGKIPQDSVNDDLTKSQSDLLSSPLLDESYMNNEQYKALFPSSFLPITPVSNVITPASKKSVDDSPLSDSVQGNTDESSETLPYICHYCDSRFRIRGYLTRHIKKHAKRKAYHCPFFDGSISQELRCHNSGGFSRRDTYKTHLKSRHFNYPEGIKPQYRNKSSGACAQCGEYFSSSESWVENHIEAGSCKGLPEGYSHRIREKKKTSKMKMIKTLDGQTRFISSEESVLEPRGLLNGNSTETAVINAKQSHRDNTLPTKTGGSEIVMDTQWFEHKRNPKHSQATRKLQSQVTTDIQNSQNASIISPPTTSPQDTSLVGQEYHSSKYTLHMDSPALSSVSSALSPLSGDPIASAESDNLYPLDSEQSFLEPNGMDEHTIGHLQRSNMISINEILEKQMNFELLGRNHLKETQDYLALYKKASGAEF

SEQ ID NO: 90298 - DNA, 26 bp, Artificial sequence
  primer
atgcctatcttatcactatcttcaac

SEQ ID NO: 90299 - DNA, 28 bp, Artificial sequence
  primer
ttaaaattctatcccataagcttttttg

SEQ ID NO: 90300 - protein, 736 aa, Artificial sequence
  consensus sequence
  Variant (3)..(5): Xaa in position 3 to 5 is any amino acid
  Variant (7)..(27): Xaa in position 7 to 27 is any amino acid
  Variant (28)..(31): Xaa in position 28 to 31 is any or no amino acid
  Variant (33)..(56): Xaa in position 33 to 56 is any amino acid
  Variant (57)..(89): Xaa in position 57 to 89 is any or no amino acid
  Variant (93)..(95): Xaa in position 93 to 95 is any amino acid
  Variant (96)..(96): Xaa in position 96 is any or no amino acid
  Variant (98)..(100): Xaa in position 98 to 100 is any amino acid
  Variant (103)..(104): Xaa in position 103 to 104 is any amino acid
  Variant (105)..(107): Xaa in position 105 to 107 is any or no amino acid
  Variant (109)..(109): Xaa in position 109 is any amino acid
  Variant (112)..(117): Xaa in position 112 to 117 is any amino acid
  Variant (119)..(120): Xaa in position 119 to 120 is any amino acid
  Variant (122)..(122): Xaa in position 122 is any amino acid
  Variant (123)..(123): Xaa in position 123 is any or no amino acid
  Variant (125)..(158): Xaa in position 125 to 158 is any amino acid
  Variant (159)..(220): Xaa in position 159 to 220 is any or no amino acid
  Variant (222)..(224): Xaa in position 222 to 224 is any amino acid
  Variant (226)..(244): Xaa in position 226 to 244 is any amino acid
  Variant (245)..(245): Xaa in position 245 is any or no amino acid
  Variant (252)..(252): Xaa in position 252 is any amino acid
  Variant (268)..(269): Xaa in position 268 to 269 is any amino acid
  Variant (277)..(285): Xaa in position 277 to 285 is any amino acid
  Variant (289)..(290): Xaa in position 289 to 290 is any amino acid
  Variant (305)..(305): Xaa in position 305 is any amino acid
  Variant (308)..(309): Xaa in position 308 to 309 is any amino acid
  Variant (312)..(312): Xaa in position 312 is any amino acid
  Variant (314)..(314): Xaa in position 314 is any amino acid
  Variant (316)..(318): Xaa in position 316 to 318 is any amino acid
  Variant (321)..(321): Xaa in position 321 is any amino acid
  Variant (323)..(323): Xaa in position 323 is any amino acid
  Variant (325)..(325): Xaa in position 325 is any amino acid
  Variant (327)..(328): Xaa in position 327 to 328 is any amino acid
  Variant (331)..(332): Xaa in position 331 to 332 is any amino acid
  Variant (334)..(340): Xaa in position 334 to 340 is any amino acid
  Variant (342)..(342): Xaa in position 342 is any amino acid
  Variant (346)..(346): Xaa in position 346 is any amino acid
  Variant (348)..(348): Xaa in position 348 is any amino acid
  Variant (350)..(351): Xaa in position 350 to 351 is any amino acid
  Variant (354)..(354): Xaa in position 354 is any amino acid
  Variant (356)..(361): Xaa in position 356 to 361 is any amino acid
  Variant (362)..(397): Xaa in position 362 to 397 is any or no amino acid
  Variant (399)..(401): Xaa in position 399 to 401 is any amino acid
  Variant (403)..(403): Xaa in position 403 is any amino acid
  Variant (405)..(405): Xaa in position 405 is any amino acid
  Variant (407)..(407): Xaa in position 407 is any amino acid
  Variant (410)..(410): Xaa in position 410 is any amino acid
  Variant (412)..(413): Xaa in position 412 to 413 is any amino acid
  Variant (418)..(420): Xaa in position 418 to 420 is any amino acid
  Variant (422)..(423): Xaa in position 422 to 423 is any amino acid
  Variant (426)..(426): Xaa in position 426 is any amino acid
  Variant (427)..(427): Xaa in position 427 is any or no amino acid
  Variant (429)..(429): Xaa in position 429 is any amino acid
  Variant (431)..(434): Xaa in position 431 to 434 is any amino acid
  Variant (436)..(455): Xaa in position 436 to 455 is any amino acid
  Variant (456)..(464): Xaa in position 456 to 464 is any or no amino acid
  Variant (466)..(474): Xaa in position 466 to 474 is any amino acid
  Variant (475)..(476): Xaa in position 475 to 476 is any or no amino acid
  Variant (478)..(489): Xaa in position 478 to 489 is any amino acid
  Variant (490)..(503): Xaa in position 490 to 503 is any or no amino acid
  Variant (505)..(520): Xaa in position 505 to 520 is any amino acid
  Variant (521)..(523): Xaa in position 521 to 523 is any or no amino acid
  Variant (525)..(525): Xaa in position 525 is any amino acid
  Variant (526)..(562): Xaa in position 526 to 562 is any or no amino acid
  Variant (564)..(575): Xaa in position 564 to 575 is any amino acid
  Variant (576)..(576): Xaa in position 576 is any or no amino acid
  Variant (579)..(585): Xaa in position 579 to 585 is any amino acid
  Variant (587)..(588): Xaa in position 587 to 588 is any amino acid
  Variant (590)..(602): Xaa in position 590 to 602 is any amino acid
  Variant (603)..(671): Xaa in position 603 to 671 is any or no amino acid
  Variant (675)..(675): Xaa in position 675 is any amino acid
  Variant (678)..(696): Xaa in position 678 to 696 is any amino acid
  Variant (697)..(707): Xaa in position 697 to 707 is any or no amino acid
  Variant (709)..(711): Xaa in position 709 to 711 is any amino acid
  Variant (713)..(714): Xaa in position 713 to 714 is any amino acid
  Variant (716)..(724): Xaa in position 716 to 724 is any amino acid
  Variant (726)..(727): Xaa in position 726 to 727 is any amino acid
  Variant (731)..(731): Xaa in position 731 is any amino acid
  Variant (733)..(735): Xaa in position 733 to 735 is any amino acid
MPXXXLXXXXXXXXXXXXXXXXXXXXXXXXXVXXXXXXXXXXXXXXXXXXXXXXXXXXXXXXXXXXXXXXXXXXXXXXXXXXXXXXXXXLFPXXXXNXXXSLXXXXXVXPCXXXXXXLXXPXXSXXXXXXXXXXXXXXXXXXXXXXXXXXXXXXXXXXXXXXXXXXXXXXXXXXXXXXXXXXXXXXXXXXXXXXXXXXXXXXXXXXXXXXXXXXXXXXXXSXXXSXXXXXXXXXXXXXXXXXXXXCHYCDAXFRIRGYLTRHIKKHAXXKAYHCPFXXXXXXXXXRCHXXGGFSRRDTYKTHLKXRHXXYPXGXKXXXRNXSXGXCXXCGXXFXXXXXXXEXHIEXGXCXXLPXGXXXXXXXXXXXXXXXXXXXXXXXXXXXXXXXXXXXXXXXXXXKXXXKXKXIXTSXGXXRFISXXXSXXEPXXLXNXXXXEXXXXXXXXXXXXXXXXXXXXXXXXXXXXXNXXXXXXXXXXXKXXXXXXXXXXXXXXXXXXXXXXXXXXGXXXXXXXXXXXXXXXXXXXPXXXXXXXXXXXXXXXXXXXXXXXXXXXXXXXXXXXXXXEXXXXXXXXXXXXXALXXXXXXXSXXSXXXXXXXXXXXXXXXXXXXXXXXXXXXXXXXXXXXXXXXXXXXXXXXXXXXXXXXXXXXXXXXXXXXXXXXXXXXXXXXXXXPLDXEQXXXXXXXXXXXXXXXXXXXXXXXXXXXXXXIXXXLXXQXXXXXXXXXHXXETQXYXXXY

SEQ ID NO: 90301 - protein, 57 aa, Artificial sequence
  protein pattern
  Variant (6)..(6): Xaa in position 6 is any amino acid
  Variant (8)..(8): Xaa in position 8 is Lys or Arg
  Variant (9)..(9): Xaa in position 9 is Ile or Met
  Variant (22)..(22): Xaa in position 22 is any amino acid
  Variant (23)..(23): Xaa in position 23 is Glu or Arg
  Variant (31)..(31): Xaa in position 31 is Phe, Trp or Tyr
  Variant (32)..(32): Xaa in position 32 is Asp or Asn
  Variant (33)..(33): Xaa in position 33 is Ala, Gly, Asn or Ser
  Variant (34)..(36): Xaa in position 34 to 36 is any amino acid
  Variant (37)..(37): Xaa in position 37 is Pro, Gln or Ser
  Variant (38)..(38): Xaa in position 38 is Asp, Glu or Ser
  Variant (39)..(39): Xaa in position 39 is any amino acid
  Variant (43)..(43): Xaa in position 43 is Asn, Ser or Thr
  Variant (44)..(44): Xaa in position 44 is Ser or Thr
  Variant (52)..(52): Xaa in position 52 is Ser or Thr
  Variant (57)..(57): Xaa in position 57 is Leu or Met
HYCDAXFXXRGYLTRHIKKHAXXKAYHCPFXXXXXXXXXRCHXXGGFSRRDXYKTHX

SEQ ID NO: 90302 - protein, 54 aa, Artificial sequence
  protein pattern
  Variant (2)..(2): Xaa in position 2 is any amino acid
  Variant (5)..(5): Xaa in position 5 is Phe, Leu or Val
  Variant (6)..(6): Xaa in position 6 is any amino acid
  Variant (9)..(9): Xaa in position 9 is Glu or Lys
  Variant (11)..(11): Xaa in position 11 is Ile or Val
  Variant (12)..(13): Xaa in position 12 to 13 is any amino acid
  Variant (14)..(14): Xaa in position 14 is Ala or Gln
  Variant (15)..(15): Xaa in position 15 is any amino acid
  Variant (18)..(18): Xaa in position 18 is Glu or Lys
  Variant (20)..(20): Xaa in position 20 is Pro or Ser
  Variant (22)..(22): Xaa in position 22 is any amino acid
  Variant (24)..(24): Xaa in position 24 is Ala, Ser or Thr
  Variant (25)..(25): Xaa in position 25 is any amino acid
  Variant (28)..(28): Xaa in position 28 is any amino acid
  Variant (29)..(29): Xaa in position 29 is any or no amino acid
  Variant (31)..(37): Xaa in position 31 to 37 is any amino acid
  Variant (38)..(38): Xaa in position 38 is any or no amino acid
  Variant (40)..(40): Xaa in position 40 is Asp or Asn
  Variant (44)..(44): Xaa in position 44 is Ala, Ser or Thr
  Variant (46)..(46): Xaa in position 46 is Asp, Gln or Ser
  Variant (48)..(48): Xaa in position 48 is any amino acid
  Variant (49)..(49): Xaa in position 49 is Ala or Gly
  Variant (52)..(52): Xaa in position 52 is Ala, Glu or Gln
  Variant (54)..(54): Xaa in position 54 is Phe or Tyr
KXRHXXYPXGXXXXXRNXSXGXCXXCGXXFXXXXXXXXEXHIEXGXCXXLPXGX

SEQ ID NO: 90303 - protein, 31 aa, Artificial sequence
  protein pattern
  Variant (2)..(2): Xaa in position 2 is any amino acid
  Variant (3)..(3): Xaa in position 3 is Ser or Thr
  Variant (4)..(4): Xaa in position 4 is any amino acid
  Variant (6)..(8): Xaa in position 6 to 8 is any amino acid
  Variant (9)..(9): Xaa in position 9 is Ile or Leu
  Variant (11)..(13): Xaa in position 11 to 13 is any or no amino acid
  Variant (15)..(15): Xaa in position 15 is any amino acid
  Variant (16)..(16): Xaa in position 16 is Asp, Asn or Thr
  Variant (18)..(18): Xaa in position 18 is any amino acid
  Variant (19)..(19): Xaa in position 19 is Ser or Thr
  Variant (24)..(24): Xaa in position 24 is Asn, Ser or Thr
  Variant (25)..(25): Xaa in position 25 is Ala, Asp, Glu, Gln or Ser
  Variant (26)..(26): Xaa in position 26 is Ala, Glu or Gln
  Variant (27)..(27): Xaa in position 27 is Ser or Thr
  Variant (28)..(28): Xaa in position 28 is Ile or Val
  Variant (29)..(29): Xaa in position 29 is any amino acid
  Variant (31)..(31): Xaa in position 31 is Ala or Pro
KXXXKXXXXKXXXTXXGXXRFISXXXXXXEX

SEQ ID NO: 90304 - protein, 23 aa, Artificial sequence
  protein pattern
  Variant (2)..(5): Xaa in position 2 to 5 is any amino acid
  Variant (6)..(6): Xaa in position 6 is any or no amino acid
  Variant (8)..(13): Xaa in position 8 to 13 is any amino acid
  Variant (14)..(14): Xaa in position 14 is any or no amino acid
  Variant (18)..(18): Xaa in position 18 is Asp or Gln
  Variant (19)..(19): Xaa in position 19 is Phe or Tyr
  Variant (20)..(20): Xaa in position 20 is Leu or Met
  Variant (21)..(21): Xaa in position 21 is Ala or Asn
  Variant (22)..(22): Xaa in position 22 is Phe or Leu
  Variant (23)..(23): Xaa in position 23 is Phe or Tyr
QXXXXXLXXXXXXXETQXXXXXX

SEQ ID NO: 90305 - protein, 47 aa, Artificial sequence
  protein pattern
  Variant (4)..(4): Xaa in position 4 is any amino acid
  Variant (5)..(5): Xaa in position 5 is Gln, Arg or Ser
  Variant (6)..(6): Xaa in position 6 is any amino acid
  Variant (8)..(8): Xaa in position 8 is any amino acid
  Variant (9)..(9): Xaa in position 9 is Asp or Gln
  Variant (10)..(10): Xaa in position 10 is any amino acid
  Variant (11)..(11): Xaa in position 11 is Gln or Ser
  Variant (13)..(13): Xaa in position 13 is Glu, Asn, Ser or Thr
  Variant (14)..(15): Xaa in position 14 to 15 is any amino acid
  Variant (16)..(16): Xaa in position 16 is Ala, Cys or Ser
  Variant (17)..(17): Xaa in position 17 is Ser or Thr
  Variant (19)..(19): Xaa in position 19 is Ile or Val
  Variant (22)..(22): Xaa in position 22 is Ala or Ser
  Variant (23)..(23): Xaa in position 23 is Leu or Met
  Variant (24)..(24): Xaa in position 24 is Asp or Asn
  Variant (25)..(25): Xaa in position 25 is Phe, Ile, Leu or Val
  Variant (26)..(26): Xaa in position 26 is Asp, Glu, Asn or Ser
  Variant (27)..(27): Xaa in position 27 is Asp, Gly, Asn, Ser or Thr
  Variant (29)..(29): Xaa in position 29 is Glu, Gly, Asn or Gln
  Variant (30)..(30): Xaa in position 30 is Ser or Thr
  Variant (32)..(32): Xaa in position 32 is Phe, Ile or Met
  Variant (34)..(34): Xaa in position 34 is Ile, Leu or Val
  Variant (35)..(36): Xaa in position 35 to 36 is any amino acid
  Variant (37)..(37): Xaa in position 37 is Asp, Ser or Thr
  Variant (38)..(38): Xaa in position 38 is Glu, Asn or Pro
  Variant (39)..(39): Xaa in position 39 is Glu or Asn
  Variant (40)..(40): Xaa in position 40 is Gly or Asn
  Variant (41)..(41): Xaa in position 41 is any amino acid
  Variant (42)..(42): Xaa in position 42 is Ile, Met or Val
  Variant (43)..(45): Xaa in position 43 to 45 is any amino acid
  Variant (46)..(46): Xaa in position 46 is Leu, Met or Val
  Variant (47)..(47): Xaa in position 47 is Asn or Thr
LFPXXXNXXXXLXXXXXVXPCXXXXXXLXXPXSXXXXXXXXXXXXXX

SEQ ID NO: 90306 - DNA, 705 bp, Saccharomyces cerevisiae
  CDS (1)..(705)
atgtcgttgccaattatcaaagtccattggttggaccattccagagcgttcagacttttgtggttattagaccatttgaaccttgaatatgaaattgtcccttataaaagagatgctaacttccgtgctccaccagaattaaagaaaattcacccattaggaagatctccattgttagaagttcaagacagagaaactggtaagaagaagatacttgccgagtccggtttcatcttccaatatgtcttgcagcattttgatcattcacacgttttaatgagcgaagatgctgatattgcagaccagattaactattatctgttttatgtagaaggttccttgcaaccacctttaatgattgagttcattctttcaaaggtgaaggattctggtatgcccttccctatttcgtacttggcaagaaaagtggcagacaagatcagtcaggcatactctagtggtgaagttaagaaccagttcgactttgtggagggtgaaatttccaaaaataacggctacctggttgatgggaagttgagcggtgccgatatcttgatgtctttccctttgcagatggcgtttgaaagaaagtttgccgcaccagaggattatcctgccatttccaaatggttaaagaccataacctcagaggagtcgtatgctgcttctaaggaaaaggcgcgtgctttaggtagcaatttctaa

SEQ ID NO: 90307 - protein, 234 aa, Saccharomyces cerevisiae
MSLPIIKVHWLDHSRAFRLLWLLDHLNLEYEIVPYKRDANFRAPPELKKIHPLGRSPLLEVQDRETGKKKILAESGFIFQYVLQHFDHSHVLMSEDADIADQINYYLFYVEGSLQPPLMIEFILSKVKDSGMPFPISYLARKVADKISQAYSSGEVKNQFDFVEGEISKNNGYLVDGKLSGADILMSFPLQMAFERKFAAPEDYPAISKWLKTITSEESYAASKEKARALGSNF

SEQ ID NO: 90308 - DNA, 663 bp, Caulobacter crescentus CB15
  CDS (1)..(663): transl_table=11
atgatcattgttcaccatcttaacaattcgcgtagtcagcgggtgctttggctcctcgaagagctgggcctgccctacgagatcaagcgctatcagcgcgacgccaagaccatgctggcgccgccggagctccgggcgatccacccgctgggcaagtcgccggtgatcaccgatggcgacacggtgctggccgagaccggcgccatcgtcgagtacatcatcgccatgtacggcgggggccgactgacgccgacggccggcacgcccgagcgcctgcgctacacctactggctgcactatgccgagggctcggccatgccgccgctcttgatgaagctggtgttcacggccctgcccgcccgcgcgcccggcctgatgcgcggcgtggtcaagtcgatcgccgctcgggccctgaagggcttcgtcgatccgcagctgaaggcccatatggactactgggaggccgagcttgccaagtcgacctggttcgcaggcgcggagctgaccggcgccgacatcatgatgagcttcccgctcgaaaccgccgcccagcgcgccggggccgccgagcggccaaggatcaaggcgttcctcgagcgtatccacgcccgccccgcctatcagcgcgccctccagcgcgggggaccgtacgactacgcctga

SEQ ID NO: 90309 - protein, 220 aa, Caulobacter crescentus CB15
MIIVHHLNNSRSQRVLWLLEELGLPYEIKRYQRDAKTMLAPPELRAIHPLGKSPVITDGDTVLAETGAIVEYIIAMYGGGRLTPTAGTPERLRYTYWLHYAEGSAMPPLLMKLVFTALPARAPGLMRGVVKSIAARALKGFVDPQLKAHMDYWEAELAKSTWFAGAELTGADIMMSFPLETAAQRAGAAERPRIKAFLERIHARPAYQRALQRGGPYDYA

SEQ ID NO: 90310 - DNA, 627 bp, Caulobacter crescentus CB15
  CDS (1)..(627): transl_table=11
atgatcaaggttcaccacctcaacgagtcgcgctcgcagcggatcctctggctgctggaggagctttccctcccctacgagatcgtccagcacacgcgcgacgccaagacgcgcctggcgccgccgtcgctgaccgacgtccacccgctgggcaagtcgccggtgatccaggacggcgcgctggtggtcatcgagtccggcgcgatcatcgactacatcatccgtcgccacggcggcggacgcctggccccggatgcggccagcgccgactatgaccgctaccagcagtggctgcactatgccgagggctcggccatgctgccgttgatgctcaacatgtatgtcggacgcctgggcgaggccggcgcgccgctgcatccgcgcatccagtccgagatcgccaaccacctggcgttcgtgaacgacagcctagccggccgtgactacttcgtcggcgacagtctgaccggcgccgacatccagatgagcttcgtgcccgaggtcgccaaggccatgggcaagctggccgactatccgcacatggccgcctggatcggccgcatgcacgcccgcccggcgtggaagaccgcgctcgacaagggcgggccttacgcgctgggggcttaa

SEQ ID NO: 90311 - protein, 208 aa, Caulobacter crescentus CB15
MIKVHHLNESRSQRILWLLEELSLPYEIVQHTRDAKTRLAPPSLTDVHPLGKSPVIQDGALVVIESGAIIDYIIRRHGGGRLAPDAASADYDRYQQWLHYAEGSAMLPLMLNMYVGRLGEAGAPLHPRIQSEIANHLAFVNDSLAGRDYFVGDSLTGADIQMSFVPEVAKAMGKLADYPHMAAWIGRMHARPAWKTALDKGGPYALGA

SEQ ID NO: 90312 - DNA, 699 bp, Xanthomonas axonopodis pv. citri str. 306
  CDS (1)..(699): transl_table=11
atgatcactgttcaccatctcaataattcccgttcccagcgcgtgctgtggctgctggaagaactggcgctgccttatcagattgtgcgccatgagcgcgaccccaagaccatgctggcgccgccggcactgcgcgcgatccatccgctgggcaagtcgccggtgctcgtcgatggcgatctggtggtggccgagtcgggggcgatcctggaatacctgaccgagcgctacgacaccgagtgcgcactgtcgccgtcgccgcggccgctggattcgcccgagcgcctgcagttccgctattggatgcattacgccgaaggctcggcgatgccaccgttgctgatgacgctgatcttcggtcgcatccgcagcgcgccgatgccgttcttcgccaagcccatcgcgcgtgcgatcgtggacaaggcgatgtcgggcttcgtcgggccgcagctcaccttgcatctgaactggatggagcagtcgttgcaggccggcaactggttcgctggcgaacgctttaccgccgccgacatccagatgagcttcccggtacaggccgctgctgcacgcggcggcggtctggagaaatacccgcgtctgcacgcgtttctggaacggatccaggcgcgtccggcgtatcaggctgcgctgaagaagggcggcccgttcgaactgatgggaagcaagccggccaaatga

SEQ ID NO: 90313 - protein, 232 aa, Xanthomonas axonopodis pv. citri str. 306
MITVHHLNNSRSQRVLWLLEELALPYQIVRHERDPKTMLAPPALRAIHPLGKSPVLVDGDLVVAESGAILEYLTERYDTECALSPSPRPLDSPERLQFRYWMHYAEGSAMPPLLMTLIFGRIRSAPMPFFAKPIARAIVDKAMSGFVGPQLTLHLNWMEQSLQAGNWFAGERFTAADIQMSFPVQAAAARGGGLEKYPRLHAFLERIQARPAYQAALKKGGPFELMGSKPAK

SEQ ID NO: 90314 - DNA, 618 bp, Vibrio vulnificus CMCP6
  CDS (1)..(618): transl_table=11
atgatcactctacatcatctcaacaaatcccgttcaaagcgtatcatttggttgctggaagagctgggcgttgactatcaagttgtcgcctaccagcgagacagcgtgacgtttttagcaccaccagagctgaaagcgatccacccactaggcaaatcaccggtcatcgaagccgatggtaaagtgattgctgagtcaggcgcgatcaccgaatacctcattgccaaacacgccccactgcgattggctccagcaccagagagcgctgagtacgtggaatatctgcaatggctgcattttgcggaaagctccggcattttgcctttgctgcttaaagtctttttaaccaaagatggcgcgcaaacgcagtttcttgctcagtacgcagatgcggagatcaacaaagtggtgggttatctcgaccaaagcttgcagggcaaaaactaccttgttggtgagacgctctccggtgccgacatcatgaactcgttcattgtcgagattgtgcagcaatttggtttgcttgagcagtatccgaaccttgcccgttactcggatacactcgccagccacccaagctttgttaaagcgcaagcgctggaacaacaatacaattaa

SEQ ID NO: 90315 - protein, 205 aa, Vibrio vulnificus CMCP6
MITLHHLNKSRSKRIIWLLEELGVDYQVVAYQRDSVTFLAPPELKAIHPLGKSPVIEADGKVIAESGAITEYLIAKHAPLRLAPAPESAEYVEYLQWLHFAESSGILPLLLKVFLTKDGAQTQFLAQYADAEINKVVGYLDQSLQGKNYLVGETLSGADIMNSFIVEIVQQFGLLEQYPNLARYSDTLASHPSFVKAQALEQQYN

SEQ ID NO: 90316 - DNA, 666 bp, Bradyrhizobium japonicum USDA 110
  CDS (1)..(666): transl_table=11
atgctgaccgtccatcacctcaacaattcccgctcgcagcgcgtgctgtggctgctcgaggagttgggcgtgccctacgagatcgcgcgttatcagcgccagcccgacatgcgcgcgccgaaggagctgcgcgcgatccatccgctcggcaagtcgcccgtcatcaccgacaacggcaacaccatcgccgagtcaggcgcgatcatcgaatatctcatcgccacctacggcaacggccgactgatcccgccgccgaacacgccggagcgactgcgcttcacctactggctgcactatgcggaaggctcggcgatgcagccgctgctgctcaagctgctgttcacgctgatgccgaagcgtgcgccggcgctgcttcgtccgctggtgcgcaaggtctcgaaccaggcgctcaccgcgctggtcaatccgcagctcaagcagcacatggattactgggaaggcgagcttgcgaagagcgagtggttcgccggcaacgagttcaccgcagccgacatccagatgagctttccgctcgaagccgcgcaagcgcgcggcgggctggagcagggccatcccagggcgatggcgttcctggagcgcatccatgcgcggccggcctacgccagagcgctcgaaaagggtgggccgtaccaggtggggcggtag

SEQ ID NO: 90317 - protein, 221 aa, Bradyrhizobium japonicum USDA 110
MLTVHHLNNSRSQRVLWLLEELGVPYEIARYQRQPDMRAPKELRAIHPLGKSPVITDNGNTIAESGAIIEYLIATYGNGRLIPPPNTPERLRFTYWLHYAEGSAMQPLLLKLLFTLMPKRAPALLRPLVRKVSNQALTALVNPQLKQHMDYWEGELAKSEWFAGNEFTAADIQMSFPLEAAQARGGLEQGHPRAMAFLERIHARPAYARALEKGGPYQVGR

SEQ ID NO: 90318 - DNA, 642 bp, Bradyrhizobium japonicum USDA 110
  CDS (1)..(642): transl_table=11
atgctcaccgtccatcatctcggcaagtcgcagtccgagcgcatcgtctggctgtgcgaggagctcgaaatcccctatgagctcaagcgctacgctcgcgattccgtcaccatgctggcgcctcccgactacaaggcgctgcacccgatcggagcggcgcccgtcatcaccgacggcgatctcgtgctcgccgaatccggcgcgatcgtcgattacatcatggccagatacggcaatgggcgcctcgtgctccgcccggacgaccctgatttcgcgcagtttttatactggtttcacttcgccaacggcacgctgcaagccggcatgggccgcttgatgatcctgaaccggctcaggcccgccggggacaatccgatgctggtcgcgaccagagggcgcgtcgaccgcgccttcgatctggtcgatgcgcgggttcgtgacgccgaatatctcgccggcaacaccttcaccaccgccgacatcatgatgggcttttcgctgaccacgatgcgctacttccagccctatgatctccagcgttgtccgaacgtggtgaaatatctcggccgcatcggtgcgcggccggcctaccggcgcgcgatggagaagggcgatcccggcatggcgctgctgctgagctga

SEQ ID NO: 90319 - protein, 213 aa, Bradyrhizobium japonicum USDA 110
MLTVHHLGKSQSERIVWLCEELEIPYELKRYARDSVTMLAPPDYKALHPIGAAPVITDGDLVLAESGAIVDYIMARYGNGRLVLRPDDPDFAQFLYWFHFANGTLQAGMGRLMILNRLRPAGDNPMLVATRGRVDRAFDLVDARVRDAEYLAGNTFTTADIMMGFSLTTMRYFQPYDLQRCPNVVKYLGRIGARPAYRRAMEKGDPGMALLLS

SEQ ID NO: 90320 - DNA, 618 bp, Vibrio parahaemolyticus RIMD 2210633
  CDS (1)..(618): transl_table=11
atgataaaacttcatcatctgaatcagtcacgctctaagcgtattatctggttacttgaagagctcaacgtggattacgaaatcgtgccttacgttcgtgacaaagtgactttcatggcaccgccagaactaaagagcgttcatccacttggtaagtcgccactccttgaagatgatggtgagtttattattgaatcaggagccatgactgaatacttgattgaaaagtacagcgatggagcgcttgcccctaaacgtggtacaaaagcgcatacggaatatttacaatggatgcactttgcagaaagctccgctattttgccgatgctattgaaaatattcatcattaaagagccgaactcgatgcagtttttgcctgcatacgccgacaaagaagcaatgaatgtattgagctacttcgaacaagcgttggaaggaaaaacctacctcgtagaagagcgattgacgggtgcagacatcatgatgtctttcatcgttgagttagtacagatgtttggcctagcagaacaattcccgaatatggttcgttacggtaaacaacttgcgacgcaccctgctttcgagaaagccgaacaaattgaagtgaactacgcttaa

SEQ ID NO: 90321 - protein, 205 aa, Vibrio parahaemolyticus RIMD 2210633
MIKLHHLNQSRSKRIIWLLEELNVDYEIVPYVRDKVTFMAPPELKSVHPLGKSPLLEDDGEFIIESGAMTEYLIEKYSDGALAPKRGTKAHTEYLQWMHFAESSAILPMLLKIFIIKEPNSMQFLPAYADKEAMNVLSYFEQALEGKTYLVEERLTGADIMMSFIVELVQMFGLAEQFPNMVRYGKQLATHPAFEKAEQIEVNYA

SEQ ID NO: 90322 - DNA, 669 bp, Salmonella enterica subsp. enterica serovar Typhi Ty2
  CDS (1)..(669): transl_table=11
atgctgacggtgcaccatttaaatcagtctcgttcgcagcgcatcctctgggcgctggaagagctggcgttgccttaccagattgtgcgttaccagcgtgaaaagaccatgctggcgccgccggcattgaaaaaagtgcatccgctgggcaagtctccggttatcgaagatcacggtatggttattgcggaatcgggcgccatcctggaatatttgcaggacacttacgacaatatcggacgctttaagcctgcggatgcgcagagaaaacaacactatcgattctggctacattacgctgaaggttcgctcatgcccttgctattgatgagactgctctttacctctctgggtaaaccgccggtaccattgggcctgcgaacgttgggcggcgtgatcggtaagggcgcgcaaaaagcgtacctcaatccgcaactggaaacccatgcgcgctttattgacgggcatctggcaaatcacccctggtttgccggagagcagttaagtatggcggatatccagatgagcttcccgctatttgcgctgcttgcccgaggcggaatcgctcatctcgaccatatcaacgcatggaaagcgcgggtagaaatgcgtccagcctggcagcgagcgattcagcagggcggtccgtttaccattcccggcggataa

SEQ ID NO: 90323 - protein, 222 aa, Salmonella enterica subsp. enterica serovar Typhi Ty2
MLTVHHLNQSRSQRILWALEELALPYQIVRYQREKTMLAPPALKKVHPLGKSPVIEDHGMVIAESGAILEYLQDTYDNIGRFKPADAQRKQHYRFWLHYAEGSLMPLLLMRLLFTSLGKPPVPLGLRTLGGVIGKGAQKAYLNPQLETHARFIDGHLANHPWFAGEQLSMADIQMSFPLFALLARGGIAHLDHINAWKARVEMRPAWQRAIQQGGPFTIPGG

SEQ ID NO: 90324 - DNA, 618 bp, Vibrio vulnificus YJ016
  CDS (1)..(618): transl_table=11
atgatcactctacatcatctcaacaaatcccgttcaaagcgtatcatttggttgttggaagagttgggcgttgactatcaagttatcgcctaccagcgagacagcgtgacgtttttagcaccaccagagctgaaagtgatccacccactaggcaaatcaccggtcatcgaagccgatggcaaagtgattgctgagtcaggcgcgatcaccgaatatctcattgccaaacacgccccactgcgattggctccagcaccagagagcgctgagtacgtggaatatctgcaatggctgcattttgcggaaagctccggcattttgcctttgctgcttaaagtgtttttaaccaaagatggcgcgcaaacgcagtttcttgctcagtacgcagatgcggagatcaacaaagtggtgggttatctcgaccaaagcttgcagggcaaaaactaccttgttggtgagacgctctccggtgccgacatcatgaactcgttcattgtcgagattgtgcagcaatttggtttgcttgagcagtatccgaaccttgcccgttacgcggatacactcgccagtcacccaagctttgttaaagcgcaagcgctggaacaacaatacaattaa

SEQ ID NO: 90325 - protein, 205 aa, Vibrio vulnificus YJ016
MITLHHLNKSRSKRIIWLLEELGVDYQVIAYQRDSVTFLAPPELKVIHPLGKSPVIEADGKVIAESGAITEYLIAKHAPLRLAPAPESAEYVEYLQWLHFAESSGILPLLLKVFLTKDGAQTQFLAQYADAEINKVVGYLDQSLQGKNYLVGETLSGADIMNSFIVEIVQQFGLLEQYPNLARYADTLASHPSFVKAQALEQQYN

SEQ ID NO: 90326 - DNA, 762 bp, Rhodopseudomonas palustris CGA009
  CDS (1)..(762): transl_table=11
atgtcccgcgccgcggaaactctgctaaggcggtgcgcgttctcacggctggtgccgcttcaatcactgacagacatccgggatcatcgcgacatgctgaccgtccatcatctcaacaactcccgctcgcaacgcgtgctgtggctcctggaggagctcgacaccccttacgagatcaagcgctatcaacgtcagccggacatgatggcgccgaaggagctgcgcgccgttcatccgctcggcaagtccccggtgatcaccgacaacggcaacaccatcgccgagtccggcgcgatcatcgaatacatcgtcggcacctatgggaacggccggctgatcccgccgccgaacacgccggagcggctgcgctacacctactggctgcactacgccgagggttcggcgatgccaccgctgctactgaaattgctgttttcgatgatgccgcaacgcgccccggcgctggtgcggccgctggtgaagatggtggcgtccggcgcgctgaccggcttcgtcgatccgcagctcaagctgcacatggattattgggagagcgaactcggcaaggccgcgtatttcgctggcgacgagttcaccgccgctgatatccagatgagcttcccactggaggccgccgccgcacgcggcggcctcgatcagcgctacccgaaggcgcaggcgtggctcgaacgcatccacgcccgccctgcctacaaccgcgcgctggaaaaaggcggaccgtacgaaatcggcaaggcgtag

SEQ ID NO: 90327 - protein, 253 aa, Rhodopseudomonas palustris CGA009
MSRAAETLLRRCAFSRLVPLQSLTDIRDHRDMLTVHHLNNSRSQRVLWLLEELDTPYEIKRYQRQPDMMAPKELRAVHPLGKSPVITDNGNTIAESGAIIEYIVGTYGNGRLIPPPNTPERLRYTYWLHYAEGSAMPPLLLKLLFSMMPQRAPALVRPLVKMVASGALTGFVDPQLKLHMDYWESELGKAAYFAGDEFTAADIQMSFPLEAAAARGGLDQRYPKAQAWLERIHARPAYNRALEKGGPYEIGKA

SEQ ID NO: 90328 - DNA, 666 bp, Rhodopseudomonas palustris CGA009
  CDS (1)..(666): transl_table=11
atgctgaccgtctaccatctcggactatcgcaatccgagcgcatcgtctggctgtgcgaagaactggacattccctatcgccttgaagtctatcaacgcgatccgcaaacccggatggcgccccccgaatacaaggcgctgcatccgatgcagatctcgccggtcatcgccgacggcgatctcgtgctggcggaatccggcgcgatcatcgaatacatcctggccaaatacggacacgggcggctgaaggttgccccggacgatccggcatttgccgactatctgttctggttccatttcgccaacggcacattgatgcccagcgagtcgatcgagatgctgggagccggtatcagcggcgccgatcagctcagagtcggaatcggttcggaccatccgtttgtcgcggtctacaccgcgcggaccgaccgcggctttgcgatgatcgaacagcggctcggcaaggtgccctatttggctggcgcggacttctctgcggctgacatcatcatgttgtttgccttgacgacgatgcgtgcgttcaccggacgccgtcttgacgattatcccaatatccgcggctatcttgcacgcatcggtggacgtccggcgtatcaacgtgcgatgacaaagggagatcccgagctctcgccgatgctgagttga

SEQ ID NO: 90329 - protein, 221 aa, Rhodopseudomonas palustris CGA009
MLTVYHLGLSQSERIVWLCEELDIPYRLEVYQRDPQTRMAPPEYKALHPMQISPVIADGDLVLAESGAIIEYILAKYGHGRLKVAPDDPAFADYLFWFHFANGTLMPSESIEMLGAGISGADQLRVGIGSDHPFVAVYTARTDRGFAMIEQRLGKVPYLAGADFSAADIIMLFALTTMRAFTGRRLDDYPNIRGYLARIGGRPAYQRAMTKGDPELSPMLS

SEQ ID NO: 90330 - DNA, 879 bp, Magnaporthe grisea 70-15
  CDS (1)..(879)
atgtcaaagtctcaaaaccttctcaggacagaacccgtacctgaccagacagtaccaaccatggaaccgtctcaaaacggcccaattatcaagctccattggcaagtcgagaaccgaaacgagctcaatgggtcgcgcgcacaaagcatcctctggctgctcgaggagctcgaggtcccgtatgagctggagatttaccatcggggcccggacatgctggcaccccccgagctgaccaaaattcatcctctgggcaagtctccggtcatcaccattgagacgcctggctccggcaaagcccctatcgtgcttgccgagacgggattcatcacgcagtacatgactgagcattttggcaacgacaagacgctcgtccctaagcgctggaaggagggctcagagggcctaattggtggtgagaccgaggagtatatgaggtgtcagcatttgcttcactacgtcgagggtagctttatgccctacatgttgatgaatctcgttctgaatggcatcagaggcccacgcgtgcccttcctggtgcgacccatcacaaacgcagttgctaacaaggttaccgacttcttgatcctgccgaacatgaagaaacactttgcctttctggaaaagcaactcgagacttcaggcggcgattatctctgcggtccaaacctcaccgccggcgacgtagccctgtcctttgtcatcctggtgaacaagccggcgtatcccaagcttggcaactggaagcccgagcaggagtacccccgggtctgggcgtacatgtcgcgcttggagacatcaccaggttggctgaggagtatcgagaagatcaagagcatcgagggctcatttgcgctctatcgcggcgcaaaagagtaa

SEQ ID NO: 90331 - protein, 292 aa, Magnaporthe grisea 70-15
MSKSQNLLRTEPVPDQTVPTMEPSQNGPIIKLHWQVENRNELNGSRAQSILWLLEELEVPYELEIYHRGPDMLAPPELTKIHPLGKSPVITIETPGSGKAPIVLAETGFITQYMTEHFGNDKTLVPKRWKEGSEGLIGGETEEYMRCQHLLHYVEGSFMPYMLMNLVLNGIRGPRVPFLVRPITNAVANKVTDFLILPNMKKHFAFLEKQLETSGGDYLCGPNLTAGDVALSFVILVNKPAYPKLGNWKPEQEYPRVWAYMSRLETSPGWLRSIEKIKSIEGSFALYRGAKE

SEQ ID NO: 90332 - DNA, 705 bp, Kluyveromyces lactis NRRL Y-1140
  CDS (1)..(705)
atgagcacaaacgttattaaagtccattggctaaaccaatcgagggccttcagggttctatggttgttagatcatttgaaactcgactatgaaatcgttccctacaaaagaaatgaacaatttagagcaccagaggaattaaagaagatccatccattgggtagagcaccaattttggagatagattataagagttctgacagaaaggatatccttgcggaatcgggttatattttccagtatattttagaaaatttcgacaaggaaggaattcttaacaatgcagatcaacagaaggccgaaaagatcaaatattatctacactacgctgaaggttcgcttcaaccacctttattcattgaattcctcctttcaaaggctaaagaggctcctgtgccattccccttctcttacattaccaagaaattcgccgacaaaatcagtgaaaagtattctcggggagaggtgaaaaaccagctagatttcattgagaccgaaattgagcaaaatgacggatacttggtcggaggtaaactcagtgctgctgacattttattatcgttccccttggaaatggctttcgagaggcaattcgccagaaccgaagagtatccaaatatagcaaagtggttggagactatcaaaagggaagagtcttactcaacttcaaaagacaaagccaaagcgaatggcgcctcattctaa

SEQ ID NO: 90333 - protein, 234 aa, Kluyveromyces lactis NRRL Y-1140
MSTNVIKVHWLNQSRAFRVLWLLDHLKLDYEIVPYKRNEQFRAPEELKKIHPLGRAPILEIDYKSSDRKDILAESGYIFQYILENFDKEGILNNADQQKAEKIKYYLHYAEGSLQPPLFIEFLLSKAKEAPVPFPFSYITKKFADKISEKYSRGEVKNQLDFIETEIEQNDGYLVGGKLSAADILLSFPLEMAFERQFARTEEYPNIAKWLETIKREESYSTSKDKAKANGASF

SEQ ID NO: 90334 - DNA, 747 bp, Debaryomyces hansenii CBS767
  CDS (1)..(747)
atgtctcaagaagataaaattattttgcattggcttgaaaagtcaagatctcacagaatattatggttattggaagaattgaatctcgaatatgaattaaaggtatacagaagaaccaaggattaccgtgcaccaccagaattaaacaaggtgcacccattggggaagtcacctgtcatcgagatcattaagccaggtagatccacgccagtcatcttggccgaaaccggatatatgattgactatttaatcagaaattacgatacagaacaaaagttggttcctagtgatgaagatgaaagagaattggtcaattactacttgcaatttgccgagggtagtcttcaaccattcttggtgtcgttgttggtcaacaacatggccaaaaaaatggcaccatttggggctggctttttggttaacaaggtggtgctgcagatcaataatttatattacggcccagaattaatgaaggccctcgactttttggaaaataacttgaaaaagggcaacggtgagtactttgtaggcaacaaattgaccggtgctgatattattttgagtttcccaatatatgacaatgtattcggcgacctcgaaagaacaaaggctatgactggcggtaagtttgatgtcgttaccaagtatcctactatgaaggcctgggctgatatgatcaagaaggaacctaacttgatcaaggctaacgaaattatcgactccaagactggcacatcgaaattgtaa

SEQ ID NO: 90335 - protein, 248 aa, Debaryomyces hansenii CBS767
MSQEDKIILHWLEKSRSHRILWLLEELNLEYELKVYRRTKDYRAPPELNKVHPLGKSPVIEIIKPGRSTPVILAETGYMIDYLIRNYDTEQKLVPSDEDERELVNYYLQFAEGSLQPFLVSLLVNNMAKKMAPFGAGFLVNKVVLQINNLYYGPELMKALDFLENNLKKGNGEYFVGNKLTGADIILSFPIYDNVFGDLERTKAMTGGKFDVVTKYPTMKAWADMIKKEPNLIKANEIIDSKTGTSKL

SEQ ID NO: 90336 - DNA, 768 bp, Aspergillus nidulans FGSC A4
  CDS (1)..(768)
atggctactacatcagacgtgaaggtcacgctctactggctcgaaaagtcgcgctcccagcgcatcctctggctcctcgaggagctcaacgttccctatgaggttaaaacgttcaagcgtggcaaggatatgctcgcacccaaagagctgcgggagattcacccgctggggaaatcacctgttatttccgttcaaagctctgcgacacccaagcccatcgtgatcgcggagtcgggtatgattgtcgagtatctctgcgaccactttggcggggacaaactcattccgacgcggtatgccgagggcaaggaaggacagatcggtggggagaccgaggagtggctgcggtatcgctattacatgcatttctcggagggcagcttgatgccttttctggtgttcaagttggtcactgatactatgaaatctccccctggtctcccattcttcctgagacccatccctcgtatagtggccggacaggttgaacaacaattcgtcaacccaaaccttgagcgcacacttgactttcttgaagaccagcttaagtccgcgcctggtggtgggccgtttttctgcggtagcaaggttacggctgccgatatcatgatgagcttccccttggttgcggccaacatgagaatgccgttgaaagagaagtacccgcgcatggcggcctttgtcgaagccattgaaaaagaagacggatacaaacgtgccattgagaagatcaaagaggtagatgggaagttcgaggcttccctttaa

SEQ ID NO: 90337 - protein, 255 aa, Aspergillus nidulans FGSC A4
MATTSDVKVTLYWLEKSRSQRILWLLEELNVPYEVKTFKRGKDMLAPKELREIHPLGKSPVISVQSSATPKPIVIAESGMIVEYLCDHFGGDKLIPTRYAEGKEGQIGGETEEWLRYRYYMHFSEGSLMPFLVFKLVTDTMKSPPGLPFFLRPIPRIVAGQVEQQFVNPNLERTLDFLEDQLKSAPGGGPFFCGSKVTAADIMMSFPLVAANMRMPLKEKYPRMAAFVEAIEKEDGYKRAIEKIKEVDGKFEASL

SEQ ID NO: 90338 - DNA, 804 bp, Candida albicans SC5314
  CDS (1)..(804): transl_table=12
atgactatggatacaccaaaccaccaacttgaagatagattcattttacactggctcgatgattcacgttctcatagaatactttggatattagatcttcttaatcttgattatgaagtgaaaatatatttaagacatccagaaacttggcgtggtccattacaattatttgatgctcatcaattaggtaaagcaccagtattggaagttatttttggagatggaagaccaccaattaaaatatctgagctgggatttataattcaatatttattaagatactatgattgccaaaatattttataccctgccaatcttgatcaacaattggaagttgattattatttacattattctgaagggtcattacaacatatacaaatggcattattaattaattcttcagctaaacatattgccccgtttgccacgaaatcagtagtgaaattagtgactaaagcaataaataatggttattataaacatgaatggtttttgaatatgaaatatttagaagatcgattagaacaaaatggaactgggtttttcgttggtgacaaattaagtggagctgatgttattttaagtttcccaatctatgaaaatgttttcgataatcttgaaggaactaaagaaatattgggtgataaagtcaatattaaaaaaatgttccccaatttatttaattggagtcgaatgattaaaaataatttaagttataaaaaaattactgaattaatgaatgaagaagttgaagatttgattgcattgaatcctcgatttgattatggcagagaaaaataa

SEQ ID NO: 90339 - protein, 267 aa, Candida albicans SC5314
MTMDTPNHQLEDRFILHWLDDSRSHRILWILDLLNLDYEVKIYLRHPETWRGPLQLFDAHQLGKAPVLEVIFGDGRPPIKISESGFIIQYLLRYYDCQNILYPANLDQQLEVDYYLHYSEGSLQHIQMALLINSSAKHIAPFATKSVVKLVTKAINNGYYKHEWFLNMKYLEDRLEQNGTGFFVGDKLSGADVILSFPIYENVFDNLEGTKEILGDKVNIKKMFPNLFNWSRMIKNNLSYKKITELMNEEVEDLIALNPRFDYGREK

SEQ ID NO: 90340 - DNA, 699 bp, Ustilago maydis 521
  CDS (1)..(699)
atgggtatcattctacactaccttcaagactctcgaagtcagcgagtgctctggctgctcgaggagatgggcatcgactacgagatcaaacactactctcgaactgcccaaggacttgcgcctcctgaacttctcgaggtacatccaaccggaaagtcgccgctcatcaccgataccacggatggcaagaacaaagttgtcgccgagtccggcgccattgtcgactacctcatccgtcactatgcacagggaagattcgttcctgcggaccccgagcgcgtcgatgacgatgtgttctggagccatttcgccgaaggatcacttatgccgttgttggtaatgaaacttgtgttcagcatgatcccgtccaagatgcccttctttgtacgccccatcggaaacgctattgtcaacaacgtcaacaccgcgttcttgaacccggacctgaagcgcaagactgactttatcgcagacgagctcgtcaagaaatgcgacgcaggcaacgcctggtttgcaggcggcgatagccatggcaatcccaccgcggctgatttccagatggcattcccactcgaggctgccttatctggccgcatctcgaaccttccagcgccgatcaagacttatgtcgaaaaggtccatgctcgtccagcgttcaagcgaggtctcgagaagggtggcccttacaaatacgcttga

SEQ ID NO: 90341 - protein, 232 aa, Ustilago maydis 521
MGIILHYLQDSRSQRVLWLLEEMGIDYEIKHYSRTAQGLAPPELLEVHPTGKSPLITDTTDGKNKVVAESGAIVDYLIRHYAQGRFVPADPERVDDDVFWSHFAEGSLMPLLVMKLVFSMIPSKMPFFVRPIGNAIVNNVNTAFLNPDLKRKTDFIADELVKKCDAGNAWFAGGDSHGNPTAADFQMAFPLEAALSGRISNLPAPIKTYVEKVHARPAFKRGLEKGGPYKYA

SEQ ID NO: 90342 - DNA, 684 bp, Acinetobacter sp. ADP1
  CDS (1)..(684): transl_table=11
ctgagattgaatataagaccttcaggatctaaacaaaatcttatgctgaccttacatcatctagaacagtctcgctcgtttcgtatactttgggcgctcgaagaactacaacaaaattatgaaattaagtattacaaacgctcacctaaatttgcagctccacctgaattgaaacaggtgcatcctttaggtaaagccccaattttgcaggataatcaacgtgtcattgccgagtctgcggtcattttggaatatctacaaagccaatatgatctagaccatcagtttaaaccgcaaaatgatgaagatgcatttcaatatttatactggatgcactatgccgaaggttcactcatgccattgttggtgtttcagttggtcatgaataatgtgggtaaaaatgttccatttctgattcgacctgttgccaataaaattaccgatggcatcaaggccagctttattcgtccacgtttaaaagaccatattgcctttctggaagattacctgtccaagcatgattattttgcagggcagtttagttttgctgacattcagatgagttttccgctagaggcaatcttgacccgaacgacaggacaatatccgcacatacaggcatttttgaagcgaatacaggtacgtcccgcctatcagcaggccaaacaaaaaggcattgaataa

SEQ ID NO: 90343 - protein, 227 aa, Acinetobacter sp. ADP1
MRLNIRPSGSKQNLMLTLHHLEQSRSFRILWALEELQQNYEIKYYKRSPKFAAPPELKQVHPLGKAPILQDNQRVIAESAVILEYLQSQYDLDHQFKPQNDEDAFQYLYWMHYAEGSLMPLLVFQLVMNNVGKNVPFLIRPVANKITDGIKASFIRPRLKDHIAFLEDYLSKHDYFAGQFSFADIQMSFPLEAILTRTTGQYPHIQAFLKRIQVRPAYQQAKQKGIE

SEQ ID NO: 90344 - DNA, 630 bp, Erwinia carotovora subsp. atroseptica SCRI1043
  CDS (1)..(630): transl_table=11
atgggattaaaattacaccatcttaatgattcacggtctgttcgtatcctctggttgcttgaagaagccgggataccttatgagcttgtcagatatcagcgagatgaaaaaacgcatctggcacccgcatcactgaaagcgatacatcctttaggtaaatcaccgttgattgaagaggatggaaaagtcatcgcagaatctggtgcgatcgttgaatacctgatcaatcgccatgcgagacacttagcgccagatgcaaacgcagccgaatatattgattatcttcaatggatacactttgcagaaagctccgcgatgctgccggttttattgaagatttttggcgaatttgaaaagaataccggaaccacactgaatttccttgagggttacgctgacaacgaattcgataaagtcttttcatttttagacgacacgctggcttcgagagaatttattgtgggtgataccttaaccggcgcggatattatgctgggtttcgttattaataccgtcgtggaacgactcgttcctgctgaacgtttccccaatattcaacgctattcacagcggctgaaaaatctgactagctggcgaaaagtccaggatattgaagcaagcgcagaataa

SEQ ID NO: 90345 - protein, 209 aa, Erwinia carotovora subsp. atroseptica SCRI1043
MGLKLHHLNDSRSVRILWLLEEAGIPYELVRYQRDEKTHLAPASLKAIHPLGKSPLIEEDGKVIAESGAIVEYLINRHARHLAPDANAAEYIDYLQWIHFAESSAMLPVLLKIFGEFEKNTGTTLNFLEGYADNEFDKVFSFLDDTLASREFIVGDTLTGADIMLGFVINTVVERLVPAERFPNIQRYSQRLKNLTSWRKVQDIEASAE

SEQ ID NO: 90346 - DNA, 645 bp, Erwinia carotovora subsp. atroseptica SCRI1043
  CDS (1)..(645): transl_table=11
atgatacacgttcatcacctcgaaaaatcccgttcgacccgagcgacctggctgttggaagaactgggcgttgactatgaaattattcgctacgcacgtgaccccaaaacctttagcgccccaacatcgctcaagcagattcacccgctagggaaatcgccagtgattaccgatggcgaattgaccattgccgaatctggggccattgtggaatacctgattgagacttacggtaatggcagatttcgtccacagagcggacaagcgttgctggattatcgcttctggctgcattttgccgaaggttcgctcatgccgcttctggtgatgcgtctggtattggcgaaaacagaatccgcaccgatgccgtttttcatccgcccgatagcacgcaaaattgtgcaaagtatcgaacaggcctttattgtgccgcgattgaccactcagcttcagttcatcgaacagcatctgagtaaacaaaactggtttgcaggagagtcgttcagcggtgccgatatacaaatggcagtaccgctggttttggcgaaaacgcgtctggatttcagcctctatccacacattcaacaatacattgagcggatagaaaaccagccagcttttcaacgggctcttgctcaggattaa

SEQ ID NO: 90347 - protein, 214 aa, Erwinia carotovora subsp. atroseptica SCRI1043
MIHVHHLEKSRSTRATWLLEELGVDYEIIRYARDPKTFSAPTSLKQIHPLGKSPVITDGELTIAESGAIVEYLIETYGNGRFRPQSGQALLDYRFWLHFAEGSLMPLLVMRLVLAKTESAPMPFFIRPIARKIVQSIEQAFIVPRLTTQLQFIEQHLSKQNWFAGESFSGADIQMAVPLVLAKTRLDFSLYPHIQQYIERIENQPAFQRALAQD

SEQ ID NO: 90348 - DNA, 726 bp, Mannheimia succiniciproducens MBEL55E
  CDS (1)..(726): transl_table=11
ttgaccgcacttttttattcattcataatgcagcctaaatttttaattaacgggaattttatgattattctttatgccttaactcaatcccgcgcttatcgtatcgcttggttgttggagattcttaacctgccttataaactggagattatcgaacgggacggcgaaaccaatcttgcgccggatgcgttgcgttcgattcatcctttgggaaaatcgccgattattaaggacggcgatttggtactgacggaaagcggtgcgatcgttgagtatttaatcaaccgttatggcggcggcaaattaaaaccggaaatgaacagcaccgattattggcagtatttacattggatgcattatgccgaagggtcgttaatgccactgttagtgattaaactgatctttcgtaaaattgacgaggcggatatgccttttatcgccaaaccgattgccaataaaattacggaaaaagtcaaacaggggtttatccagcctcagttaaaactgcatttggattacattgaaagccaattagcggaaaaattctggctggtgggcgacgaattaacgggtgcggatattatgatgagttttcctttgcaagcggcggttagctattttgaaactaaccaatatccgcatattagcgcttatgttagccgtttgaatcatacggaaagttttaaacgcgcagaacaaaaactgggtccattaacttttttttaa

SEQ ID NO: 90349 - protein, 241 aa, Mannheimia succiniciproducens MBEL55E
MTALFYSFIMQPKFLINGNFMIILYALTQSRAYRIAWLLEILNLPYKLEIIERDGETNLAPDALRSIHPLGKSPIIKDGDLVLTESGAIVEYLINRYGGGKLKPEMNSTDYWQYLHWMHYAEGSLMPLLVIKLIFRKIDEADMPFIAKPIANKITEKVKQGFIQPQLKLHLDYIESQLAEKFWLVGDELTGADIMMSFPLQAAVSYFETNQYPHISAYVSRLNHTESFKRAEQKLGPLTFF

SEQ ID NO: 90350 - DNA, 627 bp, Mannheimia succiniciproducens MBEL55E
  CDS (1)..(627): transl_table=11
atggttaccttacattatcttaaacagtcttgttcacaccgcattgtctggctactggaagcgcttagcttggattatgaactgaaaatctacgatcgtgatccgcaaaccttaatggcgcctgcagaactgaaagctcaacatcctctcggtaaagcccctgtattgcaagatggtgatttagtattagcggagggtaatgcaattatccaacatttactcgaccgctacgacgatgaaaatcgtttcacgccggcacataaaacgggcgcttattcgaactatgtttattggttggcagtatccgcctctatgttcagcgcaaatttcttagcattactctctacacgcagcgatttaggtgattttgctcaatatgcaacggcacaaacgcctctgtttttcaaccacgtggaacaaactcttgaaggcaaacaatggattgtcggcgaacagcttaccggtgcggactttgccctgagcttcccgttacaatgggggatgaaatatgttgatgaagcggattacccgaacattgtgcgctatctggcacaaatcgaaaatcaccccgcttatgtaaaagctaacgaaaaaaccgcaggtgaattggatttaagcaagttctaa

SEQ ID NO: 90351 - protein, 208 aa, Mannheimia succiniciproducens MBEL55E
MVTLHYLKQSCSHRIVWLLEALSLDYELKIYDRDPQTLMAPAELKAQHPLGKAPVLQDGDLVLAEGNAIIQHLLDRYDDENRFTPAHKTGAYSNYVYWLAVSASMFSANFLALLSTRSDLGDFAQYATAQTPLFFNHVEQTLEGKQWIVGEQLTGADFALSFPLQWGMKYVDEADYPNIVRYLAQIENHPAYVKANEKTAGELDLSKF

SEQ ID NO: 90352 - DNA, 612 bp, Silicibacter pomeroyi DSS-3
  CDS (1)..(612): transl_table=11
atgatcaccgttcaccacctggcgcaatcgcgctcgctgcgcatcctctggctgctcgaggagctggggctgccttatgaggtcatccgctatgagcgtgaccccaagacccgcctcgccccacccgaactgcgcgccatccatccgctgggcaaatcgccggtgatcgagacagacggcattcggctggccgaatccggcgccatcgtcgattacctctgtacccgccacgcgccccagatgatgccgccgcaggacagcgccgcctgggccgagcatctggaactgatgcatttcgccgaaggctcggtgatgacaccgatcctgctgaacctttatgtcggccttctgggcgaggcgggcgcgccgctgcatccgcgcatccagtcggaactgaccagccatttccgcttcatggaggacagcctgcgcccctcgggccatttcgtgctggatgggctcagcgccgccgacatcctgctcagcttcccggcaggggtggtggcgcggctgggccgcgcgggtgagtttcccgggctcgccgagttcgccgccaccatggccgcgcgcccggccttccagcgcgcgctggccgcaggcggcggtgactga

SEQ ID NO: 90353 - protein, 203 aa, Silicibacter pomeroyi DSS-3
MITVHHLAQSRSLRILWLLEELGLPYEVIRYERDPKTRLAPPELRAIHPLGKSPVIETDGIRLAESGAIVDYLCTRHAPQMMPPQDSAAWAEHLELMHFAEGSVMTPILLNLYVGLLGEAGAPLHPRIQSELTSHFRFMEDSLRPSGHFVLDGLSAADILLSFPAGVVARLGRAGEFPGLAEFAATMAARPAFQRALAAGGGD

SEQ ID NO: 90354 - DNA, 627 bp, Pseudomonas syringae pv. syringae B728a
  CDS (1)..(627): transl_table=11
atgatcactgtccatcacctgaacaactcacgttcgcagcgtattttgtggctgctcgaagagctcgacctgccctacgaaatcaaacgttatcagcgcgacccgaaaaccaaccttgcgccacccgagctcaaggcggtgcatccgctgggcaaatcacctgtcatcgaagatggtccgcacgtcgtcattgagtccggtgccattgtcgactacctgattcgccgccatggcgacggccgcctgcagccggaccctgccagcgctacttacgacgaatacgtgcaatggctgcattttgctgaaggttcggcgattctgccgctgatgctcaacctgtacgtcggacgcctgggtgacgcgggcgcgccgctgcatccgcgtatccagtcggagctggccaactatctgggctatctgaatgaggctttggggctgacgccatatctgcttggcgacgagctgagcggcgcggacattcagatgagcttcattggcgagttcgccaaggcccagggaatgctgcagtcctacccgaatgtgaccgcatgggttgaaagactgcagggcagacctgcgtaccgcaaggctttggagcagggcggcgaatattcctttgccaagtaa

SEQ ID NO: 90355 - protein, 208 aa, Pseudomonas syringae pv. syringae B728a
MITVHHLNNSRSQRILWLLEELDLPYEIKRYQRDPKTNLAPPELKAVHPLGKSPVIEDGPHVVIESGAIVDYLIRRHGDGRLQPDPASATYDEYVQWLHFAEGSAILPLMLNLYVGRLGDAGAPLHPRIQSELANYLGYLNEALGLTPYLLGDELSGADIQMSFIGEFAKAQGMLQSYPNVTAWVERLQGRPAYRKALEQGGEYSFAK

SEQ ID NO: 90356 - DNA, 669 bp, Psychrobacter arcticus 273-4
  CDS (1)..(669): transl_table=11
atgctacatcttcatcatctggcaaactcacgctcatttcgtatcttatggttattagaagagctgaatgtcgactaccaattgacctgtcatcagcgtaacaaagcttaccgcgcgcctgacagtttaaaacaaatacatccgctcggccatgcacccatgttagaaataaatgaccgtgtgctcatcgagtcaggctttatcatcgagtatctattaaagtattatgataaagaaaagcagtttaagcctgctgatgacaatgaagcggcgtgggaagcctatactttttggctacactttgccgaagcatcactaatgccgccgttggtcatgcgtttggtattcactaaagtggttgagcagtcgccgatgctgatcaaacctgtgagcaaaagcatcaaaaagcaagtcgaaaaaaatgtcataaacaatagcttgactgccatactcgatatgatggagcagcatttacaagacaatcattggtttgcaggggcagaatttagcgccgctgatattcagattcatctggctgtggtcggtgccaatgcaggcacaggtttagacagtagtaaatataccaatatcttaacttggcttaagcgttgtgaagagcgtgatgcctttaaacgtgcagaagaaaagggcggtcgtctacagttttaa

SEQ ID NO: 90357 - protein, 222 aa, Psychrobacter arcticus 273-4
MLHLHHLANSRSFRILWLLEELNVDYQLTCHQRNKAYRAPDSLKQIHPLGHAPMLEINDRVLIESGFIIEYLLKYYDKEKQFKPADDNEAAWEAYTFWLHFAEASLMPPLVMRLVFTKVVEQSPMLIKPVSKSIKKQVEKNVINNSLTAILDMMEQHLQDNHWFAGAEFSAADIQIHLAVVGANAGTGLDSSKYTNILTWLKRCEERDAFKRAEEKGGRLQF

SEQ ID NO: 90358 - DNA, 627 bp, Pseudomonas syringae pv. phaseolicola 1448A
  CDS (1)..(627): transl_table=11
atgatcactgtccaccacctgaacaactcacgttcgcagcgcattttgtggctgcttgaagagctcgacctgccctacgagatcaagcgttatcagcgcgacccgaaaagcaatcttgcgccgcctgaactcaaggctgtgcacccgctgggcaaatcaccggttattgaagatggccctcatgttgtcatcgagtcaggtgccattgtcgattacctgatccgccgtcatggcgatggccgactacaaccggaccctgccagcgctacctacgatgagtacgtgcaatggctgcatttcgcggaaggctcggccattctcccgctgatgctcaacctgtacgtaggacgtctgggtgacgctggcgcaccgctgcatccgcgaatccagtcagagctggccaattatctgggttacctgaacgactctctggggttgacgccttatctgttgggagaagatctgagtggcgcggatattcagatgagcttcattggcgagttcgccaaggctcagggaatgctgcagccgtacccgaatgtgacggcgtgggttgaaagactgcagagcaggcctgcgtaccgcaaggctttggagcagggcggggaatattctttcgccaagtaa

SEQ ID NO: 90359 - protein, 208 aa, Pseudomonas syringae pv. phaseolicola 1448A
MITVHHLNNSRSQRILWLLEELDLPYEIKRYQRDPKSNLAPPELKAVHPLGKSPVIEDGPHVVIESGAIVDYLIRRHGDGRLQPDPASATYDEYVQWLHFAEGSAILPLMLNLYVGRLGDAGAPLHPRIQSELANYLGYLNDSLGLTPYLLGEDLSGADIQMSFIGEFAKAQGMLQPYPNVTAWVERLQSRPAYRKALEQGGEYSFAK

SEQ ID NO: 90360 - DNA, 669 bp, Burkholderia sp. 383
  CDS (1)..(669): transl_table=11
atgctcaccgtccatcacctgaacaactcgcgctcgcagcgcgtgctctggctgctcgaagaactggatgtgccgtacgagatcgtgcgctacgcacgcgatccgaaaacgatgctcgcgccgcccgagttgcgcgcgatccatccgctcggcaagtcgccggtcgtcaccgacgacggccgcacgtacgccgaatcgggcgcgatcatcgaatacctggtcgaacgctacggcaacgggcgcctggcgccgccgcccggcacgcccgagcggcatgactacacgtactggctgcactacgcggaagggtcggcgatgccgccgctgctgctcaagctcgtcgcgctgcggatcgcgcatgcgccgatgccgttcttcgcccggccgatctcgcgcaagatcgcggacacgctgcagtcgagcttcgtcgatccgcagatcgccctgcatctcggctatctcgacgacacgttgagccgcaccggctggttcgttggcgatcgcttcagcgcagccgacatccagatgagctttccgctcgaagccgcgaccgcgcgcgggggcggcagccggtatcccgcgatcgcgcgcttcctcgacgcgatccacgcgcggcccgcgtaccagcgggcgctggagcgcggcggcccgtacgacctgctcaagtaa

SEQ ID NO: 90361 - protein, 222 aa, Burkholderia sp. 383
MLTVHHLNNSRSQRVLWLLEELDVPYEIVRYARDPKTMLAPPELRAIHPLGKSPVVTDDGRTYAESGAIIEYLVERYGNGRLAPPPGTPERHDYTYWLHYAEGSAMPPLLLKLVALRIAHAPMPFFARPISRKIADTLQSSFVDPQIALHLGYLDDTLSRTGWFVGDRFSAADIQMSFPLEAATARGGGSRYPAIARFLDAIHARPAYQRALERGGPYDLLK

SEQ ID NO: 90362 - DNA, 663 bp, Rhodospirillum rubrum ATCC 11170
  CDS (1)..(663): transl_table=11
atgatcaccctgcaccacctcaacaactcgcggtcccaacgcgtcctctggctgctggaggaactggagatcccctatgggctggaacgctaccagcgtgatcccaaaacgatgctggcgcccgaggccctgcgcgccattcatcctttgggcaaagcgccgatcatcaccgacgagggccatacggtggccgagaccggcgccatcgtggagtatatcctgtcgcgccatggcggcggccggatgatcccgccggccggttcggatgaccatctggcttatacttattggctgcatttcgccgaagggtcggccatgccgccgctggtgatggatatcgtccttcaggaaatgcccaagcggatcaccccgctgatccgtccgctggccaagctgatcggccagggcatgcgcaagggctatctgaagccgatgatcgacagccaccttgatctgatggaaaccaccctgaccggcggtggctggttcgccggcgcggcgctgacggcggccgatgtgatgatgagctttcccgtggaagccgcggcggcgcgcgtcggcctgggatcgcgccgcgccctggcggcctggctggccaagattcacgcccgcccggccttcacccgcgccctggagaaaggcgggccctacgcctatgcctga

SEQ ID NO: 90363 - protein, 220 aa, Rhodospirillum rubrum ATCC 11170
MITLHHLNNSRSQRVLWLLEELEIPYGLERYQRDPKTMLAPEALRAIHPLGKAPIITDEGHTVAETGAIVEYILSRHGGGRMIPPAGSDDHLAYTYWLHFAEGSAMPPLVMDIVLQEMPKRITPLIRPLAKLIGQGMRKGYLKPMIDSHLDLMETTLTGGGWFAGAALTAADVMMSFPVEAAAARVGLGSRRALAAWLAKIHARPAFTRALEKGGPYAYA

SEQ ID NO: 90364 - DNA, 627 bp, Novosphingobium aromaticivorans DSM 12444
  CDS (1)..(627): transl_table=11
atgtcgatcatcgtccatcacctgaacaacagccgctcccagcgggtcctgtggttgctggaagaactgggggtcgattacgagattcgccactatcagcgcgatgcggtgacgaaccttgctccgcccgaactcaaggcggtgcatcccctcggcaagtcgcccttgctggaaatcgacggccgcgtgatcgaggagtccggggcaatcgtgcaggtgctttgcgagcgctatggcaatggcaagtggctgcctcggcaaggctcggacgacgcgctgcgccaccttgaactcatgcattttgccgaaggctcggcaatgacgccgatcctgctccagctctacacttcgcgcctcggcgaagcggcggcgccgctccagccgcgcatcgccgaacagcttgccgcgcacttcggctacatggagcagatcctgcgcccttcagggcatttcgtcggcgacgactggaccggtgccgacgtgatgctgagcttcccggcagagatcgcggtcatgcaggggcaggcaggctcgcttccgaagctctccgcattcgtggcagcggtccatgcacgccccgcctggcagcgggcgcgggagaagggcggcgcctacttcaacatgtag

SEQ ID NO: 90365 - protein, 208 aa, Novosphingobium aromaticivorans DSM 12444
MSIIVHHLNNSRSQRVLWLLEELGVDYEIRHYQRDAVTNLAPPELKAVHPLGKSPLLEIDGRVIEESGAIVQVLCERYGNGKWLPRQGSDDALRHLELMHFAEGSAMTPILLQLYTSRLGEAAAPLQPRIAEQLAAHFGYMEQILRPSGHFVGDDWTGADVMLSFPAEIAVMQGQAGSLPKLSAFVAAVHARPAWQRAREKGGAYFNM

SEQ ID NO: 90366 - DNA, 678 bp, Burkholderia xenovorans LB400
  CDS (1)..(678): transl_table=11
atgctgaccgtccatcatctgaacaactcccgctcgcagcgtgtgctatggctgctcgaagaactcggcgttccgtacgagatcaagcgttacgagcgtgatccgaaaacgatgctggcgccgcccgagctgcgcgcggtgcatccgctcggcaagtctcccgtcattaccgacgatggccagacgatcgccgagtcgggcgcgatcatcgagtatctgatcgacaggtacgggcagggacgttttgcgccggcgcccggcacaccggagcggctgcgttacacctactggctgcactacgcggaaggttcggcaatgccgccgctgctgctcaaactcgtggcgctgcgtattgccagcgcgccgatgccgttcttcgccaggccgatagcgcgcaagatcgccgcgacgctgcaatcgagttttatcgatccgcagttgaagctgcacctcggctacatcaatcaggaattgagcaagaccggctggtttgtcggcaacgacttcaccgcggcagacgtgcaaatgagttttccactcgaagccgccacggcgcgcggcgggatggacgggcagattcctgcggtggtcgattttctcaagcgcattcatgcgagacccgcttatcagcgggcgctggagcgcggcggcaaatacgaactgctcggcggcgattga

SEQ ID NO: 90367 - protein, 225 aa, Burkholderia xenovorans LB400
MLTVHHLNNSRSQRVLWLLEELGVPYEIKRYERDPKTMLAPPELRAVHPLGKSPVITDDGQTIAESGAIIEYLIDRYGQGRFAPAPGTPERLRYTYWLHYAEGSAMPPLLLKLVALRIASAPMPFFARPIARKIAATLQSSFIDPQLKLHLGYINQELSKTGWFVGNDFTAADVQMSFPLEAATARGGMDGQIPAVVDFLKRIHARPAYQRALERGGKYELLGGD

SEQ ID NO: 90368 - DNA, 672 bp, Hyphomonas neptunium ATCC 15444
  CDS (1)..(672): transl_table=11
atgatcaccctgcaccaccttgagaaatcccaatccatccgcatcctctggctgctggaggagctgggcgtaccctatgaggtgaagctttatgatcgcgatcccaagtcccgcatggcgccggccgcctacaaggcgatctcgccgctgggcacagcgccggtcattacagagggcgatgtcacgctcgccgagaccaacgccatcgtggattatatcctcgacaagcatgacaatggccgcctgcgtccggaagccggttcaccgatgcgcgccaaataccttttctggtttcacacctcgcagggcagccttcagccactcctgaccaacaagttcgtgatgatggcagtgaccgcccgctcgcctttcctgatacgccctgtggcgaaatccattgttggcgcgctggatcaggctttcttcggcccgcgccttgccgccctcttccgcgaaatcgaaaaagcgctgggggaaagcaaatggtttgcgggcgaggaactcaccgctgccgacatcgtgatgggctattccatggagctctgcgcccatcgcggcgggatgaccgagcccgactttcccaattccttccgcttcctgaagcagatgcgggaatacccctcctacatccgggcgatggagaaggacggcaaaggcaccatccttctctag

SEQ ID NO: 90369 - protein, 223 aa, Hyphomonas neptunium ATCC 15444
MITLHHLEKSQSIRILWLLEELGVPYEVKLYDRDPKSRMAPAAYKAISPLGTAPVITEGDVTLAETNAIVDYILDKHDNGRLRPEAGSPMRAKYLFWFHTSQGSLQPLLTNKFVMMAVTARSPFLIRPVAKSIVGALDQAFFGPRLAALFREIEKALGESKWFAGEELTAADIVMGYSMELCAHRGGMTEPDFPNSFRFLKQMREYPSYIRAMEKDGKGTILL

SEQ ID NO: 90370 - DNA, 615 bp, Hyphomonas neptunium ATCC 15444
  CDS (1)..(615): transl_table=11
atggccgtcaaactgcaccatctcaacgcctcgcgctcgcagcgcatcgtctggctcctcctcgagctcggcgtgccgcacgagattgtccaccacaaacgcagcgagacaacgcggctcgcgccgccggacctgaaaaagatccatccgctcggcaagtcgccgcttctggaagacgggaatgttgtgattgccgagaccggggcgattgcagaatacctgctggcgaagttcgacaccgcccacaagctgcacccaaagccggactctccggattttccgcgctacctcgaatggatccactcgtccgagggcgccgtgtttctgcccgggctgctgacgctctatactggcatggccggaatcacggacggtccggtggcgcaaatgatcgccggcgagcgcgaaaaggtcgccgcgcatatcgaagcgcacctgtcgaagcatgcctattttgccggggacacattcacggcggcggactgcctgatgggcttccagattgtgttgaccgacgcgcagggcgggctcggcaaccggccggccacgaaggcatggctggaccgcgtgaccgccaggtctgcctatcaggcgatgctggccgtaggggtttga

SEQ ID NO: 90371 - protein, 204 aa, Hyphomonas neptunium ATCC 15444
MAVKLHHLNASRSQRIVWLLLELGVPHEIVHHKRSETTRLAPPDLKKIHPLGKSPLLEDGNVVIAETGAIAEYLLAKFDTAHKLHPKPDSPDFPRYLEWIHSSEGAVFLPGLLTLYTGMAGITDGPVAQMIAGEREKVAAHIEAHLSKHAYFAGDTFTAADCLMGFQIVLTDAQGGLGNRPATKAWLDRVTARSAYQAMLAVGV

SEQ ID NO: 90372 - DNA, 699 bp, Nostoc punctiforme PCC 73102
  CDS (1)..(699): transl_table=11
atgatcgatctttattattggacaaccccaaacggtcataaaattacgattttcctggaagaagtcggcttgcaatataccataaatcctgtgaatattggagctggagatcaatttaagcccgaatttttgaagatttctcctaacaatcgtatccccgcgatcgttgaccacgaaccagtagatggaggtgcgccgatttcggtatttgagtctggggcaatcttgctatatttggcagaaaaaaccgggaaattaatcccgcaagatttacgccaacgcactcaagttttagaatggttgttctggcaaatgggcggtctggggccaatggcaggacaaaatcatcactttagcgcctatgctcccgaaaagattgaatatgccattaaccgctacgtgaatgagacaggacgcttatatggagtgctaaataagcaactagcagatagagaatttgtggctggggattattccatcgccgatattgctgcttatccctggattgtgccctatgaacgccaaagtcagaatctagaggattttcctcacctcaagcgctggtttgagacaataaaagctcgtccggcaacaattcgcgcctacgagaaagcagaagcattgaaagctcaaccacttgacccagataagtcacgagatttgttatttaaccagtcggcgaagactattcaaccttga

SEQ ID NO: 90373 - protein, 232 aa, Nostoc punctiforme PCC 73102
MIDLYYWTTPNGHKITIFLEEVGLQYTINPVNIGAGDQFKPEFLKISPNNRIPAIVDHEPVDGGAPISVFESGAILLYLAEKTGKLIPQDLRQRTQVLEWLFWQMGGLGPMAGQNHHFSAYAPEKIEYAINRYVNETGRLYGVLNKQLADREFVAGDYSIADIAAYPWIVPYERQSQNLEDFPHLKRWFETIKARPATIRAYEKAEALKAQPLDPDKSRDLLFNQSAKTIQP

SEQ ID NO: 90374 - DNA, 639 bp, Nostoc punctiforme PCC 73102
  CDS (1)..(639): transl_table=11
atgatcgttgtccatcatcttaacaactcgcgatcgcagcgcgtgctatggctgcttgaagaattagggattgattatgaaattaagttctacgaacgcgaccagaagacgatgcttgcaccagcatccctgcgtgaagtccatcccctcggcaagtcaccagtaatcactgatgcagaaaatactgttgctgagtcgggcgctatcattgaatacatcgtcgatcgctacggtaatggtcagctaatcccgctatctggtacgccagagcgtctgcgctacacttattggctgcattatgccgaaggctctgcaatgccacctctggtaatgaatcttctctttaaccgttttggtacaggagacagcgtaaacgaaggatttatcgcaccccaaattaagcttcactttgactatatagaaggtgaacttcgcaaaagtacatggttcgtaggcgaagaattcaccgccgccgatatccaaatgagctttcctttggaaatagtcgctatggaagccgaactcatctcaagccgaccgaaaattaaacaatttatcgagcgcatccatacgcggcttgcttacaaacgcgctcttgaacgcgggggcagatacgacttcgccaatagcattcaataa

SEQ ID NO: 90375 - protein, 212 aa, Nostoc punctiforme PCC 73102
MIVVHHLNNSRSQRVLWLLEELGIDYEIKFYERDQKTMLAPASLREVHPLGKSPVITDAENTVAESGAIIEYIVDRYGNGQLIPLSGTPERLRYTYWLHYAEGSAMPPLVMNLLFNRFGTGDSVNEGFIAPQIKLHFDYIEGELRKSTWFVGEEFTAADIQMSFPLEIVAMEAELISSRPKIKQFIERIHTRLAYKRALERGGRYDFANSIQ

SEQ ID NO: 90376 - DNA, 615 bp, Sulfitobacter sp. EE-36
  CDS (1)..(615): transl_table=11
atgatcaaaatccaccacctgaaccggtcccgctctcatcgcattttgtggctgctcgaagaaatcggcgcgccttatgatgtcattccctatacccgcgatgccaagaccaacctcgccccgcccgagctaaagctcgtgcaccccttgggcaaatcccccatggtcgagatcgacggcacgctgatcgccgagagcgcggccatcaccgaggtgctttgcacccgtttcgcgccgcagatgatccccgatcgtgacagcgccgcctatttgcagcaccttgaactgatgcatttcgccgaagggtccgcgatgacgccgatcctgctgaacctctatgtcagccgtttgggcgacgccggtgcgccgctgcatccgcgcatcgcgtctgaactggacaaccactatagctacatgaacagccgcgtgcgcgcctcggggcattttgtgcaggatacgctgtcggcggcggatatcatgctcagctttccggcagagatcgcgatgcagcagggccgcgccaaggattatcccgcactcgctggctttgtcgagatgatccacgcgcgccccgcctatggtcgcgccaccgcgcgcggcaaaaccgatgcctaa

SEQ ID NO: 90377 - protein, 204 aa, Sulfitobacter sp. EE-36
MIKIHHLNRSRSHRILWLLEEIGAPYDVIPYTRDAKTNLAPPELKLVHPLGKSPMVEIDGTLIAESAAITEVLCTRFAPQMIPDRDSAAYLQHLELMHFAEGSAMTPILLNLYVSRLGDAGAPLHPRIASELDNHYSYMNSRVRASGHFVQDTLSAADIMLSFPAEIAMQQGRAKDYPALAGFVEMIHARPAYGRATARGKTDA

SEQ ID NO: 90378 - DNA, 672 bp, Erythrobacter sp. NAP1
  CDS (1)..(672): transl_table=11
atgctgacacttcaccacctcgaatattcgcagagctttcgcatcctctggctactcgaagccttgggcgccgagtatgagctcaagagctataatcgcgatcccgagaccaatcttgcgcctgccgaatacaaggcgctttcgcctctcggcactgctccagtcgtgaccgagggcgacctcgtgctcgcagagagcaacgcgattatcgactatattctagactcctatcccggcagcgatctgcgtccgggtgcagggcacaaggaccgcgcgcgccatctgttctggtatcacgcatcgggtgcgtcgttcatgaacctgcagagcgttgcgatgatcctgggactgcttgaaagccgcgctccatggccgatcagcgccctgctcaagtctgtgtttggccaggtgcacaagctcttcctcggtccgcgcttcgatgcgctgttcgacctgatggaaaacgatctcgccaagcagccgtttttcggcggcgacaatctgaccgctgccgatatcacgctggtttattcaatgttcgctgcgcgtgaacggggtcagcttgatggctacccgcaggtgactcagtggttcgagaggatcgaggaattgccctcgttccagtctgcccgcgcgaaggacaaccgcgacaagatcaccttcagcttctga

SEQ ID NO: 90379 - protein, 223 aa, Erythrobacter sp. NAP1
MLTLHHLEYSQSFRILWLLEALGAEYELKSYNRDPETNLAPAEYKALSPLGTAPVVTEGDLVLAESNAIIDYILDSYPGSDLRPGAGHKDRARHLFWYHASGASFMNLQSVAMILGLLESRAPWPISALLKSVFGQVHKLFLGPRFDALFDLMENDLAKQPFFGGDNLTAADITLVYSMFAARERGQLDGYPQVTQWFERIEELPSFQSARAKDNRDKITFSF

SEQ ID NO: 90380 - DNA, 633 bp, Erythrobacter sp. NAP1
  CDS (1)..(633): transl_table=11
atgctgaccatccaccacctgcgcatttcgcagtccgaacgcatcgtctggttgtgcgaggaactagggctcgaatacgacctcaagctctacaatcgcgatccagaaacacgccttgccccgccagagctcaaagctcttcaccccatggagatcgcgccggtcatcaccgacggtgatctcgtgctgggcgagagcggcgcgatcatggattacatcgtgggcaagtatgctcccgatacggatctagtccccggccccgatcacccggactttgccgaccacctgtactggtaccatttcgccaacgcgactttgatgaccaacggcatgatgacgattgcggtgaatgccgtcggcgctgaaatgcccccgcctttgatgaagcgggtcacgaacgcttgggctcatatcgagaagcgcctgggtgaagctgattatttcggcggctcggcgctgaccaccgctgacatcatgctcggcttctcgctgacgacggcgcgcgctttcaatgacatgagtgtcgatcacatgcctaacctcaaggcgtggctgcagcgcatcggttcgcgcgatgcctatcagcgcgcaatggccaaggccgagcccggctttccgcccaagctcgattga

SEQ ID NO: 90381 - protein, 210 aa, Erythrobacter sp. NAP1
MLTIHHLRISQSERIVWLCEELGLEYDLKLYNRDPETRLAPPELKALHPMEIAPVITDGDLVLGESGAIMDYIVGKYAPDTDLVPGPDHPDFADHLYWYHFANATLMTNGMMTIAVNAVGAEMPPPLMKRVTNAWAHIEKRLGEADYFGGSALTTADIMLGFSLTTARAFNDMSVDHMPNLKAWLQRIGSRDAYQRAMAKAEPGFPPKLD

SEQ ID NO: 90382 - DNA, 609 bp, Pseudoalteromonas tunicata D2
  CDS (1)..(609): transl_table=11
atgttaacagtgcatcatttaaatcaatctcgttcaaagcgcgttttatggttactcgaagaactcggcatggcttatcagcgcgttgatcatcagcgtgatgccaattcgcgcctagcgccagcgagcttaaaagccattcacccactaggcaaagccccagtgattgttgatggcgacatcactttgtgcgaatcgggcgcagtgcttgagtatattcttgatcaagcgggcgactcagcccttcgcccagcacgcggcagcgccgattattatcgttatttagaatggtctcattttgccgaaggctcattggcattgcccgtgatcaccagtttattgctgacgatggaatcacgcagcggcacgcaaccgctagatggctatatcggcaaagaaaaacaggttgattttagctatatcgaagcaacactcacctctcgcccttattttgctggtgataactttactgccgccgatattatgatggccgtaatgctcgagtttgccgccaacttaggtttattagccgactacccgcacacacttgcatacctaaaaaccatgcagcagcgtccagcctatcaaaccgccgcccaaatcggttaa

SEQ ID NO: 90383 - protein, 202 aa, Pseudoalteromonas tunicata D2
MLTVHHLNQSRSKRVLWLLEELGMAYQRVDHQRDANSRLAPASLKAIHPLGKAPVIVDGDITLCESGAVLEYILDQAGDSALRPARGSADYYRYLEWSHFAEGSLALPVITSLLLTMESRSGTQPLDGYIGKEKQVDFSYIEATLTSRPYFAGDNFTAADIMMAVMLEFAANLGLLADYPHTLAYLKTMQQRPAYQTAAQIG

SEQ ID NO: 90384 - DNA, 624 bp, Photobacterium sp. SKA34
  CDS (1)..(624): transl_table=11
atgatcatattgcaccatcttaatcaatctcgttcaaagcgtattatctggttacttgaagagctgggtgttgaatataaaattcaaccttattgccgagataaagtcacttttcttgcgccaccagagcttaagagtgctcatccactaggtaaatcaccggtattggaagataacggattgatcattaccgaatcaggtgctatcacagaatatttaattgagacttacggtaacggtaaatttatgcctgaacgtggcactcaagcttatattgattatattcaatggctacattttgctgaaagctcagctattttacctttacttttaaagatgtttgtcaccaaagatggtgcaaaaatgaatttccttggtgattatgctgacatggaaactcagaaagtgatgcaatattttgatcaacggttagctgataaaacttaccttatagaagagcgtttaacgggtgcagatttcatgatgtcatttattgctgaaatccttggtaactatggcgtattagctgcgtttccaaatattcaacgttacgcagagcagttacaaacacatcaaggctaccaaacagctcaagcgttagaattacaatataacggcgaataa

SEQ ID NO: 90385 - protein, 207 aa, Photobacterium sp. SKA34
MIILHHLNQSRSKRIIWLLEELGVEYKIQPYCRDKVTFLAPPELKSAHPLGKSPVLEDNGLIITESGAITEYLIETYGNGKFMPERGTQAYIDYIQWLHFAESSAILPLLLKMFVTKDGAKMNFLGDYADMETQKVMQYFDQRLADKTYLIEERLTGADFMMSFIAEILGNYGVLAAFPNIQRYAEQLQTHQGYQTAQALELQYNGE

SEQ ID NO: 90386 - DNA, 636 bp, gamma proteobacterium HTCC2207
  CDS (1)..(636): transl_table=11
atgttaactgtccatcatttaaataattcccgctcacaacgcatcctctggttacttgaagaactcggtcttgagtaccagttaaaaacctatcagcgcgacccagtgaccaatcttgccccaccggaattggaactagtgcatcctctcggcaagtcgccggtcctgaccgatgatgcaataacggtgattgagtccggcgcgatcattgactatatcttgcgccactatggtgctggacgtttgcagccggaagtaggcagcgatggccatgaacagtatctgcaatggctgcattatgcggagggcagtgcgatgctgccaatgatgctaaaaatgtatacagcgcgcctgggtgacgccggcgcgccactgcagccacgtatcggcgaggaactacagcgccatctaggctatatagagaatgcactgcagggcgtcgattggttggtaggtgactgtttttcgggtgctgatattcaactctcgtttgtagctgaaattacaccgttgctctactcctttgataccctgccgaatattgctgcctatcgccagcgcatgcagaagcgcccagcctataaagctgcactcaagcgcggcgggttttacgcctatggttcggatgaaacctaa

SEQ ID NO: 90387 - protein, 211 aa, gamma proteobacterium HTCC2207
MLTVHHLNNSRSQRILWLLEELGLEYQLKTYQRDPVTNLAPPELELVHPLGKSPVLTDDAITVIESGAIIDYILRHYGAGRLQPEVGSDGHEQYLQWLHYAEGSAMLPMMLKMYTARLGDAGAPLQPRIGEELQRHLGYIENALQGVDWLVGDCFSGADIQLSFVAEITPLLYSFDTLPNIAAYRQRMQKRPAYKAALKRGGFYAYGSDET

SEQ ID NO: 90388 - DNA, 669 bp, Oceanobacter sp. RED65
  CDS (1)..(669): transl_table=11
atgattactctgcaccatttaaataactcacgctcacagcgcattctttggttattggaagagcttggattggaatacaacattgagttttatgaacgtgacccaaaaactattttggcgcccgacagtttaaaaagggttcaccctttaggcaaaagccctatcattactgataagcaaacaagcatcacccttgctgaaagcggcgcaatcattgagtatctaatcgatacctatggtgaacaattcaaagcacctaaagaacaacattggaataatgtttattggttacattttgccgaaggcagcctaatgccacctatggtcatgcgtttggtatttaccaaaatgaagcaatcacccatgccatttttcattaagcccatcgctcgcatgcttgcagacaaagtgttatctatgtttatcgatccaaacaacaaacgtaatttagaatatgtcgaaagccatttatcgcagaataaatatttttgcggtgatcaggtcacggcggctgattttcaaatgagttttcctctagaggccagcgtcgctcgtggcatgattcgcgaagacaattacccacatacgtatgagtatgtaaaacgctttcaagcccgcgacgcgtataaacgcggtttggagaaaggcggtgagtacgattacgcttag

SEQ ID NO: 90389 - protein, 222 aa, Oceanobacter sp. RED65
MITLHHLNNSRSQRILWLLEELGLEYNIEFYERDPKTILAPDSLKRVHPLGKSPIITDKQTSITLAESGAIIEYLIDTYGEQFKAPKEQHWNNVYWLHFAEGSLMPPMVMRLVFTKMKQSPMPFFIKPIARMLADKVLSMFIDPNNKRNLEYVESHLSQNKYFCGDQVTAADFQMSFPLEASVARGMIREDNYPHTYEYVKRFQARDAYKRGLEKGGEYDYA

SEQ ID NO: 90390 - DNA, 618 bp, Vibrio sp. Ex25
  CDS (1)..(618): transl_table=11
atgattaaacttcaccatctcaatcagtctcgctcaaagcgcatcatttggttacttgaagagctaaatgtggattacgaaatcgtgccttatgttcgtgacaaagtgaccttcatggcaccgcctgagctaaagagcgttcatccgctcggtaaatcgcccctgcttgaagatgatggcgagttcatcattgaatcaggcgcgatgaccgaatatttgattgagaagtacagtgatggtgcgttggctcctgagcgtgggacgaaggcgcacactgagtacctgcaatggatgcactttgctgaaagttcagcaatcttaccaatgttgttaaaaatctttattagcaaagagccaaacgaaactcaatttctatcaggctatgctgacaaagaagcgatgaacgttctgggttatttcgagcaatcgctagaaggcaaaacttacctagtagaagaacgtttaactggcgcagacatcatgatgtcatttattgtcgagctcgtgcataagttcggtttggctggtcacttcccgaatattgagcgttatggaaaacaactcgcaacgcatccagcgtttgaaaaagctgagcaaattgaagtgaagtactcctaa

SEQ ID NO: 90391 - protein, 205 aa, Vibrio sp. Ex25
MIKLHHLNQSRSKRIIWLLEELNVDYEIVPYVRDKVTFMAPPELKSVHPLGKSPLLEDDGEFIIESGAMTEYLIEKYSDGALAPERGTKAHTEYLQWMHFAESSAILPMLLKIFISKEPNETQFLSGYADKEAMNVLGYFEQSLEGKTYLVEERLTGADIMMSFIVELVHKFGLAGHFPNIERYGKQLATHPAFEKAEQIEVKYS

SEQ ID NO: 90392 - DNA, 618 bp, marine gamma proteobacterium HTCC2143
  CDS (1)..(618): transl_table=11
atgttaacaatccaccatctgcgtataggtagatctatatttactgtttggctattggaagaactcgagcttgaatatacggtaaaagagtactttcgcaaccctgacactaaccgcgcgcctccagagctgagggatattcatcctttagggaaatcaccagttattgatgatgacggacttattctgacggaatctggggcgattgttagttatctgttgaagaaacatgatccggaacacaggttttcacccgcaccacacgacttggcggcttggggaacctataatcaatggcttcactaccccgaaggctccgtattcctagctctactgatacaattactgttgctgcgaagtggtgttcccgcgccggtatttgagggttactcgcaggctgaagtaaagttgcacctggatcatatcagtagccaactgggtgaaaacgactacattctgggaaatcagtttagcgctgccgattttggcgtttgttatatgatgtcgatggctgaaagtctcggtttgttatcgggacacaagtcattaagcgactatgttgagcgcaacaaaaatcgccctgcattcaaaagggccgttgacagagccgtagaatag

SEQ ID NO: 90393 - protein, 205 aa, marine gamma proteobacterium HTCC2143
MLTIHHLRIGRSIFTVWLLEELELEYTVKEYFRNPDTNRAPPELRDIHPLGKSPVIDDDGLILTESGAIVSYLLKKHDPEHRFSPAPHDLAAWGTYNQWLHYPEGSVFLALLIQLLLLRSGVPAPVFEGYSQAEVKLHLDHISSQLGENDYILGNQFSAADFGVCYMMSMAESLGLLSGHKSLSDYVERNKNRPAFKRAVDRAVE

SEQ ID NO: 90394 - DNA, 612 bp, marine gamma proteobacterium HTCC2143
  CDS (1)..(612): transl_table=11
atgttgaaattacactttgcacccaattcccgggctagtcgaatcgtctggctgttagaagagttacagttaccctacgaaattaataaaatggcttttcatcctaaagatttaaagtctgatgaacatcgggcgcgccatccgttaggtcgcgtgccggtattagaggatggcgacgttacgctgttcgagtctggtgctatcgtcgactatattttggaaaggcacaaaaatggcggtctaaaacctgcggtcagcgatgcgacatacccagactatctgcagtggtttcattactgcgagggtatggtcatgcctccggttaacaccattgttgtgcagactatattattgcctgcagaccgcagagacgaaaaagtgttggcgcaggcgcagcgactactgaccaatgcgttgcaaccagtcaatgaaacattggagggaaaagactatttgattggtgctttttccggcgcagatatcatgttgggtcatgccagtttcatgagtaatcggctcggttgtgttcctgaagaaatggagtatttgaaggcttacgttgaacgtgtagccgcgcgacctgctttcaacaaagcgatcactatggaatag

SEQ ID NO: 90395 - protein, 203 aa, marine gamma proteobacterium HTCC2143
MLKLHFAPNSRASRIVWLLEELQLPYEINKMAFHPKDLKSDEHRARHPLGRVPVLEDGDVTLFESGAIVDYILERHKNGGLKPAVSDATYPDYLQWFHYCEGMVMPPVNTIVVQTILLPADRRDEKVLAQAQRLLTNALQPVNETLEGKDYLIGAFSGADIMLGHASFMSNRLGCVPEEMEYLKAYVERVAARPAFNKAITME

SEQ ID NO: 90396 - DNA, 792 bp, Aspergillus niger
  CDS (1)..(792)
atgaccgaccccaacaaaggcaccaaaatcaccctctactggctctcccaatcccgctctcaccgcatcctctggctcctcgaagccctgcacctcaactacgagctaaagatctaccaccgcggacccgacaagctcgcgcccccggaactgaaagagatccatccgttaggaaagtcgcctctcctgactatccagcccgcgaatgccactccagaccagaagcccattgtgctggctgaatcgggtattatcatcgagtacctgctcgatcacttcggctccaatgcagagaaacctctcctcccgccccggtggaaagatacccaagatggtgtagttggcggagaaacagaggaatggatgcgctatcggtacttcatgcactatgctgagggcagtctcatgccgtttttggtcatgcagttggttatggatacggtgaaaaacccccctggaatgcccttcttcgtcaagcctctcccgcgcctcgtcgcgggccaggtcgagaaggcgttcctggcgcgaaacatccagtcgcacttggagttcctggaagatcagctgcggagtagtcctaatgggggtgcctatctctgcgggacggagttgacggccgcggacattatgatgagtttcccggtgattgctatgtccgggaggttggaggagcagttggacaagtttccgctgctgaaggggtatgcggatagattggagaaggaggagggatatattagggctgtgaagaaggtggaggaggtggatgggaagtttgaggcttccctgtga

SEQ ID NO: 90397 - protein, 263 aa, Aspergillus niger
MTDPNKGTKITLYWLSQSRSHRILWLLEALHLNYELKIYHRGPDKLAPPELKEIHPLGKSPLLTIQPANATPDQKPIVLAESGIIIEYLLDHFGSNAEKPLLPPRWKDTQDGVVGGETEEWMRYRYFMHYAEGSLMPFLVMQLVMDTVKNPPGMPFFVKPLPRLVAGQVEKAFLARNIQSHLEFLEDQLRSSPNGGAYLCGTELTAADIMMSFPVIAMSGRLEEQLDKFPLLKGYADRLEKEEGYIRAVKKVEEVDGKFEASL

SEQ ID NO: 90398 - DNA, 768 bp, Aspergillus oryzae
  CDS (1)..(768)
atgacggacgtaaacaaaggcgccaacatcaccctctactggctggagcaatcccgctcccagcgcatcgtctggctcttcgaagaactaggcctcacctacaacctgaagaccttcaagcgcacctcggagatgctggctcccccggagctgaaaaagatccatccactgggcaaatcgcccgtcatcaccattgaaaccgagcagtcagagaaaccgctcgtgcttgccgaatcgggtaatatcaccgagtacctatgcgaccatttcggcggcgagaagctcatcccaaagcgctatcccgagggcaaggagggcgctgtcggcggcgagacggaggaatggatgcgttatcggtatttcatgcactatgctgagggtactctgatgccgtttttggtgtttcagttggtcatggaccgtatgaaggatgcccctgttccgttcttcatcaagcccatcccgaggtttgttgcgtcaaaggttgaagaggccttcctttctaggaatatctttgggaactttgatttccttgaggagcgcttgaagaccgcccctggtggtggaccgtatctctgcggacagcagttgacggctgctgatattatgatgagcttccctcttattgcggcgtcgttgagattgcccctgaaggagaagtatccccatctggctaagtatgtggagatgattcaggccgagaagggctaccagagggctgtgaagaaggtggaggagatcgatgggaagttccaggcttccttgtga

SEQ ID NO: 90399 - protein, 255 aa, Aspergillus oryzae
MTDVNKGANITLYWLEQSRSQRIVWLFEELGLTYNLKTFKRTSEMLAPPELKKIHPLGKSPVITIETEQSEKPLVLAESGNITEYLCDHFGGEKLIPKRYPEGKEGAVGGETEEWMRYRYFMHYAEGTLMPFLVFQLVMDRMKDAPVPFFIKPIPRFVASKVEEAFLSRNIFGNFDFLEERLKTAPGGGPYLCGQQLTAADIMMSFPLIAASLRLPLKEKYPHLAKYVEMIQAEKGYQRAVKKVEEIDGKFQASL

SEQ ID NO: 90400 - DNA, 780 bp, Alternaria brassicicola
  CDS (1)..(780)
atgtcgaaccagcaaggagcaaagatcaccgttcattggctaaacaagtcgcgtggccaacgtattgtatggctgcttgaagagcttggtctcgagtacgacatcgcggtctacaaacgcgataaaaacaagcgcgcgggtctcgacttgaaggccgtccaccctctggggaagtcgcccactgtggctatcaggcccgcaaactccgagaaagacattgtcatcactgagagtgaaacgattatggagtacatttgtgaccactttggcaagcacctgattcctgcgcgttaccctgagggacaggagggtgtacttggtgatgagactgaggagtggatgaggtacaagttcctgatggactacactgagggtagtctctttaccgtcctaatcctggccctagtcaccggaaacatcaaaagcgctcctgtacccttcttcctcaagcccattaccaacggcgtcgcctccaagattgattctggtttcgttaacccagagctgaagacgcacttcgacttcctcgaggactatctcgtcaagtcgcctagcaaaggagagttcttttgcagcgacaagctcaccgctgcggatattatgatccatttcggactcgagggtgcggcgcagagggtgccgttgagtgagacgagttatcccaagttgtacgagtacatgaggaggttgcagaagagggatgcatacaagaatgcagcgaagagggtcgaagaggccagtggagagacgtacgttccgtttagtgacgcaaagttgtag

SEQ ID NO: 90401 - protein, 259 aa, Alternaria brassicicola
MSNQQGAKITVHWLNKSRGQRIVWLLEELGLEYDIAVYKRDKNKRAGLDLKAVHPLGKSPTVAIRPANSEKDIVITESETIMEYICDHFGKHLIPARYPEGQEGVLGDETEEWMRYKFLMDYTEGSLFTVLILALVTGNIKSAPVPFFLKPITNGVASKIDSGFVNPELKTHFDFLEDYLVKSPSKGEFFCSDKLTAADIMIHFGLEGAAQRVPLSETSYPKLYEYMRRLQKRDAYKNAAKRVEEASGETYVPFSDAKL

SEQ ID NO: 90402 - DNA, 675 bp, Triticum aestivum
  CDS (1)..(675)
atggcggcgccggcggtgaaggtgtacgggtgggcgatgtcgccgttcgtggcgcgcgcgctgctgtgcctggaggaggccggcgtggagtacgagctcgtccccatgagccgcgaggccggcgaccaccgccagcccgacttcctcgcccggaaccccttcggccaggtccccgttctcgaggacggcgacctcaccatcttcgagtcgcgcgccgtcgcgaggcacgtgctgcgcaagcacaaaccggagctgctgggctccggctcgccggagtcggcggcgatggtggacgtgtggctggaggtggaggcccaccagcaccagaccccggcgggcaccatcgtcatgcagtgcatcctcaccccgttcctcggctgccagcgcgaccaggccgccatcgacgagaacgcggcaaagctgacgaatctgttcgacgtgtacgaggcgcgcctgtcggcgtcgaggtaccttgccggggaggcggtcagcctcgcggacctcagccacttcccgttcatgcgatacttcatggacaccgagtacgcgtcgctggtggaggagcgcccgcacgtgaaggcgtggtgggaggagttcaaggccagcccggcggcgaagagggtgacggagttcatgccgccaaacttcgggttcggaaagaaggcagagaagtga

SEQ ID NO: 90403 - protein, 224 aa, Triticum aestivum
MAAPAVKVYGWAMSPFVARALLCLEEAGVEYELVPMSREAGDHRQPDFLARNPFGQVPVLEDGDLTIFESRAVARHVLRKHKPELLGSGSPESAAMVDVWLEVEAHQHQTPAGTIVMQCILTPFLGCQRDQAAIDENAAKLTNLFDVYEARLSASRYLAGEAVSLADLSHFPFMRYFMDTEYASLVEERPHVKAWWEEFKASPAAKRVTEFMPPNFGFGKKAEK

SEQ ID NO: 90404 - DNA, 25 bp, Artificial sequence
  primer
atgtcgttgccaattatcaaagtcc

SEQ ID NO: 90405 - DNA, 25 bp, Artificial sequence
  primer
ttagaaattgctacctaaagcacgc

SEQ ID NO: 90406 - protein, 260 aa, Artificial sequence
  consensus sequence
  Variant (2)..(2): Xaa in position 2 is any amino acid
  Variant (4)..(5): Xaa in position 4 to 5 is any amino acid
  Variant (6)..(12): Xaa in position 6 to 12 is any or no amino acid
  Variant (16)..(16): Xaa in position 16 is any amino acid
  Variant (18)..(19): Xaa in position 18 to 19 is any amino acid
  Variant (26)..(28): Xaa in position 26 to 28 is any amino acid
  Variant (30)..(35): Xaa in position 30 to 35 is any amino acid
  Variant (37)..(41): Xaa in position 37 to 41 is any amino acid
  Variant (42)..(42): Xaa in position 42 is any or no amino acid
  Variant (45)..(45): Xaa in position 45 is any amino acid
  Variant (46)..(46): Xaa in position 46 is any or no amino acid
  Variant (48)..(49): Xaa in position 48 to 49 is any amino acid
  Variant (50)..(50): Xaa in position 50 is any or no amino acid
  Variant (55)..(56): Xaa in position 55 to 56 is any amino acid
  Variant (58)..(67): Xaa in position 58 to 67 is any amino acid
  Variant (68)..(76): Xaa in position 68 to 76 is any or no amino acid
  Variant (80)..(80): Xaa in position 80 is any amino acid
  Variant (82)..(83): Xaa in position 82 to 83 is any amino acid
  Variant (85)..(107): Xaa in position 85 to 107 is any amino acid
  Variant (108)..(124): Xaa in position 108 to 124 is any or no amino acid
  Variant (126)..(127): Xaa in position 126 to 127 is any amino acid
  Variant (129)..(129): Xaa in position 129 is any amino acid
  Variant (131)..(166): Xaa in position 131 to 166 is any amino acid
  Variant (167)..(184): Xaa in position 167 to 184 is any or no amino acid
  Variant (186)..(191): Xaa in position 186 to 191 is any amino acid
  Variant (192)..(197): Xaa in position 192 to 197 is any or no amino acid
  Variant (199)..(202): Xaa in position 199 to 202 is any amino acid
  Variant (203)..(207): Xaa in position 203 to 207 is any or no amino acid
  Variant (210)..(213): Xaa in position 210 to 213 is any amino acid
  Variant (215)..(227): Xaa in position 215 to 227 is any amino acid
  Variant (228)..(241): Xaa in position 228 to 241 is any or no amino acid
  Variant (243)..(259): Xaa in position 243 to 259 is any amino acid
HXLXXXXXXXXXSRSXRXXWLLEELXXXYXXXXXXRXXXXXXAPXXLXXXHPLGXXPXXXXXXXXXXXXXXXXXXXESGXIXXYXXXXXXXXXXXXXXXXXXXXXXXXXXXXXXXXXXXXXXXXHXXEXSXXXXXXXXXXXXXXXXXXXXXXXXXXXXXXXXXXXXXXXXXXXXXXXXXXXXXXLXXXXXXXXXXXXGXXXXXXXXXADXXXXFXXXXXXXXXXXXXXXXXXXXXXXXXXXPXXXXXXXXXXXXXXXXXA

SEQ ID NO: 90407 - protein, 16 aa, Artificial sequence
  protein pattern
  Variant (2)..(3): Xaa in position 2 to 3 is any amino acid
  Variant (4)..(6): Xaa in position 4 to 6 is any or no amino acid
  Variant (9)..(9): Xaa in position 9 is Ala, Gly or Ser
  Variant (10)..(10): Xaa in position 10 is any amino acid
  Variant (11)..(11): Xaa in position 11 is Arg or Ser
  Variant (12)..(12): Xaa in position 12 is Ala, Ile, Leu or Val
  Variant (13)..(13): Xaa in position 13 is any amino acid
  Variant (15)..(15): Xaa in position 15 is any or no amino acid
LXXXXXSRXXXXXWXL

SEQ ID NO: 90408 - protein, 17 aa, Artificial sequence
  protein pattern
  Variant (3)..(3): Xaa in position 3 is any amino acid
  Variant (4)..(4): Xaa in position 4 is Ala, Asp, Glu or Ser
  Variant (6)..(8): Xaa in position 6 to 8 is any amino acid
  Variant (11)..(11): Xaa in position 11 is any amino acid
  Variant (12)..(12): Xaa in position 12 is Glu or Gly
  Variant (13)..(13): Xaa in position 13 is any amino acid
  Variant (14)..(14): Xaa in position 14 is Ala or Ser
  Variant (16)..(16): Xaa in position 16 is Ile, Leu, Met or Val
  Variant (17)..(17): Xaa in position 17 is Ile, Leu or Val
APXXLXXXHPXXXXPXX

SEQ ID NO: 90409 - DNA, 1131 bp, Saccharomyces cerevisiae
  CDS (1)..(1131)
atgaccttggcacccctagacgcctccaaagttaagataactaccacacaacatgcatctaagccaaaaccgaacagtgagttagtgtttggcaagagcttcacggaccacatgttaactgcggaatggacagctgaaaaagggtggggtaccccagagattaaaccttatcaaaatctgtctttagacccttccgcggtggttttccattatgcttttgagctattcgaagggatgaaggcttacagaacggtggacaacaaaattacaatgtttcgtccagatatgaatatgaagcgcatgaataagtctgctcagagaatctgtttgccaacgttcgacccagaagagttgattaccctaattgggaaactgatccagcaagataagtgcttagttcctgaaggaaaaggttactctttatatatcaggcctacattaatcggcactacggccggtttaggggtttccacgcctgatagagccttgctatatgtcatttgctgccctgtgggtccttattacaaaactggatttaaggcggtcagactggaagccactgattatgccacaagagcttggccaggaggctgtggtgacaagaaactaggtgcaaactacgccccctgcgtcctgccacaattgcaagctgcttcaaggggttaccaacaaaatttatggctatttggtccaaataacaacattactgaagtcggcaccatgaatgcttttttcgtgtttaaagatagtaaaacgggcaagaaggaactagttactgctccactagacggtaccattttggaaggtgttactagggattccattttaaatcttgctaaagaaagactcgaaccaagtgaatggaccattagtgaacgctacttcactataggcgaagttactgagagatccaagaacggtgaactacttgaagcctttggttctggtactgctgcgattgtttctcccattaaggaaatcggctggaaaggcgaacaaattaatattccgttgttgcccggcgaacaaaccggtccattggccaaagaagttgcacaatggattaatggaatccaatatggcgagactgagcatggcaattggtcaagggttgttactgatttgaactga

SEQ ID NO: 90410 - protein, 376 aa, Saccharomyces cerevisiae
MTLAPLDASKVKITTTQHASKPKPNSELVFGKSFTDHMLTAEWTAEKGWGTPEIKPYQNLSLDPSAVVFHYAFELFEGMKAYRTVDNKITMFRPDMNMKRMNKSAQRICLPTFDPEELITLIGKLIQQDKCLVPEGKGYSLYIRPTLIGTTAGLGVSTPDRALLYVICCPVGPYYKTGFKAVRLEATDYATRAWPGGCGDKKLGANYAPCVLPQLQAASRGYQQNLWLFGPNNNITEVGTMNAFFVFKDSKTGKKELVTAPLDGTILEGVTRDSILNLAKERLEPSEWTISERYFTIGEVTERSKNGELLEAFGSGTAAIVSPIKEIGWKGEQINIPLLPGEQTGPLAKEVAQWINGIQYGETEHGNWSRVVTDLN

SEQ ID NO: 90411 - DNA, 1218 bp, Oryza sativa (japonica cultivar-group)
  CDS (1)..(1218)
atggagctccacctcacctcccgcggcgccctcccgctgtctccgccgctcgccggccagcggcgtcctcacctctctctctccacgccgtcgcttccgatcaagaatcacacttattcagtgccacctcctttctccaaggctcactgcgcgataggatgccaagcttctctagcaactaactacatggaaacctctgcggtggctgatttggactgggagaacctcggttttggccttgtccagacagattttatgtatattgcaaaatgcgggccagatgggaacttttccaaaggagaaatggtaccatttggacctatagaactgagcccatctgctggagtcttaaattatggacagggcttgtttgagggcttaaaggcatatagaaaaacagatggatacattctgctgtttcgtccggaggagaatgccataaggatgagaaatggtgcagagaggatgtgtatgcctgcaccaactcttgaacaatttgtggatgcagtaaagcaaaccgttttggcaaataaaagatgggtgcccccaaccggtaaaggctccctgtatataaggccgctgcttatgggaagtggagctgtccttggtcttgcacctgctcctgagtatacctttatgatttttgtctcccctgttgggaactatttcaaggaaggtttagcccctattaacttgattatagaagaaaactttcaccgtgctgcccctggtggaactggcggagtgaaaaccattggaaactatgcctcggtattaaaagcacagaggattgcaaaacagaaaggatattcagatgtcctctatctagatgccgttcacaagaaatatctggaagaagtgtcttcgtgcaatatctttattgtgaaaggcaatgttatttctactccagcaataaaaggaaccatactgcctggtataacaaggaaaagtattcttgaagttgctcagagaaaaggcttcatggttgaggagcgccttgtgtcagtggatgagcttcttgaagctgatgaagttttctgcacgggaacagctgttgtggtgtcccctgtggggagcataacttatctggggcaaagggtggaatatggcaaccaaggagtgggcgtggtgtgtcagcagctgtatacttcacttacaagcctccagatgggtcatgtggacgattgtatgggctggactgtggaactaaaccagtga

SEQ ID NO: 90412 - protein, 405 aa, Oryza sativa (japonica cultivar-group)
MELHLTSRGALPLSPPLAGQRRPHLSLSTPSLPIKNHTYSVPPPFSKAHCAIGCQASLATNYMETSAVADLDWENLGFGLVQTDFMYIAKCGPDGNFSKGEMVPFGPIELSPSAGVLNYGQGLFEGLKAYRKTDGYILLFRPEENAIRMRNGAERMCMPAPTLEQFVDAVKQTVLANKRWVPPTGKGSLYIRPLLMGSGAVLGLAPAPEYTFMIFVSPVGNYFKEGLAPINLIIEENFHRAAPGGTGGVKTIGNYASVLKAQRIAKQKGYSDVLYLDAVHKKYLEEVSSCNIFIVKGNVISTPAIKGTILPGITRKSILEVAQRKGFMVEERLVSVDELLEADEVFCTGTAVVVSPVGSITYLGQRVEYGNQGVGVVCQQLYTSLTSLQMGHVDDCMGWTVELNQ

SEQ ID NO: 90413 - DNA, 1248 bp, Oryza sativa (japonica cultivar-group)
  CDS (1)..(1248)
atggctgctgctgctgctgctgcgtcgtccgcgaagcgcgcgctcctcccgtgggcacgcgacgcccaccacgcgctggccagggccctgcagggatgcggcggcggcggcggcctcggtctccgcggggcgctcccgacggccggaggcaggtggtctctgctccagtgccggtggaggtcgtcgctgccgcagctcgactccgccgacaggtccgatgaggaaagcggcggcgaaatcgactgggacaacctggggttcgggctgacgccgaccgactacatgtacgtcatgcggtgctcgctggaggacggcgtcttctcccgcggcgagctcagccgctacggcaacatcgagctcagcccctcctccggcgtcatcaactacggccaggggctcttcgagggtctgaaggcgtacagggcggcgaaccaacaggggtcgtacatgctgttccggccggaggagaacgcgcggcggatgcagcacggcgccgagcgcatgtgcatgccgtcgccgtcggtggagcagttcgtccacgccgtcaagcagaccgtcctcgccaaccgccgctgggtgccaccgcaaggaaagggggcgctgtacatcaggccgctgctcatcgggagcggaccgattctcgggctggctcccgccccggagtacacgttcctcatctacgccgcaccggttggaacgtacttcaaggagggtctagcgccgataaaccttgtcgtagaggactcgatacaccgggccatgccgggcggcaccggcggggtcaagacgatcaccaactacgcgccggtgctcaaggcgcagatggacgccaagagcagagggttcactgacgtgctgtacctcgacgcggtgcacaagacgtacctggaggaggcctcctcctgcaacctcttcatcgtcaaggacggcgtcgtcgccacgccggccaccgtgggaaccatcctgccggggatcacgcgcaagagcgtcatcgagctcgccagggaccgcggctatcaggttgaagaacggctcgtctccatcgacgatctggtcggcgcagacgaggtgttctgcaccggaacagcggtggtcgttgccccagtatcgagtgttacttaccatgggcaaaggtacgagttcaggactggacatgacacgttatcgcagacactgcacacgactctgacgtccatccagatgggcctggctgaggacaagaaaggatggacagtggcaatagattaa

SEQ ID NO: 90414 - protein, 415 aa, Oryza sativa (japonica cultivar-group)
MAAAAAAASSAKRALLPWARDAHHALARALQGCGGGGGLGLRGALPTAGGRWSLLQCRWRSSLPQLDSADRSDEESGGEIDWDNLGFGLTPTDYMYVMRCSLEDGVFSRGELSRYGNIELSPSSGVINYGQGLFEGLKAYRAANQQGSYMLFRPEENARRMQHGAERMCMPSPSVEQFVHAVKQTVLANRRWVPPQGKGALYIRPLLIGSGPILGLAPAPEYTFLIYAAPVGTYFKEGLAPINLVVEDSIHRAMPGGTGGVKTITNYAPVLKAQMDAKSRGFTDVLYLDAVHKTYLEEASSCNLFIVKDGVVATPATVGTILPGITRKSVIELARDRGYQVEERLVSIDDLVGADEVFCTGTAVVVAPVSSVTYHGQRYEFRTGHDTLSQTLHTTLTSIQMGLAEDKKGWTVAID

SEQ ID NO: 90415 - DNA, 1233 bp, Oryza sativa (japonica cultivar-group)
  CDS (1)..(1233)
atggagctcctcccgcgtgtgggtgtggccgcccccggtcccggacgcggcggcgcgtcgccgtccccgacgcgccgtcatcgcgcgccctctcaccccattctgaagcgatcggcggcggtttgcggcgcagtcgccgtctgcagaggaggggctgtcgccaggaggagccggtggtcaactctggtgaccgcagcatattacacaggaactgctgaactggtcgactttaactgggaaactcttgggtttcaacccgtgccgactgactttatgtatgtgatgagatgttccgaggaaggggtgttcaccaagggtgaattggtgccatatgggccaatagaactgaacccagcagctggagtgttgaattatggtcagggtttacttgaaggtctgcgagcacatagaaaagaggatggatcagtccttctatttcgtcctgatgaaaatgctttacggatgagagtaggcgcagaccggttatgtatgcctgcaccaagtgtagagcagttcctagaagctataaagctaacaattttagcaaacaagcgctgggtaccccctactggcaaaggttctttatatatcagaccgctgctgattggaagtggggctatcctcggtgttgcaccagccccagagtacacatttgttgtctttgcttgcccagttgggcactattttaaggatggcttatctccaatcagcttgttaaccgaggaagaatatcagtgtgcggcaccaggtggaactggtgatataaagactatcggaaattatgcttcagccgtttatgctaaagaaagagctaaggagagaggtcattctgatgttctttacttggatccagtgcataaaaagtttgttgaggaactttcgtcctgtaatatattcatggtgaaggacaacattatttctactccactattaacgggaacagttcttcctggcatcacaagaagaagtataattgaatacgcccgtagccttggatttcaggttgaagagtgtcttattacaatagatgagttgcttgacgctgatgaagttttctgtactggaacttctgtggtactatcctctgttggttgcatagtgtaccaggggagaagagtggagtatgggaaccagaagttcagaactgtgtctcagcaactctattcagcacttacggctatccagaaaggcctcgtggaggacagtatgggatggactgtgcaactgaattag

SEQ ID NO: 90416 - protein, 410 aa, Oryza sativa (japonica cultivar-group)
MELLPRVGVAAPGPGRGGASPSPTRRHRAPSHPILKRSAAVCGAVAVCRGGAVARRSRWSTLVTAAYYTGTAELVDFNWETLGFQPVPTDFMYVMRCSEEGVFTKGELVPYGPIELNPAAGVLNYGQGLLEGLRAHRKEDGSVLLFRPDENALRMRVGADRLCMPAPSVEQFLEAIKLTILANKRWVPPTGKGSLYIRPLLIGSGAILGVAPAPEYTFVVFACPVGHYFKDGLSPISLLTEEEYQCAAPGGTGDIKTIGNYASAVYAKERAKERGHSDVLYLDPVHKKFVEELSSCNIFMVKDNIISTPLLTGTVLPGITRRSIIEYARSLGFQVEECLITIDELLDADEVFCTGTSVVLSSVGCIVYQGRRVEYGNQKFRTVSQQLYSALTAIQKGLVEDSMGWTVQLN

SEQ ID NO: 90417 - DNA, 1230 bp, Oryza sativa (japonica cultivar-group)
  CDS (1)..(1230)
atggagtacggtgcagcaacgcgtggcgcgctcctcgcggccgccccgctctccggcgcccggcgtagctggttgcccctctcatcgccgccgtcgccgccctctattcagattcagaatcgactttattcgatatcgtcgcttccactaaaggctcgaggcgtgagaagatgcgaggcttctctagcaagtgactacacgaaggcatctgaggtagctgatttagattgggagaaccttggttttggaatcgtgcagaccgactacatgtatatcacaaaatgcggacaggacgggaatttttctgagggtgaaatgattccatttggacctatagcgctgaacccatcttctggagtccttaattacggacagggattatttgaaggtctaaaagcatatagaacaacagatgactctatcttattatttcgcccggaggaaaatgcactgagaatgagaacaggtgcagaaagaatgtgcatgcctgcgcctagtgttgagcagtttgtggatgcagtaaagcaaactgttttagcaaacaagagatgggtgcctcctaccggtaaaggttctttgtatattagaccgctactcatgggtagtggtgctgttcttggtcttgcacctgctcctgagtatacgttcattatatttgtctcgcctgtggggaactactttaaggaaggtttagctccaataaatttgatagttgaagataagtttcatcgtgcaacccctggtggaactggaagtgtgaagaccataggaaattatgcctcggtcttgatggcacagaagattgcaaaagaaaagggctattctgatgttctctacttggatgctgttcacaaaaagtatcttgaagaagtttcttcatgtaatatttttgttgtcaagggcaatgtcatttcaactccagcagtaaaaggaacaatattgccaggcatcacaaggaaaagtatcattgatgttgctctgagcaagggtttccaggtcgaggagcgacttgtgtcagtagatgagctgcttgaagctgatgaggttttctgcacaggaactgctgtcgtagtgtctcctgtgggtagtattacctatcaagggaaaagggtcgaatatgctggcaacaaaggagttggtgtcgtgtctcagcagctatatacttcattaacaagcctgcagatgggccaggcagaagattggctagtctggactgtgcaactgagttag

SEQ ID NO: 90418 - protein, 409 aa, Oryza sativa (japonica cultivar-group)
MEYGAATRGALLAAAPLSGARRSWLPLSSPPSPPSIQIQNRLYSISSLPLKARGVRRCEASLASDYTKASEVADLDWENLGFGIVQTDYMYITKCGQDGNFSEGEMIPFGPIALNPSSGVLNYGQGLFEGLKAYRTTDDSILLFRPEENALRMRTGAERMCMPAPSVEQFVDAVKQTVLANKRWVPPTGKGSLYIRPLLMGSGAVLGLAPAPEYTFIIFVSPVGNYFKEGLAPINLIVEDKFHRATPGGTGSVKTIGNYASVLMAQKIAKEKGYSDVLYLDAVHKKYLEEVSSCNIFVVKGNVISTPAVKGTILPGITRKSIIDVALSKGFQVEERLVSVDELLEADEVFCTGTAVVVSPVGSITYQGKRVEYAGNKGVGVVSQQLYTSLTSLQMGQAEDWLVWTVQLS

SEQ ID NO: 90419 - DNA, 1077 bp, Bacillus halodurans C-125
  CDS (1)..(1077): transl_table=11
atgattgatacggggcttcggatcgaacgatcaagtaatccaaagcaaaaaccagatccagagcagctgagttttggaaaagtatttaccgatcacatgtttgtgatggattatacagaggaaaaagggtggcacgacccaagaattgtcccatacggatcgattacgcttgatcccgccgcgatggtgttccattatggacaaacggtgtttgaagggttgaaggcttatcgtacaaacgatgatcgcattttgttgtttcgcccagaaaaaaacatccagcgtttgaatcgctcctgtcatcgtattagcatcccgcaaattccagaagaggcagccatcgactatttagtgaagcttctccaagttgatcgcgattgggttccgtccgctgaaggtacctcgctttatattcgtccgttcgtctttgcgaatgaaatcaacttatcagcggttccgtcaaccgaatacacctttatgattattttgtcaccggttggttcctattataaagaaggcattcaacctgtaaacatctacgtagaagatgagtttacgagagccgtgcgcggaggaacaggaacggccaagaccggaggaaattattcagcttcgtacatcgctcaagaaaaagcggcggaaaaaggatatgcacaagtaatgtggcttgatgggattgagaaaaagtacattgaagaagttggcagcatgaacgttttctttaaaattgatggtgaaattgtgacgccaattttaaacggcagcattttagagggtgtcacgcgtatgtcgatcatcgaactgcttcgtgattggggctatcctgttgcggaacgtaaaatctcgatggaagaattgtttgcagcctacgaaaaagggaagcttgaggaagcttttggtacaggaaccgccgctgttgtttcgccgattggccagcttaattggaaagagcatcagatggtgattaatgataaacgtattggcgagttatcgaaaaagttgtacgatacgttgacaggtattcaacgcggtcagctacctgatccgtttaattggaaccgagaagtgaacgaatag

SEQ ID NO: 90420 - protein, 358 aa, Bacillus halodurans C-125
MIDTGLRIERSSNPKQKPDPEQLSFGKVFTDHMFVMDYTEEKGWHDPRIVPYGSITLDPAAMVFHYGQTVFEGLKAYRTNDDRILLFRPEKNIQRLNRSCHRISIPQIPEEAAIDYLVKLLQVDRDWVPSAEGTSLYIRPFVFANEINLSAVPSTEYTFMIILSPVGSYYKEGIQPVNIYVEDEFTRAVRGGTGTAKTGGNYSASYIAQEKAAEKGYAQVMWLDGIEKKYIEEVGSMNVFFKIDGEIVTPILNGSILEGVTRMSIIELLRDWGYPVAERKISMEELFAAYEKGKLEEAFGTGTAAVVSPIGQLNWKEHQMVINDKRIGELSKKLYDTLTGIQRGQLPDPFNWNREVNE

SEQ ID NO: 90421 - DNA, 1332 bp, Drosophila melanogaster
  CDS (1)..(1332)
atgacgaccaaaatggcaattaacgcaaaggatattttccgcaatcagcatcgcctgatccgcttcctcgagcagtcgatccggttgtgcagcaaccagtctctgaaagccgcccaagcggcacagttgcaacagaaatcgtcggcggacttcgagatcaccgcctcgctggacgcccaatacaccagtgccccggagcccattaagcatgacaagaatctgggtcatcagttccgtgcctcacagatttccgtgcgactggccgcaccggagcaactgcagcccaagccggacaacgatgaggaattgggtttcggccgcctattcaccgatcacatgctcaagatctactaccacaagagtttgggcggatggcagcgaccggagattacgccgctggagaatctagtgatgcatcccgccgccaaggtcctgcactacgccgttgagctctttgagggcatgaaggcgtaccgcggcgtcgatggcaagatccgcatcttccggccggacatgaacatgaaccgcatgaacctggccgcccagcgatccggtctgcccaccttcgagggcaaggagttcgtccagtgcctgtcccgcctgctgtccattgattccgagtgggttcctcacacggacaccgccagcttgtacatccgccccacactgatcggcattgatcccacactgggagttgcttcctccgactcggccctgctctacacgatcctcagccccgtgggcagttactttaagacaggctcgtccggtgccgtctccctgctggccgatcccagttatgttcgtgcctggccaggcggcgtgggcaatcgcaaaatgggctccaactacgcacccacaatcaatgtgcagaaggaggcggccgccaagggactgcagcaggtgctgtggctctacggcgaggatcatcagctaaccgaagtgggcaccatgaacatctttatgttcttcgtgaacgatcaaggagaacaagaactggttaccccaccgctgagcggtctaatcctgcccggtatcacccgcgactccatcctgcgcatgacccgccagtggggcaagtttaaggttagcgaggcgaacatcaccatgcccatggtctgtgagctcctcaaccagggaaggctgctggagctctttggtgcgggaacggcgtgcgtggttagccccgtgaacaggatcagctaccttggccaggatctgtatatacccaccatggagcaggagaagcccgttcacgagctgatccgcgaaacgctcaccgacattcagtacggtcgggtggatcatccgtgggcggtggtgatcgactaa

SEQ ID NO: 90422 - protein, 443 aa, Drosophila melanogaster
MTTKMAINAKDIFRNQHRLIRFLEQSIRLCSNQSLKAAQAAQLQQKSSADFEITASLDAQYTSAPEPIKHDKNLGHQFRASQISVRLAAPEQLQPKPDNDEELGFGRLFTDHMLKIYYHKSLGGWQRPEITPLENLVMHPAAKVLHYAVELFEGMKAYRGVDGKIRIFRPDMNMNRMNLAAQRSGLPTFEGKEFVQCLSRLLSIDSEWVPHTDTASLYIRPTLIGIDPTLGVASSDSALLYTILSPVGSYFKTGSSGAVSLLADPSYVRAWPGGVGNRKMGSNYAPTINVQKEAAAKGLQQVLWLYGEDHQLTEVGTMNIFMFFVNDQGEQELVTPPLSGLILPGITRDSILRMTRQWGKFKVSEANITMPMVCELLNQGRLLELFGAGTACVVSPVNRISYLGQDLYIPTMEQEKPVHELIRETLTDIQYGRVDHPWAVVID

SEQ ID NO: 90423 - DNA, 1086 bp, Xanthomonas axonopodis pv. citri str. 306
  CDS (1)..(1086): transl_table=11
gtgtccgtgtccttcgcttccacccgttctccgtcgccgcgcagcgccgacgaattgtccgtgatcctggctgcgcccggtttcgggttgcatttcaccgaccacatggtcgccatctcctggaacaacgagcagggctggcacgacgcgcaagtgcgcgcgtacggcccgctgcagctggatccggcagcgtcggtgctgcattacgggcaggagatcttcgaaggcatcaaggcctaccggcacgccgacggctcgatctggaccttccgtccgcaagccaacggcgagcgcctgcagcggtcggcgcgccgtctggcgctgccggaattgccggtggacctgttcgtggaatcgctgcgccagctggtggccgtggatggcggctgggtgccgtcggcgccggagaccagcctgtatttccgcccgttcatgattgccgatgaggccttcctgggcgtgcgcgcggcgcacaaggcctcgtattacgtgatcgccagcccggccggcccgtacttcgccaagggcgtggcgccggtgtcgatctggctgtccaccgaatacgcacgtgcggccaagggcgggaccggcgcggccaaatgcggcggcaattacgccgcgtcgctgctgccgcagcagaaggcctatgcccagggctgctcgcaggtgttgttcctggacccggtggaaggcaagtacatcgaagaactcggcggcatgaacgtgttcctggtctacaaggacggcacgttggtgaccccggaactgtccggcagcatcctggaaggcatcacccgcgacagcatcctgcaactggcccgcgaccgtggcatgcaggtgatcgagcgcaaggtcgcgatcgacgaatggaagcagggcgtggcctccggcgagatcaccgaggtgttcgcctgcggtacggcggcggtggtgacccccatcggcgagctgaagggcgaggggttcgcggtgggcgatctgtccgcgccagcgggccaggtgaccatgtcgctgcgccaggaactgaccgatatccagtacggccgcgtgccggaccgccacgggtggttggtgcgtttgtcgtaa

SEQ ID NO: 90424 - protein, 361 aa, Xanthomonas axonopodis pv. citri str. 306
MSVSFASTRSPSPRSADELSVILAAPGFGLHFTDHMVAISWNNEQGWHDAQVRAYGPLQLDPAASVLHYGQEIFEGIKAYRHADGSIWTFRPQANGERLQRSARRLALPELPVDLFVESLRQLVAVDGGWVPSAPETSLYFRPFMIADEAFLGVRAAHKASYYVIASPAGPYFAKGVAPVSIWLSTEYARAAKGGTGAAKCGGNYAASLLPQQKAYAQGCSQVLFLDPVEGKYIEELGGMNVFLVYKDGTLVTPELSGSILEGITRDSILQLARDRGMQVIERKVAIDEWKQGVASGEITEVFACGTAAVVTPIGELKGEGFAVGDLSAPAGQVTMSLRQELTDIQYGRVPDRHGWLVRLS

SEQ ID NO: 90425 - DNA, 1095 bp, Oceanobacillus iheyensis HTE831
  CDS (1)..(1095): transl_table=11
atggaagaacaaacaattcgcgtacaacgaagtgaaacaaagaaagaaaaacctcagtctgatcagttgattttcggaagatcttttacggatcatatgtttgtcatggattactctgatcctttgggatggcataatgcgagtattgtaccatatcaaccattgtcgattgatccatcttcaatgattttccattatggtcaatctgtttttgaaggattaaaggcatttcgtactgagagcggagatattcaattattccgtgcggaaaaaaaccttgagcgtttaaatcgttcaaatgaccgtctatgtattccgcaaatcgatgaggagttcacactaaaagcaattaaacagttaatttccatcgaaaaagattgggtaccaagtgcagaaggaacatccctttatattcgtccttttattatttcaacagaggcttatattggggtcgcaccatcgatgaattataagttgatcgtcattttatctccagtaggtgcttactacaaagaaggaataaacccagtcaaaattgctgttgaagatcactatgtacgaacggtgaaaggtggtactggtgaagcaaaaactggtggaaactatgcatcaagtctaaaagcacaagaaattgtagcgaaacaaggatttgcacaagtgctttggttagatggtgtcgagaaaaagtatattgaagaagtcggcagtatgaatgtcttcttcaaaattaatggagaagttgttactcctcaattaaacggaagtattctttcaggagtaactcgtagctctgtcattgaattattaaaacattggggtgtacctgtatctgaaaagcgcatttccattcaggatttataccaagcttatttagatggtgagctagaagaagcttttggatccggtacagctgctgtaatttctccaattggtcaacttacttgggaaggcaaagatatgatcgtcaacaatggggaaactggtgaactctctaaacgcatatacgatacaattactggcattcaatatggtcatttagatgatccattccaatggattcaagggattgaagcaaagagtcccgtaaaacattga

SEQ ID NO: 90426 - protein, 364 aa, Oceanobacillus iheyensis HTE831
MEEQTIRVQRSETKKEKPQSDQLIFGRSFTDHMFVMDYSDPLGWHNASIVPYQPLSIDPSSMIFHYGQSVFEGLKAFRTESGDIQLFRAEKNLERLNRSNDRLCIPQIDEEFTLKAIKQLISIEKDWVPSAEGTSLYIRPFIISTEAYIGVAPSMNYKLIVILSPVGAYYKEGINPVKIAVEDHYVRTVKGGTGEAKTGGNYASSLKAQEIVAKQGFAQVLWLDGVEKKYIEEVGSMNVFFKINGEVVTPQLNGSILSGVTRSSVIELLKHWGVPVSEKRISIQDLYQAYLDGELEEAFGSGTAAVISPIGQLTWEGKDMIVNNGETGELSKRIYDTITGIQYGHLDDPFQWIQGIEAKSPVKH

SEQ ID NO: 90427 - DNA, 1083 bp, Bradyrhizobium japonicum USDA 110
  CDS (1)..(1083): transl_table=11
atgagcatgaaattcgacatccagcccgcatccaatcctactccagaaaaggaccgcgtcgccaagctggtggaccccggcttcgggcgggtcttcaccgaccacatggcgatcgtccgttacaaccaggccaagggcggctggtacgaggcgcgcatcgaggcgcgcgccaacttccagctcgatccggccggcgccgtcctgcactacgcccaggaaattttcgagggcctcaaggcctacaagcgcgacgacggcggcgtgaacctgttccgccccgacgccaatgcgcggcgcttcagggactcggccgatcgcatggcgatggcgcagctgcccgaagacgtcttcatcgaggcggtcgagcaggtcgtgcgcatcgatcgcgcctggatgccgggcggcgagggcagcctttacctgcgccccttcatgatcgcgagcgagaccttcctcggcgtcaagccgtcgtccgaatacatcttcgcggtgatcgcctcaccggtcggctcctatttcaagggcggacctgcgccggtgtcgatctgggtctcggagaactacacgcgcgccgcggtcggcggcaccggcgccgtcaagtgcggtggcaattacgccgcgagtctgcgtgcgcaggcggaagccattcagcacggctgcgatcaggtggtcttcctcgatgcgatcgagcgccgctacgtcgaggagctcggcggcatgaacatcttcttcgtgttcgaggacggctcgttgtcgacgccgccgctcggcacgatcctgcccggcatcacccgcgactccatcatcgcgctggcgaaggatgccggcaagacggtgcgcgaggagccgtactcgctcgaccagtggcgcaaggatgcggccagcggcaagctgaaggaagcgttcgcctgcggcaccgcggcggtgatctcgccgatcggcaaggtgcgctcggtgagcggcgatttcgagatcagcggcggcgtcgccggcccggtcgccatgggcctgcgcaagcagctcgtcgacatccagtacggccgcaccaacgatccccacaactggatccgcaaggtgttttga

SEQ ID NO: 90428 - protein, 360 aa, Bradyrhizobium japonicum USDA 110
MSMKFDIQPASNPTPEKDRVAKLVDPGFGRVFTDHMAIVRYNQAKGGWYEARIEARANFQLDPAGAVLHYAQEIFEGLKAYKRDDGGVNLFRPDANARRFRDSADRMAMAQLPEDVFIEAVEQVVRIDRAWMPGGEGSLYLRPFMIASETFLGVKPSSEYIFAVIASPVGSYFKGGPAPVSIWVSENYTRAAVGGTGAVKCGGNYAASLRAQAEAIQHGCDQVVFLDAIERRYVEELGGMNIFFVFEDGSLSTPPLGTILPGITRDSIIALAKDAGKTVREEPYSLDQWRKDAASGKLKEAFACGTAAVISPIGKVRSVSGDFEISGGVAGPVAMGLRKQLVDIQYGRTNDPHNWIRKVF

SEQ ID NO: 90429 - DNA, 1089 bp, Streptomyces avermitilis MA-4680
  CDS (1)..(1089): transl_table=11
atgacgacgcccacgatcgagctcaagccctccgccagtccgctctccgacgcggagcgcgaggcgatcctggccagccccggattcggccgccacttcaccgaccacatggtgacgatcaagtggacggagggacgcggctggcacgacggccagctcgttccgtacgccccgctctccctcgacccggccaccatggtcctgcactacgcgcaggagatcttcgagggcctgaaggcgtaccgccagcccgacggctcggtggcctccttccgccccgacatgaacgccaagcgcttccaggcctcggcccgccgcctcggaatgccggagctgccggtcgagacgttcatcgaggcgtgcgacgtgctggtccagcaggacgcgtcgtgggtgccggcgcacggcggcgaggaatccctctatctgcgcccgttcatgatcgcgaccgaggtcggcctgggcgtgaagcccgccaacgagtacctcttcctcgtcatcgcgtccccggcgggcgcgtacttcccgggcggcgtgaagccggtctcgatctggctctccgaggaccgcgtgcgcgccgtccccggcggcatgggtgacgccaagaccggcggcaactacgccgcgtcgctgctcgcgcaggccgaggccgccgagaagggctgcgcccaggtcgcgtacctcgacgcggtcgagcacaagtgggtggaggagctcggcggcatgaacctgtacttcgtgtacgggaacaagatcatcacgcccgccctgaccggctccctcctcgcgggcgtcacccgcgactccctgctctcggtcgcccgtgacctgggctacgagtccgaggagggccgcgtctccatcgaccagtggcaggccgacaccgagaacggcacgctgaccgaggtcttcgcctgcggtacggccgcggtcatcacgccggtcggcacggtcaagcgcagcagcgccgagtggcagcactcgggcggtgagccgggcgaggtcaccctgaagctgcgcgaggccctcctcgacatccagcgcggcatcggcgaggacaagcacggctggatgcacccgctgggctag

SEQ ID NO: 90430 - protein, 362 aa, Streptomyces avermitilis MA-4680
MTTPTIELKPSASPLSDAEREAILASPGFGRHFTDHMVTIKWTEGRGWHDGQLVPYAPLSLDPATMVLHYAQEIFEGLKAYRQPDGSVASFRPDMNAKRFQASARRLGMPELPVETFIEACDVLVQQDASWVPAHGGEESLYLRPFMIATEVGLGVKPANEYLFLVIASPAGAYFPGGVKPVSIWLSEDRVRAVPGGMGDAKTGGNYAASLLAQAEAAEKGCAQVAYLDAVEHKWVEELGGMNLYFVYGNKIITPALTGSLLAGVTRDSLLSVARDLGYESEEGRVSIDQWQADTENGTLTEVFACGTAAVITPVGTVKRSSAEWQHSGGEPGEVTLKLREALLDIQRGIGEDKHGWMHPLG

SEQ ID NO: 90431 - DNA, 1074 bp, Geobacter sulfurreducens PCA
  CDS (1)..(1074): transl_table=11
atggaaatcagagttgcaccacttcccgctgagcagaagaagcacaaggccactgacgaaacagctctaggctttggtcgtctttttaccgaccggatgcttgttgccgaatggaaagtcgggcagggctgggtcgatgcgcgaattgagccctatgctccgttttcgctggatcctgcctgtgcggtatttcactatgcccaggagatttttgaaggactcaaggcgtataagtgggcggatggttccatagcactctttcgccctgaaatgaatgcccgccgcttcaatcattcagcagagcgtctctgcatgcccgaggtgccggaagatcttttcatcggcggcatcgagcaactggtggcgctcgagcgcgactggataccggcctccgcggggacttccctgtatatccgccccgcaatgattgccgtggagccggctctcggcgtgaaacctgccgatcattactacttttttgtgattctttcaccggtgggcgcctattacgcctctggattcaatccggtgaaaatcatggtggaagaccagtatgtccgcgccgtgcccggcggcaccggtgaagccaagacaggcggcaattatgcttcgtcgctcagggccggccttgaggcaaaaaagaaggggtttgaccaggtcctctggcttgacggggtccaccgtcgctacatcgaggaggttggggctatgaatatgctgtttgcctacggcaagaccatagtcacctcgcctctcacgggcaccattctgaacggcgttacccgcgactcggttctgaaactggccgcgagccgcggttacaccattgaagagcggttgattgacgtgaacgatctcatggccgatattcgtgccggcaaggtgaccgaggctttcggcagtggcactgccgctgtcgtcagtcccgttggaatcctggcgtacaagggcgagagcgtgaccgtaggcgacggtggcgtagggccgatcacccgggaactctatgatacccttaccggcatccagacgggccggattcccgacaccttcggctggacccgcaaaattgcctga

SEQ ID NO: 90432 - protein, 357 aa, Geobacter sulfurreducens PCA
MEIRVAPLPAEQKKHKATDETALGFGRLFTDRMLVAEWKVGQGWVDARIEPYAPFSLDPACAVFHYAQEIFEGLKAYKWADGSIALFRPEMNARRFNHSAERLCMPEVPEDLFIGGIEQLVALERDWIPASAGTSLYIRPAMIAVEPALGVKPADHYYFFVILSPVGAYYASGFNPVKIMVEDQYVRAVPGGTGEAKTGGNYASSLRAGLEAKKKGFDQVLWLDGVHRRYIEEVGAMNMLFAYGKTIVTSPLTGTILNGVTRDSVLKLAASRGYTIEERLIDVNDLMADIRAGKVTEAFGSGTAAVVSPVGILAYKGESVTVGDGGVGPITRELYDTLTGIQTGRIPDTFGWTRKIA

SEQ ID NO: 90433 - DNA, 1068 bp, Bdellovibrio bacteriovorus HD100
  CDS (1)..(1068): transl_table=11
atgaccacaattacgaagaatctaaccaacactccgaaagcccttccaccctctgatcagcttggattcgggcagcatttttctgaccacatgtttgtggctaaatacactgaaggcaagggctggtctgaagccagcgtcgtcccttatgggccgctttctttggatcccggggcttcggtgtttcattatggtcaggctttgtttgaaggcatgaaggccttccgcaaagaaagcggcgaagtggtcttcttccgtcctgagttcaattatcaccgtttggctgaaggcgctgctcgtttgtgcctggaagctccgccaatggaccttttcatggaaggtctgcaccaggtggtggcggctgatgagcgctggattccaaaagggccgaacacgtctttgtatatccgtccgaccttgattgggtctgagccgttcctgggggttcgtccttcccgtgaaacgttgttctttattctgttgtctccggtgggttcttattattctgaaggcacaaaaccaatcaagatttggaccgaggaaaagtacctccgtgcagctccagggggcctgggtgcggtgaaggccggggcgaactatgcctcgagtttaaaggcggccttggaagccaagaagaagggctatgcccaagttctgtggctggatgtcgagcaccagggtattgaggaggtcggcacaatgaacgtgttcttcgtcttcgataatgaaatcgtcacgccggcattgaatggcagcattctttctggtggcacccgcgatgcgattctgcagttgttgcgctctaaaaatctgccagtggtggaaagacgtatcacgatcacggaagtggtggatcgtctggcaaaaggtgaattgaaagaagctttcggcacgggtacggcggcggtgatttccccagtgggtgttttgcactatcaggggaaagactggacaatcaacaacaacgaaaacggacctctgagcacacagttgtacaacgagataacggcgatccagcgtggcgctcaagccgataccttgaactggcttgttcctttgaagaagtaa

SEQ ID NO: 90434 - protein, 355 aa, Bdellovibrio bacteriovorus HD100
MTTITKNLTNTPKALPPSDQLGFGQHFSDHMFVAKYTEGKGWSEASVVPYGPLSLDPGASVFHYGQALFEGMKAFRKESGEVVFFRPEFNYHRLAEGAARLCLEAPPMDLFMEGLHQVVAADERWIPKGPNTSLYIRPTLIGSEPFLGVRPSRETLFFILLSPVGSYYSEGTKPIKIWTEEKYLRAAPGGLGAVKAGANYASSLKAALEAKKKGYAQVLWLDVEHQGIEEVGTMNVFFVFDNEIVTPALNGSILSGGTRDAILQLLRSKNLPVVERRITITEVVDRLAKGELKEAFGTGTAAVISPVGVLHYQGKDWTINNNENGPLSTQLYNEITAIQRGAQADTLNWLVPLKK

SEQ ID NO: 90435 - DNA, 1215 bp, Magnaporthe grisea 70-15
  CDS (1)..(1215)
atggcgccttctatgctgcgttcaattctgaggtcgtcgccatcggcggcacgccggtggtcaagacattacagtgtcaaggcagaggtcgcctcgaccgcccagcccaaagacattgaacctgcacagctaaagatcaccaagactagcaagcctggtgtgttggacaagcccgaaaacctcctctttggcaggaaattctcagaccacatgattacttgcgagtgggaacaaaccaatggatggcaacaaccgcagatcgtcccgtaccaaaatctttccatggacccggctacatgcgtcctccactacgcgtttacgtgcttcgagggtatgaaggcctacaaggataagtccggccaggtgcgcctgttccgtccggataagaacatggagcgcttcaacaagtcggctgcgcgtattgctctgccaaactttagctcgcccgctcttatcgacattatctcgcagtacgccaagctcgaatcacgtttcatccccgaccagcgcgggttttcgctttacctgcgcccgaccatgataggtacgcaaaagacgctcggtgtcagccctcccgggtccgcgatgcttttcgtcattgcaagccccgtgggcccctattacccgacgggattcaaggccgtttcgctcgaggcgaccgattacgccgtgcgcgcctggcccggcggtgccggcgacaagaagctcggcgcaaattacgcgccctgcattgtgcctcagcgcgaggccatggctaggggtttccagcagaacctgtggctttttggcgaagaggagtacgttaccgaggtcggtactatgaatatgtttgtcgccattaaaaacaagcagacgggccaaaaggagctccttacggcgcccctggacggtactatcctcgagggcgtaacgcgcgattccatcctggccctggcccgcgagaggctcgtgccggagggctgggctgtctctgagcgaaagttcaccatgaaggagctgcacgaggcctcgaccgagggcaggttgattgaggctttcggttccggtaccgccgctatcgtcagccccgtccgctcgattgcgtggaagggcaagcttgtccactgcggtcttcaggatcacgaggagtcgggagagatcgccatgaggatgaagggatggatagagagcatccagtacggcgacgaggaccacgagtggagtcacgtgtgctga

SEQ ID NO: 90436 - protein, 404 aa, Magnaporthe grisea 70-15
MAPSMLRSILRSSPSAARRWSRHYSVKAEVASTAQPKDIEPAQLKITKTSKPGVLDKPENLLFGRKFSDHMITCEWEQTNGWQQPQIVPYQNLSMDPATCVLHYAFTCFEGMKAYKDKSGQVRLFRPDKNMERFNKSAARIALPNFSSPALIDIISQYAKLESRFIPDQRGFSLYLRPTMIGTQKTLGVSPPGSAMLFVIASPVGPYYPTGFKAVSLEATDYAVRAWPGGAGDKKLGANYAPCIVPQREAMARGFQQNLWLFGEEEYVTEVGTMNMFVAIKNKQTGQKELLTAPLDGTILEGVTRDSILALARERLVPEGWAVSERKFTMKELHEASTEGRLIEAFGSGTAAIVSPVRSIAWKGKLVHCGLQDHEESGEIAMRMKGWIESIQYGDEDHEWSHVC

SEQ ID NO: 90437 - DNA, 1260 bp, Magnaporthe grisea 70-15
  CDS (1)..(1260)
atggctcctccggccgccatcacaccggtcacccccggcactcccgagcccagcctcaacaagggcgggccagacaccaacctgaccgccgccgccatcggtcacaagatgtcacaggcctccgagtaccaggaactcgacgcatccaagctcatctacaacctcaccactagcccaagggcccttccggactacgacacggccgccgccggctccgagaccgtctgcaccgaccacatggtgacggcgaactggcatgcagccacgggctggtccgccccgacaatcaagccctacggacccctcagcctcatgcccactgcctcagtcctccactacgccaccgagtgcttcgagggcctcaaggcctaccgcggctacgacggcaagctgcgcctgttccgcccggaccgcaacgccaaccgcatgctcatgtcgtcggtgcgcatcgccctcccttccttcccgcccgaggccctcgagaagctcctcattgccctcatggccgttgacggacccaagtggctgccgcgcgagaggcccggcaccctgctgtacctccgccccaccatgatcggcacccaggcccagctgggcgtgcaggcccccaaccaggccatgctcttcatcacggcctcctacttccccaccatggactctcccgccggcggcatgcgcctgcacacctcgcccgaggacatggtgcgcgcctgggtcggcggcttcggctacgccaaggtcggcgccaactacggcccctcgcttctggccaccaaggaggccaagtccaggggtttccaccagatcctgtggctgtacggacccgagggttactgtaccgaggccggcgccagcaacttcttcgtgctcatgaagaacaagcagacgggccgcctcgaaatcgtcaccgccccgctcgacgacagggtcatcctcggcggtattacccgtatgagcgtcctggagctggcgaggtcgaggctcggagacgaggttgacgtcgtcgagcgccgctacaccatcgatgaggtttttgaggcctatgccgagggtcgcatcgttgagtcgtttgcgtctggaactgcttattttgtctgccccatctccttgatccaccaccgcggcaaggaggtctcaattcccatgggcgaagacggccagggtggcaagtacactctcaagctgaagcagtggctcaaggacatcatgtatggcaacgagcagcacgagtggggagttgtcgttccagaggagcagtaa

SEQ ID NO: 90438 - protein, 419 aa, Magnaporthe grisea 70-15
MAPPAAITPVTPGTPEPSLNKGGPDTNLTAAAIGHKMSQASEYQELDASKLIYNLTTSPRALPDYDTAAAGSETVCTDHMVTANWHAATGWSAPTIKPYGPLSLMPTASVLHYATECFEGLKAYRGYDGKLRLFRPDRNANRMLMSSVRIALPSFPPEALEKLLIALMAVDGPKWLPRERPGTLLYLRPTMIGTQAQLGVQAPNQAMLFITASYFPTMDSPAGGMRLHTSPEDMVRAWVGGFGYAKVGANYGPSLLATKEAKSRGFHQILWLYGPEGYCTEAGASNFFVLMKNKQTGRLEIVTAPLDDRVILGGITRMSVLELARSRLGDEVDVVERRYTIDEVFEAYAEGRIVESFASGTAYFVCPISLIHHRGKEVSIPMGEDGQGGKYTLKLKQWLKDIMYGNEQHEWGVVVPEEQ

SEQ ID NO: 90439 - DNA, 1224 bp, Gibberella zeae PH-1
  CDS (1)..(1224)
atggctccctccgccgtcgaaacccaggacgtcaacctgacagccgcagccatccacaagaaagaagtcgcccagcccaccaccaccacacaagctcccctcgacgcttcaaagctcacatacacctacacccaaaaccctcgctccgttcccgatgaagcaaacgcccactccggcgacgagaccatcgccaccgaccacatggtcctcgccgcctggaagcaatccaccggctgggccgctcctgaactcaagccctacggccccctgagcctcatgcccaccgcttccgttcttcactacgctaccgagtgcttcgagggcctcaaggtgtaccgcggctacgatggaaagctgcgaattttccgtcctgaccgcaacgccgctcgtcttcgcatgtcgtccacccgtatttctcttcccagctttgagccctcagagatcgagaagctcatgatttctctcctctccgttgacggaaccaagtggctccccgccgaccgcgcaggaagcttcctgtacatccgccccaccgtcattggaactgctccccagcttggcgtttctgctcccaaggaagctctcctgtacatcattgtgactttcatgccacgcatggacgctccccccggcggaatgcgcctgcacacatccccagacgacatggtgcgcgcctgggtcggcggtttcggttacgccaaggtgggcgccaactacggcccctctctgctcgccacagcagatgcgcgaacccgtggattccaccagattctctggctgtacggatctcagggcgagtgtactgaggctggcgccagtaactttttcgttgtgtggaagcgaaaggacggcaagaaggagatcatcactgctcctcttgacgacaagctgatccttgatggtgttacccgtcgcagctgtctggaactgatccgtgagcgtcttggtgacgagtatgagattactgagcgaaagtacaccatctctgaggtcatggaggctgatgctgagggtcgtctgctcgagtctttcgccgctggcactgcctacttcatctgccccatttctcagatccaccaccgcggaaaggacatcaacatccccatgggcgccgagggcgaggccggtgaggtgaccagcaaggtcaagggctggctgggcgacatcatgtatggtcgcaccgagcacccatggggcgttgtcatccccgagaagaagcagtaa

SEQ ID NO: 90440 - protein, 407 aa, Gibberella zeae PH-1
MAPSAVETQDVNLTAAAIHKKEVAQPTTTTQAPLDASKLTYTYTQNPRSVPDEANAHSGDETIATDHMVLAAWKQSTGWAAPELKPYGPLSLMPTASVLHYATECFEGLKVYRGYDGKLRIFRPDRNAARLRMSSTRISLPSFEPSEIEKLMISLLSVDGTKWLPADRAGSFLYIRPTVIGTAPQLGVSAPKEALLYIIVTFMPRMDAPPGGMRLHTSPDDMVRAWVGGFGYAKVGANYGPSLLATADARTRGFHQILWLYGSQGECTEAGASNFFVVWKRKDGKKEIITAPLDDKLILDGVTRRSCLELIRERLGDEYEITERKYTISEVMEADAEGRLLESFAAGTAYFICPISQIHHRGKDINIPMGAEGEAGEVTSKVKGWLGDIMYGRTEHPWGVVIPEKKQ

SEQ ID NO: 90441 - DNA, 1227 bp, Gibberella zeae PH-1
  CDS (1)..(1227)
atgatgagacctatgcttgctcgctccgctctacggagtgctcgcttgtcgagcttcagaccgttgtgccaggcgcaacgcttcagcatcaaggctgaggccgcctcgtccgcacagcacatgggcctagatgcttcaaaactcaccattcagaagacagggaaccacaagactctcagcaagcccgagaccttggtgtttggaaaggagttcacagaccacatgcttgcgatcgaatggaatcaggacaaaggatggctggagcccaagatcacaccctaccagaacctctctctcgaccctgcgacatgtgtcttccattacgcctttgagtgcttcgagggcatgaaggcctacaaggacaagaacggcaaagtgcgactcttccgacccgacatgaacatggctcgactcaacaaatcggctgctcgtatcgcacttcctactttcgagccagccgagttcgcccagctcatctccaagctcgtcaaccttgactctcgcttcattcccgaccagcgcggatactcactctacctccgccctaccatgattggaacccaaaagacactcggcgttggccctcctggatctgctcttctttactgcattgcctcgcccgttggtccttactaccctaccggcttcaaggctgtttctctcgaggccactgactatgctgtccgtgcttggcccggtggtgttggtgacaagaagctgggcgccaactatgcgccctgtatcctccctcagctccaggccgccagccgtggtttccaacagaatctctggctgtttggcgaggaagagtttgttactgaggtcggcaccatgaacatgtttgtcgctctcaagaacaaggaaactggccagaaggagctcatcaccgctcccctcgatggcactattcttgagggtgtcactcgtgactctgtcctggctcttgctcgcgagcgccttattcctcagggctggaagatcaccgagcgcaagtataccatgaaggagcttgctgaggctgcggatgagggccgtctgctcgaggcctttggtaccggaacagctgccattgtcagccctgtccgatccatctcatggaagggaaagctcgttgactgcggtctatctgaggtcgaagagtctggtgagattgctctccagatgaagaattggatcgaagccatccagtatggtgatgaggagcacgagtggagctacactatctaa

SEQ ID NO: 90442 - protein, 408 aa, Gibberella zeae PH-1
MMRPMLARSALRSARLSSFRPLCQAQRFSIKAEAASSAQHMGLDASKLTIQKTGNHKTLSKPETLVFGKEFTDHMLAIEWNQDKGWLEPKITPYQNLSLDPATCVFHYAFECFEGMKAYKDKNGKVRLFRPDMNMARLNKSAARIALPTFEPAEFAQLISKLVNLDSRFIPDQRGYSLYLRPTMIGTQKTLGVGPPGSALLYCIASPVGPYYPTGFKAVSLEATDYAVRAWPGGVGDKKLGANYAPCILPQLQAASRGFQQNLWLFGEEEFVTEVGTMNMFVALKNKETGQKELITAPLDGTILEGVTRDSVLALARERLIPQGWKITERKYTMKELAEAADEGRLLEAFGTGTAAIVSPVRSISWKGKLVDCGLSEVEESGEIALQMKNWIEAIQYGDEEHEWSYTI

SEQ ID NO: 90443 - DNA, 1329 bp, Apis mellifera
  CDS (1)..(1329)
atgctagcaagttggcaatcagatgttcagaaaaataatataatggttaagataagatggaatacttatgtatttcatgaatattacaagcaacttgaagaagacgctattgttaaaattttgacttatgggaattttttgaatcaatttcaacttaatatcaaacgaaattcatcatctttacaaattaaagataaaaaagtaatacaaccagaacgttcttttaggtatacagatctatcagttcgtcttgcaggaccagaacaattacaaccaaaacctgatgttagtgatttagcatttggtaaatattttacagatcatatattaaaaatattttatcatgaaacattaggaggatggcaaaggccagaaattactccatttgaaaatctagttcttcatccagcatcaaaagtatttcattatgctatagagttgtttgaaggtttgaaagcttacagaggagtagatggtaaaataagaatatttagaccagaattaaatatggaacgaatgaacagttctgcaatgagaactggtttacctgttttcattggagaggaattaattaaatgtttatgtagattaattagtattgatcaagaatgggtacctcattctactgcttctagtctttacatacggccaacaatgataggaatagatcctatccttggcgttacatcttctgagtctgctttactttatgttattttatcacccgtgggttcttattttaaaaaaacaaaaaaagacattgggatatctttattagctgatcctcgatacacaagagcatggccaggtggttgtggtaactataaagtaggcagcaattatggtcctacagtatatgtacaaaaagaagctatagaaaaaggtttacaacaagtactatggctttatggagatgataatgaattaactgaagctggaactatgaatgtgtttatattcattttaaatgatgatggtgagaaagaattaataacaccaccattgacaagtggtttgattcttcctggaattataagaaattctattttagcattaagtaaaaagtggaatcaatttaaagttagtgaaagaaagatttgtatggacgaagtttgtcagttactttcagaaaatcgattattggaaatatttgggtcaggaacagcttgtataattagtcccgtatcttacatagactttgttggacaactattatatatacctacaatggaacattctaatcctatttacaaaatgcttttaaagcatttatctgatatacaatatggtgttatacaagatcacccttgggcgatacctattgaatga

SEQ ID NO: 90444 - protein, 442 aa, Apis mellifera
MLASWQSDVQKNNIMVKIRWNTYVFHEYYKQLEEDAIVKILTYGNFLNQFQLNIKRNSSSLQIKDKKVIQPERSFRYTDLSVRLAGPEQLQPKPDVSDLAFGKYFTDHILKIFYHETLGGWQRPEITPFENLVLHPASKVFHYAIELFEGLKAYRGVDGKIRIFRPELNMERMNSSAMRTGLPVFIGEELIKCLCRLISIDQEWVPHSTASSLYIRPTMIGIDPILGVTSSESALLYVILSPVGSYFKKTKKDIGISLLADPRYTRAWPGGCGNYKVGSNYGPTVYVQKEAIEKGLQQVLWLYGDDNELTEAGTMNVFIFILNDDGEKELITPPLTSGLILPGIIRNSILALSKKWNQFKVSERKICMDEVCQLLSENRLLEIFGSGTACIISPVSYIDFVGQLLYIPTMEHSNPIYKMLLKHLSDIQYGVIQDHPWAIPIE

SEQ ID NO: 90445 - DNA, 1188 bp, Candida glabrata CBS 138
  CDS (1)..(1188)
atgatgctgaactctagactagcgtttgctagtataagcagaaatttcggccttgctagaaggtcaattgccagcttggatgcctctaaactgaaagttacaaagaaaacaccaccatcacaacccagacctaatgatgagcttgtttttggtcagacatttactgatcacatgcttacaattgaatggactaaagagaaaggttgggatatcccggaaatcaagccatatggaaacttgaccctagatccatcttcttgtgtattccactacgcctttgagctttttgaaggtttaaaagcttacaggaccccagacaataagattactatgtttagaccagatatgaatatgattcgtatgaacaaatctgcagctcgaatctgtttacctacatttgatagcgaagagttgatcaaattaatgggcaagctaattgaacaggacaaacatttggttccaactggaactggctactcattgtacatcagaccaactttgattggtaccacaaatggcctaggtgtcggtactccagacagagcattgctttttgtcataacctctccagttggtccttattataagactggtttcaaagctgtcaggctagaagctactgactacgcaaccagagcttggccaggtggtgttggtgacaagaagttgggtgcaaactatgctccatgtattcttccacaacttcaagcggcagaaagaggttatcaacaaaacctttggttattcggtcccgaaaaacatgtgacagaagtcggtactatgaatgtattctttgccttcaaaaattctgttaccggaaagaaagaacttgtgacggctccattagatggtactattttggaaggtgttacaagagactccatattgacacttacaagacaaaacttagatccaaacgaatgggaaattaatgaacgttactatagcattaatgaagttgctgaaagagctgcgaagggtgagctattagaagcttttggcgccggtaccgctgctgttgtttcaccaattaaggctatcggatggcaaggaaaagatattgatgtgccattgatacctggtgaacaatctggtccaataactaaacaagtggcccaatggattgctgatattcaatatggaagagtaaaacatggtaactggtcaagagtagtagctcaattatag

SEQ ID NO: 90446 - protein, 395 aa, Candida glabrata CBS 138
MMLNSRLAFASISRNFGLARRSIASLDASKLKVTKKTPPSQPRPNDELVFGQTFTDHMLTIEWTKEKGWDIPEIKPYGNLTLDPSSCVFHYAFELFEGLKAYRTPDNKITMFRPDMNMIRMNKSAARICLPTFDSEELIKLMGKLIEQDKHLVPTGTGYSLYIRPTLIGTTNGLGVGTPDRALLFVITSPVGPYYKTGFKAVRLEATDYATRAWPGGVGDKKLGANYAPCILPQLQAAERGYQQNLWLFGPEKHVTEVGTMNVFFAFKNSVTGKKELVTAPLDGTILEGVTRDSILTLTRQNLDPNEWEINERYYSINEVAERAAKGELLEAFGAGTAAVVSPIKAIGWQGKDIDVPLIPGEQSGPITKQVAQWIADIQYGRVKHGNWSRVVAQL

SEQ ID NO: 90447 - DNA, 1116 bp, Candida glabrata CBS 138
  CDS (1)..(1116)
atggacgcatcaaggttgaagatcacaaaagtttccactccaagtgaaagaaagccaaatgaccagctagtctttggtaagacttttaccgatcatatgctgaccattgaatggacctctgagaatggttgggacgctccggagatcaaaccatatggcaaattatgtcttgatccttcatcaattgtattccattatgccttcgagctgtttgaaggtatgaaagcatacagaacaaaggatggtaaaattgcaatgttcagacctgaaaaaaacatggaaagaatgaacaagtctgcagcaagaatttgcctgccaacatttgacggggaagaattgatcaaactgatcgggaagctgatcgaattagataagcacttgattcctgaaggtgagggatactctctctatattagacccactttgatcggtacatctgaaggccttggtgtaaaagagccagacagagccctactttttgtcatttgttctcctgttggcccttattataaaactggatttaaggcagttcgcttggatgctacagactatgcaacaagagcatggccaggtggcgtcggtgacaaaaaactgggcgctaattatgctccttgtgtattaccccagacgcaggctgccgctaagggtttccagcaaaatttgtggttatttggtccggagcactatgtcacggaagttggtacaatgaacgcattttttgcatttaattgtaaggaaaccggtaagaaagaattggtcactgcgccattagatggaactattttggaaggtgttactagagactccatcttaactcttgctagaaagtatttggatcctaatgaatgggagattaatgaaagatatttcactattcatgaggtccaagaaaaggctcataaaggtgaattattagaggcatttggaagtggtacagcagctattgtttcccctatcaaggagattggatggaaagacactattatcaatgttcctttgattcctggagaacaaagcggaccacttacaaaacaaatagcatcatggatgatggatatccaatatggtaaagtagaacttgataactggttaagaattgttgcagacattaattaa

SEQ ID NO: 90448 - protein, 371 aa, Candida glabrata CBS 138
MDASRLKITKVSTPSERKPNDQLVFGKTFTDHMLTIEWTSENGWDAPEIKPYGKLCLDPSSIVFHYAFELFEGMKAYRTKDGKIAMFRPEKNMERMNKSAARICLPTFDGEELIKLIGKLIELDKHLIPEGEGYSLYIRPTLIGTSEGLGVKEPDRALLFVICSPVGPYYKTGFKAVRLDATDYATRAWPGGVGDKKLGANYAPCVLPQTQAAAKGFQQNLWLFGPEHYVTEVGTMNAFFAFNCKETGKKELVTAPLDGTILEGVTRDSILTLARKYLDPNEWEINERYFTIHEVQEKAHKGELLEAFGSGTAAIVSPIKEIGWKDTIINVPLIPGEQSGPLTKQIASWMMDIQYGKVELDNWLRIVADIN

SEQ ID NO: 90449 - DNA, 1224 bp, Kluyveromyces lactis NRRL Y-1140
  CDS (1)..(1224)
atgaactacattggactacggaattgtgcaagagctgtttccagcagagtttccattccatcaagaggtattaagagtcatattttaacaagttatagagccatgtccttagacgcatccaaggttaaaatcaccaaggtcgaaaccccatcgaagccacgtccaaacgatgagttggttttcggtcaaactttcactgaccatatgttaaccatcgaatggacagctgaaaacggttggggtgtcccagagattaaaccatacgggaacttgtcgttagatccatcctcgtgtgtgttccactatgctttcgaattgttcgaaggtttgaaggcgtacagaaccccagacaacaagatcagcatgttccgtgctgataagaatatggaacgtatgaacaagtcagcagccagaatctgtttgccatcttttaattcggatgagttgatcaagttgatcggtaagttgatcgaacaagacaagcatttggtgcctcaaggtcaaggttactccttgtacatcagacctacaatgattggtactactaacggattgggtgttggtactccagacagagctttgttgtatgtgatcacatctccagtgggaccatattacaagactgggttcaaagccgtgagattggaagctacggattatgctactagagcttggccaggtggtgttggtgacaagaagcttggtgccaactacgcaccatgtatcttgcctcaattgcaagctgctgaacgtggttaccaacaaaacttgtggttgttcggtccagaaaagaacatcactgaagtcggtactatgaacgtcttcttcgtgttcaaggactccaagaccggcaagaaggaattggttactgctccattggacggtaccattttggaaggtgtcactagagactctattctacaattggccagagaaaacttgaactctgacgagtggatcgtctctgaacgttactacactatcaccgaagtggaagaaagagctgccaagggcgaattggtcgaagcgttcggttccggtaccgctgctgtcgtgtctccaatcaaggaaatcggctggaacggtcacgatatccaagtgccattgttgcctggtgaacaatgtggtccattgaccaagcaagtggctgaatggattgccgatatccaatatggcagaaaagaacacaagggatggtcccgtatcgttgctgacttgaactaa

SEQ ID NO: 90450 - protein, 407 aa, Kluyveromyces lactis NRRL Y-1140
MNYIGLRNCARAVSSRVSIPSRGIKSHILTSYRAMSLDASKVKITKVETPSKPRPNDELVFGQTFTDHMLTIEWTAENGWGVPEIKPYGNLSLDPSSCVFHYAFELFEGLKAYRTPDNKISMFRADKNMERMNKSAARICLPSFNSDELIKLIGKLIEQDKHLVPQGQGYSLYIRPTMIGTTNGLGVGTPDRALLYVITSPVGPYYKTGFKAVRLEATDYATRAWPGGVGDKKLGANYAPCILPQLQAAERGYQQNLWLFGPEKNITEVGTMNVFFVFKDSKTGKKELVTAPLDGTILEGVTRDSILQLARENLNSDEWIVSERYYTITEVEERAAKGELVEAFGSGTAAVVSPIKEIGWNGHDIQVPLLPGEQCGPLTKQVAEWIADIQYGRKEHKGWSRIVADLN

SEQ ID NO: 90451 - DNA, 1104 bp, Debaryomyces hansenii CBS767
  CDS (1)..(1104)
atgtcattagattcaacgaaattagaaatcactaaaactaccacaccaaaggaaaaattgccaaatgatcaattgatatttggtaaaactttcactgaccatatgttggaaattgaatggactcaagaaaatggatggggcgtaccaaagatttcaccttaccataacttttcgtttgatccatcaaccgtagtcttccactatgcgttcgaattgttcgaaggtatgaaggcatatcgtgataccaacaaccagattagaacattcagatctgataagaatatgataagaatgaaccaatctgcggaaagaattgctttgccaactttcgatggggaagaactcatgaagttgattgacaagtttttgattactgacgaaagttttgttcctcaaggtgctggttactcattatacttgagaccaaccttgataggtaccactgcctcgttaggtgttggaaccccagacaaggccttattatatgttattgcttctccagtcggtccatactacggtaccggtttcaagccggtttcattagaagctactgactacgctgtcagagcttggccaggtggtgttggtaaccgtaaattaggtgccaactacgccccatgtattttacctcaattagaagcagctcaaagaggctaccaacaaaacttgtggttattcggtgacgaaggttatgtcaccgaagtcggaaccatgaatgttttctttgctttcaaggattctgagggaaagaaggaattagtcactgccccattagatggtaccattttagaaggtgtcaccagagattccatcttgcagttatgtaaggaaagattaccttccgaatggactgttgtcgaacgtaaatttacaatccacgaaattgaagaaagagccgcaaagggtgaattaatcgaagctttcggtgctggtaccgctgctgtcgtttctccaatcgagagaattggttggaagggtaaggatatctcagttccaattactgctggtgatgctggtgaattaactacacaggttgctgaatggattagaaagattcaatacggtgaagaagaatacaaaaactggtcaagagttgctaaatag

SEQ ID NO: 90452 - protein, 367 aa, Debaryomyces hansenii CBS767
MSLDSTKLEITKTTTPKEKLPNDQLIFGKTFTDHMLEIEWTQENGWGVPKISPYHNFSFDPSTVVFHYAFELFEGMKAYRDTNNQIRTFRSDKNMIRMNQSAERIALPTFDGEELMKLIDKFLITDESFVPQGAGYSLYLRPTLIGTTASLGVGTPDKALLYVIASPVGPYYGTGFKPVSLEATDYAVRAWPGGVGNRKLGANYAPCILPQLEAAQRGYQQNLWLFGDEGYVTEVGTMNVFFAFKDSEGKKELVTAPLDGTILEGVTRDSILQLCKERLPSEWTVVERKFTIHEIEERAAKGELIEAFGAGTAAVVSPIERIGWKGKDISVPITAGDAGELTTQVAEWIRKIQYGEEEYKNWSRVAK

SEQ ID NO: 90453 - DNA, 1167 bp, Yarrowia lipolytica CLIB122
  CDS (1)..(1167)
atgcttcgaaacaacttgagatcgctttcgcgggccttcagcacctcctccatgcgtctgggcgccggaatggacgcctccaagctccagatcaccaagaccaagtcccccaaggaaaagcaggcccccaaggatctcattttcggccataccttcaccgaccacatgctgactgtcgagtggactgccaaggacggctgggctgctccccagatcaccccctacggtcctcttgagctggatccctccgccgtcgtcctgcactatgcctttgagtgtttcgagggcctcaaggcttacaaggacgagtctggaaacgtgcgtctgttccgagtcgacaagaacatgcaccgaatgaacacatcggccgagcgaatctgcctgcccgagtttgatggcgccgaggctgccaagctgattggccaattggccaagcttgattccgcttggatccccgagggacgaggctactccatgtacctccgaccttctctgattggaaccaccgccgctctcggcgtcggaacccccgataaggcgctcttttacgtcattgcatcccccgtcggcccctactaccctaccggattcaaggccgtcaagctggaggctactgactacgctgtccgagcctggcctggaggagtcggaaacaagaagctgggagccaactacgctccctgtatcaagcctcagcagcaggccgcttctcgaggctaccagcagaacctgtggctgtttggcgacgagggcaacatcaccgaggtcggtaccatgaacgccttctttgtgtttgagcgaaacggcaagaaggagcttgtcactgctcctttggacggtactattctcgagggtgtcactcgagactccattctggagctggctcgagaacgattgccttctgctgactggatcgtttccgagcgatactgcactattaaagaggtcgcggaggctgccgagaagggcgagcttgttgaggcctttggagctggtactgccgctgttgtctcgcctatcaaggagattggatggggagagaagactattaacattcctctccagcctggcaaggaggccggtaagctgactgagactgttaatgagtggattggagatatccagtacggtaaggatgaatacaagggatggtctaaggtggtctaa

SEQ ID NO: 90454 - protein, 388 aa, Yarrowia lipolytica CLIB122
MLRNNLRSLSRAFSTSSMRLGAGMDASKLQITKTKSPKEKQAPKDLIFGHTFTDHMLTVEWTAKDGWAAPQITPYGPLELDPSAVVLHYAFECFEGLKAYKDESGNVRLFRVDKNMHRMNTSAERICLPEFDGAEAAKLIGQLAKLDSAWIPEGRGYSMYLRPSLIGTTAALGVGTPDKALFYVIASPVGPYYPTGFKAVKLEATDYAVRAWPGGVGNKKLGANYAPCIKPQQQAASRGYQQNLWLFGDEGNITEVGTMNAFFVFERNGKKELVTAPLDGTILEGVTRDSILELARERLPSADWIVSERYCTIKEVAEAAEKGELVEAFGAGTAAVVSPIKEIGWGEKTINIPLQPGKEAGKLTETVNEWIGDIQYGKDEYKGWSKVV

SEQ ID NO: 90455 - DNA, 1122 bp, Yarrowia lipolytica CLIB122
  CDS (1)..(1122)
atgaccaaactgtcacccctcaaagctgaccgactcgagatcactctcaacaagtctcccaagcagtttgactctcccaaggacctcgctcccaactcttccacagactacatcctccaggtcgactacaccgatgaggctggatgggatgcccccaagattgggccctttggtcctcttcagattgatcccaccgcctctgttcttcactacgctgtcgagtgcttcgagggtctcaagctgtacaagaacaaggctggcaacaagctgattctgttccgacccgagctcaacatggctcgtctcaacgactcttgtgagcgaatcggtctcccccgatttgacgaggccgagctcctcaagtgccttattgagtacgtcaagctcgagggccgattcgtcgcccccggtggcttcatctacctgcgacccactgctatcggcaccaacggcggtctgggactcaaggcccccactgccgccaaggtttttgtctgtgccaccatgatgcaggcttggaatgccgagcccctcaagctctactgctccgatcccaaggatgctgtgcgagcatggcccggaggatttggctacgccaagctgggagccaactatggacccactctccaggagaactccaaggccgttggagccggctaccaccaggttctgtggctctacgacgaggacaagaagaccgtcactgaggccggtggctccaacttcttcgtcgccatcaagaagaaggactccgatgagatcgagctcatgacctgccccatctcaaccaagctcatcctgcccggtatctctcgacgatccgctctcgagtacctcggtgagaagcacaagggctccaacgtgaccgtccacgagcgagagttcggaatcgacgagattgccgaggccgccaaggagaatcgactcgttgaggcctttgccatcggtaccgccttcttcgtcgcacccgtccagctcatccgaacccctgagggcgagctcatcaacgtgcccctgtcccagggcgactccggtgactttgctgccgacgtcaaggccaagctcacctccattatgtacggagaggaggagaacgactgggccaccaccgtggactgctaa

SEQ ID NO: 90456 - protein, 373 aa, Yarrowia lipolytica CLIB122
MTKLSPLKADRLEITLNKSPKQFDSPKDLAPNSSTDYILQVDYTDEAGWDAPKIGPFGPLQIDPTASVLHYAVECFEGLKLYKNKAGNKLILFRPELNMARLNDSCERIGLPRFDEAELLKCLIEYVKLEGRFVAPGGFIYLRPTAIGTNGGLGLKAPTAAKVFVCATMMQAWNAEPLKLYCSDPKDAVRAWPGGFGYAKLGANYGPTLQENSKAVGAGYHQVLWLYDEDKKTVTEAGGSNFFVAIKKKDSDEIELMTCPISTKLILPGISRRSALEYLGEKHKGSNVTVHEREFGIDEIAEAAKENRLVEAFAIGTAFFVAPVQLIRTPEGELINVPLSQGDSGDFAADVKAKLTSIMYGEEENDWATTVDC

SEQ ID NO: 90457 - DNA, 1488 bp, Aspergillus nidulans FGSC A4
  CDS (1)..(1488)
atgaaatccctccatcaactagctcgtccgcgagcgctacctagcttcgctgctccacgtgctcaaagcgctcgttcgaaccgactatggcagaggtgcttcagtgctactcgtgctgcctctgagggcgctcagctggacccctccaagctcaccatcacgaaaacaagcacgcccaaggagttgttacccgctaaggaccttgtttttgggaagaactttaccgatcacatgttcaccgtcgaatggaccgcgaaggacggctggctcgctccacagatcgttccctaccaaaagctccaactagatccatcagcttgcgtattccactatgcctttgaatgcttcgaaggtatgaaggcatacaaagatagcaagggtcagattcgtttgttccggcccgacaagaacatgcagcgcttgaacaagtcctctgcgcgtattgccttgcctactgttgatggtgaggccctcaccaagttgattggcgagctggtcaagctcgatagcagattcatccctgacgcacgcggctactcactttacctgcgacctacgatgattggtacccaaagcactctcggcgttggcccaccaggctctgctcttctctttgtcattgctagtcccgtgggtccttactaccctactggattcaaagctatatcattagaggcaacggattatgctgtgcgggcatggcctggaggtgtgggagataagaaactgggtgcaaactatgccccttgcatcgtcccacagttagaggcagcttcccgagggttccagcagaatttatggctttttggtgaggaggagtacgttacggaggttggcacaatgaaccttttcatcgcgctgaagaacaaggagaccggcaagaaggagcttgtgactgccaatcttgatggaaccatccttgagggcgttacaagagactctgtgctagcgcttgccagggaaagactggtcccgaagggctggcaagtttctgagcgtaagatcaggatggcggaagtcgccgaggcggccgatgagggaaggttgcttgaagtatttggagctggcacggcagcaattgtcagccccgtgcgaacgatcagctaccgtggcagattggtaaactgcgggctgaaggaaaccgaggaggctggagagattgcttctcaaatgaagaactggattgagggaatccaatacggtgacgaggagcacccatggagaatcatatactggcaatccatacggtttatcttcaactcaaatccgttccttcagtcgagtctctctgatggccgagccctagtccgagaaaagaactacccaacctacctttactcagctcctcgagtctctagcggattccatcaaacgcccgcacacatcataccgtgcattattcacctcgtcgaagccgagctcaaccaggcgcagaacatgaatccctgccaggcagtcaacaagccagcccttcgggacaatcaataa

SEQ ID NO: 90458 - protein, 495 aa, Aspergillus nidulans FGSC A4
MKSLHQLARPRALPSFAAPRAQSARSNRLWQRCFSATRAASEGAQLDPSKLTITKTSTPKELLPAKDLVFGKNFTDHMFTVEWTAKDGWLAPQIVPYQKLQLDPSACVFHYAFECFEGMKAYKDSKGQIRLFRPDKNMQRLNKSSARIALPTVDGEALTKLIGELVKLDSRFIPDARGYSLYLRPTMIGTQSTLGVGPPGSALLFVIASPVGPYYPTGFKAISLEATDYAVRAWPGGVGDKKLGANYAPCIVPQLEAASRGFQQNLWLFGEEEYVTEVGTMNLFIALKNKETGKKELVTANLDGTILEGVTRDSVLALARERLVPKGWQVSERKIRMAEVAEAADEGRLLEVFGAGTAAIVSPVRTISYRGRLVNCGLKETEEAGEIASQMKNWIEGIQYGDEEHPWRIIYWQSIRFIFNSNPFLQSSLSDGRALVREKNYPTYLYSAPRVSSGFHQTPAHIIPCIIHLVEAELNQAQNMNPCQAVNKPALRDNQ

SEQ ID NO: 90459 - DNA, 1203 bp, Aspergillus nidulans FGSC A4
  CDS (1)..(1203)
atgggctccattggcaacactctagctgagctcgacgcctcggtcgtcaagatcactcgttcgaccgaactacgccatgtccccctcccaggctcgcttgaggagctaagtcactcctactgcaccgaccacatggttaccgcgcgctggactgctgctggcggatgggagacacccgaggtgaaaccattccagaatctcagcatccctccgacggcgtcatgcctgcactacgctacggaatgttttgagggcatgaaggtgtatcgcggcttcgatgggaaactgcgcctttttagaccagacctcaacggtgagcgtctatcgaacagcgctgtcagggcgtccctgccgagtttccggttccaggagctcaagaccctcatcgccaaactgatgcagattgacggtttacgctggcttcctaaggaccagcctggtcgtttcctctaccttcgtccaaccctcatcggatccggcacgcagcttggcgttcaagcacccgccgaagccctccttttcatcatcgccgtcccctggcccgatccagccacccggctcaaggcaacccccggcgaagcccttggcctaaaactcctcacctccgcacccgacaccatccgcgcctggcctggcggtttcggatacgccaagctcggcgccaactacggcccctcgctcgcagcgcacggcaaggcgcaggcgcagggcttcgaccaggttctttggctcttcggtgaagaccgtcaagtgactgaggccggtgcaagcaactttttcattgtctgggagaatgcgcagacggggaagcgggagcttgtgactgctccgttagagaatcagcttatcctcccaggcgtaacgagacgtagtgttctggagcttgcacggtcaaggctcaaccaggctgtgggcgacctcgaggctgtcgaagttgttgagaagacatttacaatctgggatgttgaggcggcgtggaaggagggcagggttgtcgaggcttttgtttgtgggactgcattcttcatcacccctgtcaagctcatccgtaacggtgctgtcgatatccagctcctcaagccgggccagactgcgggatacgctgctcagatcaagtcgtggcttgaggcggttatgtacggcaaggatggcgctgagaaccacgagtggtcgtacattattgagaatgagagcgaaaagtaa

SEQ ID NO: 90460 - protein, 400 aa, Aspergillus nidulans FGSC A4
MGSIGNTLAELDASVVKITRSTELRHVPLPGSLEELSHSYCTDHMVTARWTAAGGWETPEVKPFQNLSIPPTASCLHYATECFEGMKVYRGFDGKLRLFRPDLNGERLSNSAVRASLPSFRFQELKTLIAKLMQIDGLRWLPKDQPGRFLYLRPTLIGSGTQLGVQAPAEALLFIIAVPWPDPATRLKATPGEALGLKLLTSAPDTIRAWPGGFGYAKLGANYGPSLAAHGKAQAQGFDQVLWLFGEDRQVTEAGASNFFIVWENAQTGKRELVTAPLENQLILPGVTRRSVLELARSRLNQAVGDLEAVEVVEKTFTIWDVEAAWKEGRVVEAFVCGTAFFITPVKLIRNGAVDIQLLKPGQTAGYAAQIKSWLEAVMYGKDGAENHEWSYIIENESEK

SEQ ID NO: 90461 - DNA, 1191 bp, Aspergillus nidulans FGSC A4
  CDS (1)..(1191)
atggcgcgactgttgaaccgctggcacttgcctgcacttgtcaggcgccactattcatctcgattccaatctttgcgcattgagaaaacccagtcgcccaaacccctgcccgactcgaccgagttacaatttgggcggtctttcactggcaagtatccctcacagacccgaaaccacatcctcaaactcgaatggaccacaacccaaggctggagcgatgcgcaaatcactccctacgataacctgcggctcgaccccgcctcatgcgtcctccattacgcattcacctgcttcgagggcatgaaagcgtataaagacccgcatggcaacgcgcggctattcaggcctgaggagaacctggcgcggctcaacagatccgcagctagactcgctcttccgacattcgaagaatccggcgtactggagtttctagcaaaatatgttgatctcgaaaagagattcatcccgcacttacctggtcactccctgtacttgcgcccgacgttgctaggcaccgatgcgagtattagtgtttcgcggccccggagcgcactgttgtttgttattgccagtccaatgggcgattactttgccaacgggatgaaggccgtcacgttgcaggcgacgcggtcgccagtacgcgcgtggccaggtggtgtgggggagttcaaggtcggcgggaactacgcgccgagtattgtgccgcaggaagaggccgcggaggcagggagccagcagaatctgtggctgttggctgatcgtgagagtggcgaggaatttgtgaccgaggctggcactatgaatctttttgtagtctgggtgagttcttccacggggaagaaagaactggtgacgccgccactggatgggacgatcctgcctggggtgactcgaatgtcaatcttggagctcgcgagggagaggcttgaaggggacaggtctggtattgaggtggtagagaggaggatcaccatgcgagagttggcggctgcctcgaaggagggccgcctgttggaggtgtttggtgcagggacggcggtggtggtgtcgccggtgaggtcgattcgttggggagaccagtgtatttcctgcggtctacgagatggagaagaagctggcccgatgagtctgcagatgaaaacgtggcttgaggaggtgcagtatggcctggttgagcatccttggaggtga

SEQ ID NO: 90462 - protein, 396 aa, Aspergillus nidulans FGSC A4
MARLLNRWHLPALVRRHYSSRFQSLRIEKTQSPKPLPDSTELQFGRSFTGKYPSQTRNHILKLEWTTTQGWSDAQITPYDNLRLDPASCVLHYAFTCFEGMKAYKDPHGNARLFRPEENLARLNRSAARLALPTFEESGVLEFLAKYVDLEKRFIPHLPGHSLYLRPTLLGTDASISVSRPRSALLFVIASPMGDYFANGMKAVTLQATRSPVRAWPGGVGEFKVGGNYAPSIVPQEEAAEAGSQQNLWLLADRESGEEFVTEAGTMNLFVVWVSSSTGKKELVTPPLDGTILPGVTRMSILELARERLEGDRSGIEVVERRITMRELAAASKEGRLLEVFGAGTAVVVSPVRSIRWGDQCISCGLRDGEEAGPMSLQMKTWLEEVQYGLVEHPWR

SEQ ID NO: 90463 - DNA, 1110 bp, Candida albicans SC5314
  CDS (1)..(1110): transl_table=12
atgtcagctccattagacgccagtaaattggaaatcactaaaactaccaaaccaagtgaaccattaccaaaagaagaattggttttcggtaaatcattcactgaccatatcttagaagttgaatggactgctgaaaaaggatggggtgttccaactattaaaccataccacaacttttcccttgatccagccacctgtgttttacattattcttttgagttatttgaaggtttaaaggcataccgtgatagcaatggtaaaatcagaacttttagaccagacaaaaatatggaaagaatgaatagatcagctaaaagagctgcattacctacatttgatggtgaagaatttatcaaattagttgatcaatttttgttgattgaagaaagatttgttccaactggttacggatattcactttacttgagaccaactttaattggtacttcaattgggttaggtgtcagtgcaccaactaaagcattattatatcttattgcttcacctgttggtccatatttcagtggtggtttcaaaccagtgtctttggaagccacagattacgccgtaagagcttggccaaaaggtgttggttcttataaattgggtgcaaactatgtgtcttgtattgaaccacaaatggaagctgccaagagaggtcattcccaaaatttgtggttatttggtgaagaaggttatattactgaagtgggtgctatgaatgttttttttgcattcaagaatgccgatggcactaaagaattggtgactccgccattggatggtatgatcttgccaggtgtcactcgtgattctactttagaattggctaaaagcaaattaccaagtgattggactgtcaatgaaagaaaattgactattcatgaagttaaagaaagagctgctaaaggtgaattagttgaagctttcggtactggtaccgctgctattgtttcaccaattgacaacattgaattccaaggcgaacaaattaaggttccagtttctgctggtagttccggagaaatagctttgaagatcaatgattggataaaggctattcaatatggtgatgaaagttttaaaaactggtctagagtagcccaatag

SEQ ID NO: 90464 - protein, 369 aa, Candida albicans SC5314
MSAPLDASKLEITKTTKPSEPLPKEELVFGKSFTDHILEVEWTAEKGWGVPTIKPYHNFSLDPATCVLHYSFELFEGLKAYRDSNGKIRTFRPDKNMERMNRSAKRAALPTFDGEEFIKLVDQFLLIEERFVPTGYGYSLYLRPTLIGTSIGLGVSAPTKALLYLIASPVGPYFSGGFKPVSLEATDYAVRAWPKGVGSYKLGANYVSCIEPQMEAAKRGHSQNLWLFGEEGYITEVGAMNVFFAFKNADGTKELVTPPLDGMILPGVTRDSTLELAKSKLPSDWTVNERKLTIHEVKERAAKGELVEAFGTGTAAIVSPIDNIEFQGEQIKVPVSAGSSGEIALKINDWIKAIQYGDESFKNWSRVAQ

SEQ ID NO: 90465 - DNA, 1182 bp, Candida albicans SC5314
  CDS (1)..(1182): transl_table=12
atgatattgaaaactagctcactacttagatctgccgtacaaccaagacaatggttaagatacacttcaactgttgcaccgttagaggcttctaaattaattgttgaaaaaactagtaatcccaaaccaaagttgccaaaggacaagttagtctttggcaaaacctttaccgatcatatgttggaaattgaatggaccaaagaaaaaggttggcacacccctaaaatttcaccatatcacaatctttcgttagatccatcaactattgtgttccattatgcatttgaattatttgaaggaatgaaagcatataaagacacaaatggcaacatcagaaccttccgtggagataaaaatatgattagaatgaacaaatctgctgaaagaattgcattgcctacttttgaaggtgaggaattacaaaaattgattgacaaattattacttttagatcaagattttgtacctgaaggtaaaggttattctttataccttagaccaaccctcattggtaccactgcctcattgggcgtgggtacaccagatagggctcttttgtttgttattgcctctcctgttggtccttactactcgtctgggttcaaaccagttagcttagaagcaactgattatgcagtcagagcttggccaggcggtgttggtgataagaaattgggtgccaactacgcaccatgtgtgaaaccacaacttgaagctgctcaaagaggattccatcaaaacttgtggttgtttggtgatgaagggtatgtcaccgaagtggggaccatgaattgttttgtagctttcgaaaatgatgatggcactaaagaattggtcacggctccattggatggtactattttggaaggagtaactcgtgattccattttagagttagctagagaaaggttgccaagtgatgaatggactgtatcagaacgtaaatacacaatttatgaaatcgaagaaaaagctaacaaaggacaattgattgaggcttttggtgctggtactgctgctgttgtttctcctataaacaatattggattcagaggtaaaaatatcaaggttccagttgccttgggtaactctggtgaattgacagctactgttgctgaatggattagaaagattcaatatggtgaagaagagttcaagaattggtcaagggttgcaaaataa

SEQ ID NO: 90466 - protein, 393 aa, Candida albicans SC5314
MILKTSSLLRSAVQPRQWLRYTSTVAPLEASKLIVEKTSNPKPKLPKDKLVFGKTFTDHMLEIEWTKEKGWHTPKISPYHNLSLDPSTIVFHYAFELFEGMKAYKDTNGNIRTFRGDKNMIRMNKSAERIALPTFEGEELQKLIDKLLLLDQDFVPEGKGYSLYLRPTLIGTTASLGVGTPDRALLFVIASPVGPYYSSGFKPVSLEATDYAVRAWPGGVGDKKLGANYAPCVKPQLEAAQRGFHQNLWLFGDEGYVTEVGTMNCFVAFENDDGTKELVTAPLDGTILEGVTRDSILELARERLPSDEWTVSERKYTIYEIEEKANKGQLIEAFGAGTAAVVSPINNIGFRGKNIKVPVALGNSGELTATVAEWIRKIQYGEEEFKNWSRVAK

SEQ ID NO: 90467 - DNA, 1227 bp, Ustilago maydis 521
  CDS (1)..(1227)
atgccggcaccaacttcagcaggcgctgctcagcagctccaatcagccgcttccacctcgaccatggcgccgctcaacgccgagctgctgcaagtcaacctcaaccccacccccgccgcaccagatttcgagaatctcgtctttggtcaaaagttctcaccacacatgctcatcgtcaactggaatcataagaccggatggggagcaccacagatcaagccatacggaccgctctcgctctcccctgccgcacctgcactccactacgccagcggactcttcgaaggtatgaaggcctaccgctccaccgacggttcgggcaagatccgcttgttcagagcggacaagaacatggagcgtatgaaccgttccgctgctcgtgctggtctgcccactttcgatggtgacgaattcatcaagctcatcaagacgcttgttcgaatcgaccgtgattatgttccctacggagaaggccagacgctctacctccgccccacactcattggtactcccgacacgctgggtatgggcgttcccaccgaagcacagctgtactgtatctgcagtccggttggaaactactattccagcggcactggatccaagcctgtcagcttgttggcgaggactgacgtcgtcagggcatggcctggtggaaccggttgctacaagctcgctgccaactacgccggtgcaacacgacctgctatggatgccttgttggaaggctaccaccaggttttgtggctgttcggtcccgaccgacagctcactgaagtgggtgcgatgaacctctttgtcgttttccgcgaccaggcagcggatggcgatgctactcgatatgaaatcgccaccgctgcgctcgacgatggcaccatccttcccggtgtcactcgcgacagcatcctgtcgctgttgcgtgcctacaaagcaggaaacgtccaaatagaaggtctgcccaaacctgagaaccttaccatctcggaacgcaaggtcaccatggatgagatcattgaaaaagccgaaggtaaccaaatttgtgaagttttcggctccggtaccgccgctgtcgtctgcagcgtcgacaagatcggtttcgagggcgtagacatccctattcctattcaaccggacggcatgggtactttcatgcgtaccatgctgcgcgaggtcactggaagacagtggggcaccattccgtgccccgaatggagcagtgtctgctag

SEQ ID NO: 90468 - protein, 408 aa, Ustilago maydis 521
MPAPTSAGAAQQLQSAASTSTMAPLNAELLQVNLNPTPAAPDFENLVFGQKFSPHMLIVNWNHKTGWGAPQIKPYGPLSLSPAAPALHYASGLFEGMKAYRSTDGSGKIRLFRADKNMERMNRSAARAGLPTFDGDEFIKLIKTLVRIDRDYVPYGEGQTLYLRPTLIGTPDTLGMGVPTEAQLYCICSPVGNYYSSGTGSKPVSLLARTDVVRAWPGGTGCYKLAANYAGATRPAMDALLEGYHQVLWLFGPDRQLTEVGAMNLFVVFRDQAADGDATRYEIATAALDDGTILPGVTRDSILSLLRAYKAGNVQIEGLPKPENLTISERKVTMDEIIEKAEGNQICEVFGSGTAAVVCSVDKIGFEGVDIPIPIQPDGMGTFMRTMLREVTGRQWGTIPCPEWSSVC

SEQ ID NO: 90469 - DNA, 1254 bp, Tribolium castaneum
  CDS (1)..(1254)
atgtcagtcattacaagcaaacagtgcgcctgcaagtgggtcctccagcaccaacacaagctcaagcaagccgccagagcgtgcagtctgaaagtaaaggaagtcctaggactcgacgaactcaaaacctacgagcagtataacgactccgagtacacctttcgacacagagatctgacgacgaaattggccgaaccggaccagctccgggccaagcccgacgtctccgaactgaaattcggccaaattttctccgaccacatgctgaaaatcttctaccacaagcagctaggcgggtggcaaaaaccagtgattatcccgttcgaaaacatctcgctgcaccccgccgccaaagtgctccactacgccgtcgagctttttgaaggtttgaaagcctacagaggcgtggacgggaaaatccgggtctttcgaccggacctgaacatgcggaggatgaacttgtcggcccagagggccggcttgcccaccttcgacggcgaggagctcaccaagtgcatgaaccggctgatccaagtggaccaggagtgggtcccgcacagcgagggctccagcctttacataagaccgacgctaatcgggattgatggcactttgggggtggcccagtccgagtcggccctcctcttcaccatcttgtgcccagtgggcaactacttctcggggggttccgagtcggtgtccctcctggcggacccccagtacaccagggcctggcctggaggtgtgggcgaccgcaaaatgggctccaactacgggcccaccatccgggtccagagcacggccaacagcaaggggcgacagcaggtgctgtggttgtatgggcccgaccatcaagtcactgaggtcggaaccatgaacattttcatcttttatatcaacaacaatggggaaaaagtgctggcgacgccgcccctgaacggcttgatcctcccgggggttacccgagcgtcgatcttgcaaatgacgcaagactggaaggagtttaaggttgaagaacggatcctcaccatggacgaggtgataacgttgctacgcagcgacaggttgcttgaaatgtttgggtcggggacggcctgtatagtcagtccgattgcttcgatcgagtatatgggcgagcttttgaacataccgaccaccgaacacgacaaaccggtctataagcggctgagggaacaattgtttgcgatacagtacggacatgttgagcacccgtgggcccgcgttatagaataa

SEQ ID NO: 90470 - protein, 417 aa, Tribolium castaneum
MSVITSKQCACKWVLQHQHKLKQAARACSLKVKEVLGLDELKTYEQYNDSEYTFRHRDLTTKLAEPDQLRAKPDVSELKFGQIFSDHMLKIFYHKQLGGWQKPVIIPFENISLHPAAKVLHYAVELFEGLKAYRGVDGKIRVFRPDLNMRRMNLSAQRAGLPTFDGEELTKCMNRLIQVDQEWVPHSEGSSLYIRPTLIGIDGTLGVAQSESALLFTILCPVGNYFSGGSESVSLLADPQYTRAWPGGVGDRKMGSNYGPTIRVQSTANSKGRQQVLWLYGPDHQVTEVGTMNIFIFYINNNGEKVLATPPLNGLILPGVTRASILQMTQDWKEFKVEERILTMDEVITLLRSDRLLEMFGSGTACIVSPIASIEYMGELLNIPTTEHDKPVYKRLREQLFAIQYGHVEHPWARVIE

SEQ ID NO: 90471 - DNA, 1092 bp, Propionibacterium acnes KPA171202
  CDS (1)..(1092): transl_table=11
atgagtttgcgctttgcttctgctgacgatctgacgtggtcctccgacgagcggatcgcgctggaacatgccaatccacgatttggtgcggtccttgccgaccatatggctgttgctacctggcaggccggtgaaggctggggagacgacgccgtggtcaactaccacggacttgatatcaatcctggcagcgctgtgctgcattatgcccaggagattttcgagggcctgaaggcttaccgccacgctgacggttctatctggctcttccgccctgatcagagcggtgagcgttttgttcggtcggccgagcgtctcgccctgcccacgctgcgagtcgaagacttcgttactgcttgtatgcgcttggttgaggtcgactcccgttgggtccctgagcccggtgagggtggagagaagtccctctacctgcggccgttcatgatcgcctaccaggatttcctcggtcttgccgcggcaagtaccgtgctgttttccgttattggttctcccgttggcgcttactttgtcagcggggtgaaaccgctgcggctcctcgtcgagcgtcgtcaagctcgaacggcccccggcggtaccggtgaggcgaagtgcggtggcaattacgcagcttcgctgcgttcccagatcgatgccaagacccgtggctgcaacgaggtgctctttgtcgatgcagttgaacatcgctggatcgaggaactgggtggtatgaacttcatggccatcagcaaggacggtcagctcgtcacccccgagttagctggcaccatcctacgtggcgtgactcgcagatccattctggaagttgcccccgacctcggtcttgaaccagtggagcgcaagatcgatgttgacgagctccttgatggcgttcgctctggcgagttcccggaagtcttcgcctgcggtaccgccgcggttgtcacaccgatcggctctttcctagatggagataccgacgtgaaggtctctgagcccaccggaaagaccacgatggagatccgtcgccgtctgctggatatccagttcggacgcgctgaggacacccgtggctggttgaagcgagtctgctga

SEQ ID NO: 90472 - protein, 363 aa, Propionibacterium acnes KPA171202
MSLRFASADDLTWSSDERIALEHANPRFGAVLADHMAVATWQAGEGWGDDAVVNYHGLDINPGSAVLHYAQEIFEGLKAYRHADGSIWLFRPDQSGERFVRSAERLALPTLRVEDFVTACMRLVEVDSRWVPEPGEGGEKSLYLRPFMIAYQDFLGLAAASTVLFSVIGSPVGAYFVSGVKPLRLLVERRQARTAPGGTGEAKCGGNYAASLRSQIDAKTRGCNEVLFVDAVEHRWIEELGGMNFMAISKDGQLVTPELAGTILRGVTRRSILEVAPDLGLEPVERKIDVDELLDGVRSGEFPEVFACGTAAVVTPIGSFLDGDTDVKVSEPTGKTTMEIRRRLLDIQFGRAEDTRGWLKRVC

SEQ ID NO: 90473 - DNA, 1083 bp, Desulfotalea psychrophila LSv54
  CDS (1)..(1083): transl_table=11
atgtgggaaaatcttgatgttgcacttgaaaaagtatctgtcgaaaatttaaaggaaaaaccttcaagtgagaacctttgttttggtagtgactttaccgatcacatgtttgcgatgacatggagcagagagaacgggtggcatgacgcaaaaatttgtccatatcataatttggtccttgatcctgcggcaatggtcttccattacggccaggcaatttttgaggggatgaagggctataagggtaaggatgggcagacctatatgtttcgtccgacggataaccttgagcggatgaatcaatctgcagtacgtctctgtatgccccgcctgcccgtggacaaggtgttgaagagcttgaaggcccttctctatctcgaaaaggattggattcccgaggcccccggttcatctctctatattcgtccgaccatgattgcggtagagcccagtcttggtgtccgtccttccgagaagtactacttctttgttattatgagtcccgtgggcgcatactataaggagggttgtaaccctaccaagatctacgtaagtgatgagcaggcccgtgcagttcccggtggcgttggcaatattaagactgccggaaattatgcagcatctctctatactgctgagattgcaaggaaaaaaggttgtagccaagtcctctggctcgatgcgaaagagtttaagtatgtggaagaggtgggcaccagtaatatcttcttccgtattggcgatgagcttatcactcctccgcttggaggttcaattcttggcggtatcaccagagattctattttgaaacttgccagaagctggggcctcaatgtctccgagcgcaagatcaccatagaggaagttttacgggcaagtgaagacggtactctgctggaatcctttggcacaggaacggctgctgtaatctcccctgtaggtgaaattgtctataaggataagagctatatcattaatgctggtaaggctggagaactctcgcagagactctatgccgagcttcagggtattcagtatggcgagctggaagatccattcaaatgggttgagcgtgtgggttag

SEQ ID NO: 90474 - protein, 360 aa, Desulfotalea psychrophila LSv54
MWENLDVALEKVSVENLKEKPSSENLCFGSDFTDHMFAMTWSRENGWHDAKICPYHNLVLDPAAMVFHYGQAIFEGMKGYKGKDGQTYMFRPTDNLERMNQSAVRLCMPRLPVDKVLKSLKALLYLEKDWIPEAPGSSLYIRPTMIAVEPSLGVRPSEKYYFFVIMSPVGAYYKEGCNPTKIYVSDEQARAVPGGVGNIKTAGNYAASLYTAEIARKKGCSQVLWLDAKEFKYVEEVGTSNIFFRIGDELITPPLGGSILGGITRDSILKLARSWGLNVSERKITIEEVLRASEDGTLLESFGTGTAAVISPVGEIVYKDKSYIINAGKAGELSQRLYAELQGIQYGELEDPFKWVERVG

SEQ ID NO: 90475 - DNA, 1092 bp, Bacillus licheniformis ATCC 14580
  CDS (1)..(1092): transl_table=11
atgacaaaacaaacgatcagcgtacagctcagtacagcaaaaaagcaaaagccagaggctgacaagctcgaattcggccggacctttaccgaccacatgtttatcatggactatacggctgaaaacggctggcacgatccgagaatcgttccttaccagccgattgaaatggacccggctgcaatggtttaccactacggacaatccgtttttgaaggattaaaagcttatttatcaagcgaaggcagagttcttctgttcagacctgaaaaaaacttcgagagactcaataaatccaacgaccgcctctgcattccccgggttgatcctgaaatcgttctggaagggctgaagcagctggttcagatcgacaaggaatggattcctcaagctgaggggacatccctttatatccgtccgttcattatttcaacagaaccgtaccttggcgtcgccccatccaatatgtataaaatgctgatcattttatcgccggtcggatcttattacaaagaaggcatccgccctgtgaaaattgctgttgaaagcgaatttgtccgtgctgtggcaggcggtacaggcaatgcaaaaacggccggaaactacgctgcgagcctgaaggctcaggaagttgcggaaagcaaaggcttctcacaagtgctgtggcttgacggagttgaaaagaaatacattgaagaagtaggcagcatgaacatcttcttcaaaatcagcggtgaaattgtcactccggctctaaacggaagcattttggaaggcattacgagaaactccgtcatccatctcttaaaacaatggggactctccgtaaccgaaagaaaaatttcagttgatgaactggttcaggctcacaaagacggcctgcttgaggaagcattcggcaccggaaccgccgctgtcatttcccccgtcggcgagctgatctggaaagacgaaagccttgtgatcaacaacggtcaaactggagaaatcgccaaaaggctctaccaaacgatcaccggtattcaaaaaggcgctttgcctgacacattcggctggacagttgaagttgataaagtaagccagtcctgctaa

SEQ ID NO: 90476 - protein, 363 aa, Bacillus licheniformis ATCC 14580
MTKQTISVQLSTAKKQKPEADKLEFGRTFTDHMFIMDYTAENGWHDPRIVPYQPIEMDPAAMVYHYGQSVFEGLKAYLSSEGRVLLFRPEKNFERLNKSNDRLCIPRVDPEIVLEGLKQLVQIDKEWIPQAEGTSLYIRPFIISTEPYLGVAPSNMYKMLIILSPVGSYYKEGIRPVKIAVESEFVRAVAGGTGNAKTAGNYAASLKAQEVAESKGFSQVLWLDGVEKKYIEEVGSMNIFFKISGEIVTPALNGSILEGITRNSVIHLLKQWGLSVTERKISVDELVQAHKDGLLEEAFGTGTAAVISPVGELIWKDESLVINNGQTGEIAKRLYQTITGIQKGALPDTFGWTVEVDKVSQSC

SEQ ID NO: 90477 - DNA, 1083 bp, Bacillus clausii KSM-K16
  CDS (1)..(1083): transl_table=11
atgacaacacaaaaactcgaaattatgaaatgtacgcacaaaaaacaaaaacccgagtcttctgctttagagtttggcaagtattttacagaccatatgtttatcatggattattcagaagagaaaggctggtacagtccccgtattattccttatcaaccattgacccttgatcctgccgcaatggtattccattatgggcaaacggtttttgaaggcttaaaagcgtaccgttctgaagatgggagcgtccgcttattccgcccagaagaaaactttaagcgtttgaatcaatcaagcgaccgtttgagcatcccgccgattgatgaagcacaaatgctcgcttatttaaaggaattgatccgtatcgataaagactggattccaacgatgccaggaacttccctttatattcgcccatttgttattgcgacagaacctacattaggcgtagcgccttcacgtaattataaatttatgattatcttgtcaccagtcggagcttactataaagaaggaatcaacccaattggcatttttgtagaagaccaatatacacgtgccgcaccaggggggactgggaccgcgaaaacggctggcaactactgtgctgcttacaaagcacaagagcgggctacagcgaacaaacaagcacaagttctatggttggacgggatggaaaagaaatacgtcgaagaagtaggcagcatgaatgtgttttttaaattgaacggagaagtgcatacacctggattatcaggcagcattttagagggcattacacgcaaaagcgtgatcgagttgctgaaaagttgggatatcccagtgttcgaacggcggatttcaattgaagaaattgtgagcgcaagcaaaagcggtacgcttgaagaagtcttcggaactggtacagcagcggtcatctctccagtcggagaacttttgtggaaagaccacaaaatcgttgtcaacaacaatgaaacaggagcgttgtccaaacgtttgtacacggaattgacaggcattcaaactggagaacaaaaagacccgtttggctggactgtccgtttggaagacgaggaataa

SEQ ID NO: 90478 - protein, 360 aa, Bacillus clausii KSM-K16
MTTQKLEIMKCTHKKQKPESSALEFGKYFTDHMFIMDYSEEKGWYSPRIIPYQPLTLDPAAMVFHYGQTVFEGLKAYRSEDGSVRLFRPEENFKRLNQSSDRLSIPPIDEAQMLAYLKELIRIDKDWIPTMPGTSLYIRPFVIATEPTLGVAPSRNYKFMIILSPVGAYYKEGINPIGIFVEDQYTRAAPGGTGTAKTAGNYCAAYKAQERATANKQAQVLWLDGMEKKYVEEVGSMNVFFKLNGEVHTPGLSGSILEGITRKSVIELLKSWDIPVFERRISIEEIVSASKSGTLEEVFGTGTAAVISPVGELLWKDHKIVVNNNETGALSKRLYTELTGIQTGEQKDPFGWTVRLEDEE

SEQ ID NO: 90479 - DNA, 1140 bp, Corynebacterium glutamicum ATCC 13032
  CDS (1)..(1140): transl_table=11
gtgtatctgtcaggtagcaggtgtaccttaaaatccatgacgtcattagagttcacagtaacccgtaccgaaaatccgacgtcacccgatcgtctgaaggaaattcttgccgcaccgaagttcggtaagttcttcaccgaccacatggtgaccattgactggaacgagtcggaaggctggcacaacgcccaattagtgccatacgcgccgattcctatggatcctgccaccaccgtattccactacggacaggcaatttttgagggaattaaggcctaccgccattcggacgaaaccatcaagactttccgtcctgatgaaaacgccgagcgtatgcagcgttcagcagctcgaatggcaatgccacagttgccaaccgaggactttattaaagcacttgaactgctggtagacgcggatcaggattgggttcctgagtacggcggagaagcttccctctacctgcgcccattcatgatctccaccgaaattggcttgggtgtcagcccagctgatgcctacaagttcctggtcatcgcatccccagtcggcgcttacttcaccggtggaatcaagcctgtttccgtctggctgagcgaagattacgtccgcgctgcacccggcggaactggtgacgccaaatttgctggcaactacgcggcttctttgcttgcccagtcccaggctgcggaaaagggctgtgaccaggtcgtatggttggatgccatcgagcacaagtacatcgaagaaatgggtggcatgaaccttgggttcatctaccgcaacggcgaccaagtcaagctagtcacccctgaactttccggctcactacttccaggcatcacccgcaagtcacttctacaagtagcacgcgacttgggatacgaagtagaagagcgaaagatcaccaccaccgagtgggaagaagacgcaaagtctggcgccatgaccgaggcatttgcttgcggtactgcagctgttatcacccctgttggcaccgtgaaatcagctcacggcaccttcgaagtgaacaacaatgaagtcggagaaatcacgatgaagcttcgtgaaaccctcaccggaattcagcaaggaaacgttgaagaccaaaacggatggctttacccactggttggctaa

SEQ ID NO: 90480 - protein, 379 aa, Corynebacterium glutamicum ATCC 13032
MYLSGSRCTLKSMTSLEFTVTRTENPTSPDRLKEILAAPKFGKFFTDHMVTIDWNESEGWHNAQLVPYAPIPMDPATTVFHYGQAIFEGIKAYRHSDETIKTFRPDENAERMQRSAARMAMPQLPTEDFIKALELLVDADQDWVPEYGGEASLYLRPFMISTEIGLGVSPADAYKFLVIASPVGAYFTGGIKPVSVWLSEDYVRAAPGGTGDAKFAGNYAASLLAQSQAAEKGCDQVVWLDAIEHKYIEEMGGMNLGFIYRNGDQVKLVTPELSGSLLPGITRKSLLQVARDLGYEVEERKITTTEWEEDAKSGAMTEAFACGTAAVITPVGTVKSAHGTFEVNNNEVGEITMKLRETLTGIQQGNVEDQNGWLYPLVG

SEQ ID NO: 90481 - DNA, 1122 bp, Thermobifida fusca YX
  CDS (1)..(1122): transl_table=11
atgagcaacggcaccaccacaagcgggttgacgttcgatattcgactctccaccgagcggaagaccccgcaggagcgagaggcgatcctggaaaaccccgggttcggcaaagtgttcaccgaccacatggtgaccatccgctacaccgcagaccgcggctggcacgatgcccgactcgagccctacgggccgctgtcgctggacccggccacctcagtcctgcactacgcccaggagatcttcgaagggctcaaagcgtaccgccaccccgacggcagcatcgcctgcttccggccggaagccaacgccgcacggttcaactccagtgcgaagcgcatggcgatgccggaacttcccgaagaactgttcctgggggcgatcgacaccctgctcacctacgacggcgactgggtccccacccaggctgacaccagcctgtacctgcgccccttcatgatctccaccgacgtcggcctgggcgtcaacagcccgtccagcagctacctgttcgtgctgatcgcttccccgtccggcggctacttcgccaacggggtcaaaccggtcaccgtgtggctgtgcgaggactacacgcgggctgcgcccggcggaaccggtgcggccaagttcggcggcaactacgcggccagcttcctggcccaggcccaagccgtcgaacagggctgcgaccaggtcgtctggctggacgcagtggaacaccgctgggtggaggagatgggcggcatgaacctcttcttcgtcttcggttccggagagaacgcccgcctcctcacccctgaactgaccggcaccctcctgcccggcatcacccgtgactcgctgctgaagctcgcccccgacctcggctacccggtggaagaggggcggatttctaccgacgagtggcgggaggccgcggccagtggagagctcaccgaggtgttcgcctgcggtactgccgccgtcattacccccgtctcgcacgtgaagagtcggcagggcgagttccagatcggtgacggcacccccggccccatcaccatgcgcctgcgggaggagctcgtcggcctgcagtacggcacccgccccgactcccacggctggatccgcaagttcggccgctaa

SEQ ID NO: 90482 - protein, 373 aa, Thermobifida fusca YX
MSNGTTTSGLTFDIRLSTERKTPQEREAILENPGFGKVFTDHMVTIRYTADRGWHDARLEPYGPLSLDPATSVLHYAQEIFEGLKAYRHPDGSIACFRPEANAARFNSSAKRMAMPELPEELFLGAIDTLLTYDGDWVPTQADTSLYLRPFMISTDVGLGVNSPSSSYLFVLIASPSGGYFANGVKPVTVWLCEDYTRAAPGGTGAAKFGGNYAASFLAQAQAVEQGCDQVVWLDAVEHRWVEEMGGMNLFFVFGSGENARLLTPELTGTLLPGITRDSLLKLAPDLGYPVEEGRISTDEWREAAASGELTEVFACGTAAVITPVSHVKSRQGEFQIGDGTPGPITMRLREELVGLQYGTRPDSHGWIRKFGR

SEQ ID NO: 90483 - DNA, 1095 bp, Ralstonia eutropha JMP134
  CDS (1)..(1095): transl_table=11
atgagcgctgacaaccaattgcagttcaccgtggaacgtcaccccaaccccacgccggccgacaagatcgcggctgcgctggtcgaccctgccttcggacgcgtgttcaccgaccacatggtcacaatccgctggaccgaagggcgcggttggcatgacgccaaggtcgaagcgcgccgtccattccagatcgatcccgcctgtgccgtcctgcactatgcgcaggaaatctttgagggcatgaaggcctatcgcggcgccgacggcaagatttcgctgttccgcccgcaggaaaacgccaagcgcttccgtgcgtcggccgcgcgcatgtcgatggccgacctccctgaggccgagttcctgcgcgctgtcgaagcgctcgtcgacatcgaccgcgactggatccccggcggcgacggcagcctgtacctgcgcccgttcatgtttgctgccgagaacttcctcggcgtgcgcgccgcgaacgaatacgtgttctgcgtaatcgcctgcccggtcggcccgtacttcaagggtggcaagtcggcggttacggtttgggtgtccgaccagtacacgcgcgccgcgcccggcggcaccggcgcggccaagtgcggcggcaactatgcggccagcctgatcgcacagaccgaagctgcacagaagggctgcgaccaggtggtcttccttgacgccgcggaacaccgctggatcgaggaactcggcggcatgaacgtgttcttcgtgatggatgacggctcgctgctgacgccgccgctgtccggcacgatcttgcccggcatcacgcgcgcatcggtgatcgaactggcccgccatgaaggcatcaaggtgtcggaaaccccgtacgcgttcgaggcgtggcaagccgatgccgcgagcggccgcgtgaaggaaacgttcgcctgcggcaccgccgccgtggtgactgccatcggcacggtgcgccatgccggcggtgaattcaacatcggcaatggcggcgaaggcgaagtcacgaagcgcctgcgtgcgctgctgaccggtatccagcgcggcaaggaagcagataccttcggctgggttcaccacatcgcctga

SEQ ID NO: 90484 - protein, 364 aa, Ralstonia eutropha JMP134
MSADNQLQFTVERHPNPTPADKIAAALVDPAFGRVFTDHMVTIRWTEGRGWHDAKVEARRPFQIDPACAVLHYAQEIFEGMKAYRGADGKISLFRPQENAKRFRASAARMSMADLPEAEFLRAVEALVDIDRDWIPGGDGSLYLRPFMFAAENFLGVRAANEYVFCVIACPVGPYFKGGKSAVTVWVSDQYTRAAPGGTGAAKCGGNYAASLIAQTEAAQKGCDQVVFLDAAEHRWIEELGGMNVFFVMDDGSLLTPPLSGTILPGITRASVIELARHEGIKVSETPYAFEAWQADAASGRVKETFACGTAAVVTAIGTVRHAGGEFNIGNGGEGEVTKRLRALLTGIQRGKEADTFGWVHHIA

SEQ ID NO: 90485 - DNA, 1074 bp, Geobacter metallireducens GS-15
  CDS (1)..(1074): transl_table=11
atggagatcagaatcgcgccgctcccggagggccggaaaaagcccaagtacaccgacgaatcccagctcggtttcggcaagctctttaccgaccggatgtttatggtcgagtggaaaatcggccaggggtgggtcgatgcccggattgagccctatgcccccttcgtcctcgatccggcctgctctgttcttcactatgcccaggagatcttcgaggggctcaaggcctacaagtgggccgacggcaccatcaccctcttccgccccgagatgaacgctcgacgtttcaaccactcagccgatcgcctctgcatgccagaggtgccggaggagcttttccttgacggcatcgagaagctcgtggcgttggagcgcgactggattccctcgtcggaagggacctccctctacatccgtcccaccatgatcggcgtggacccggtcctgggggtgaagcccgctgatcactactacttctacgtgatcctctctcctgttggtgcgtattactccgcggggttcaaccccatcaagatcatggtggaggaccagtacgtccgctccgtccccggcggcaccggggaggccaagaccggcggcaattacgcctgctccctcaaggccggccttgaggcgaagaaaaaggggtatgaccaggtcctctggctcgacggggtccaccgtcgctatattgaggaagtgggggccatgaatatgctcttcgcctatgggaagaccattgtcaccgcttctctcaccggcacgatcctgaacggcgtcacccgcgactccaccctgaagctggctgcgagcctcggctacaccatcgaggagcgcctcatcgacgtgaatgagctcatggcggacattcgtgccggcaaggtgaccgaggctttcggcagcggcactgctgcagtcatcagcccggtcggcgttcttgcgtacaaggacgaagtctgtacggtcggcaatggcggcgtggggccgattacccagcagctctacgatactctgaccggcattcagaccggcaaggttcccgacaccttcggctggacccgcaagatcgcatga

SEQ ID NO: 90486 - protein, 357 aa, Geobacter metallireducens GS-15
MEIRIAPLPEGRKKPKYTDESQLGFGKLFTDRMFMVEWKIGQGWVDARIEPYAPFVLDPACSVLHYAQEIFEGLKAYKWADGTITLFRPEMNARRFNHSADRLCMPEVPEELFLDGIEKLVALERDWIPSSEGTSLYIRPTMIGVDPVLGVKPADHYYFYVILSPVGAYYSAGFNPIKIMVEDQYVRSVPGGTGEAKTGGNYACSLKAGLEAKKKGYDQVLWLDGVHRRYIEEVGAMNMLFAYGKTIVTASLTGTILNGVTRDSTLKLAASLGYTIEERLIDVNELMADIRAGKVTEAFGSGTAAVISPVGVLAYKDEVCTVGNGGVGPITQQLYDTLTGIQTGKVPDTFGWTRKIA

SEQ ID NO: 90487 - DNA, 1104 bp, Novosphingobium aromaticivorans DSM 12444
  CDS (1)..(1104): transl_table=11
atggcgagcaccgccgacaccactggcctcaccttcacccgcaatccgcacccggcaccggttgctgcggacgcgcgtgcccaggtgctggccaaccccggcttcggcaccaccttcaccgatcacatggtcgagatcgactacgccgagggccagggttggcacgatgcgcgcgtcgtcccttatggcccgatcgcgctcgatccggcggccgccgtcctgcactatgcgcaggaaatcttcgaagggctcaaggcctaccgccttgcggatggcggcatcgcgttgttccggcccgaggcgaatgcccagcgcttcaacgcttcggcccgccgccttgccatgcccgagctgccggaggatcttttcgtcgaggccgtgcgccagcaggtgctggccgacaaggactggttccccacggtcgaaggcggatcgatgtacctgcgcccgttcatgttcgcgagcgaggcattcctcggcgttcgccctgcacggcagtacaagttcatggtcattgccagcccggccggcaactacttcaagtccggcgcaccggccgtctcgatctgggtgagcgactatacccgcgcggcgcccggcggcaccggcgcggccaagtgcggcggcaactacgccgccagcctcgtccccacggccgaggcgttttcgcgcgggcatgaccaggtcctgttcctcgacgctgccgaacacaagtgggtcgaggaactggggggcatgaacctgttcttcgtgttcgacgacggttcgatcctgaccccggaactgaccggcacgatcctacccggcatcacccgttccagcctgctcacgcttgcagcggaagaaggcctgaccgtgcgcgaaggccgctacagcctcgaccagtggaaggccgacgccgcatcgggcaagctcatcgaaacctttgcctgcggcacggcggccgtcgtgacgcccgtcggcaaggtcgccagccgcgatggcgagttcaccatcggctcgggtggccccggccagctgacccagaagctgcgccagaagctggtaggcatccagcggggcgaaatcgccgatacccacggatgggtctcgcgcatcgcctga

SEQ ID NO: 90488 - protein, 367 aa, Novosphingobium aromaticivorans DSM 12444
MASTADTTGLTFTRNPHPAPVAADARAQVLANPGFGTTFTDHMVEIDYAEGQGWHDARVVPYGPIALDPAAAVLHYAQEIFEGLKAYRLADGGIALFRPEANAQRFNASARRLAMPELPEDLFVEAVRQQVLADKDWFPTVEGGSMYLRPFMFASEAFLGVRPARQYKFMVIASPAGNYFKSGAPAVSIWVSDYTRAAPGGTGAAKCGGNYAASLVPTAEAFSRGHDQVLFLDAAEHKWVEELGGMNLFFVFDDGSILTPELTGTILPGITRSSLLTLAAEEGLTVREGRYSLDQWKADAASGKLIETFACGTAAVVTPVGKVASRDGEFTIGSGGPGQLTQKLRQKLVGIQRGEIADTHGWVSRIA

SEQ ID NO: 90489 - DNA, 1077 bp, Cytophaga hutchinsonii ATCC 33406
  CDS (1)..(1077): transl_table=11
atgagtgcttctaaagccgtaaacttcccgattgaacgtacacaacattcaagactatctgaaacagatttttcgaacttggaatttggaacggtcaactcggatcacatgtttgtggttgattataaaaaaggcgaatgggtagatccaaaaattattccctttcagaatatttctgtaagcccggcatgtagctcgctgcactacggacaaacagtattcgaaggcatgaaagcattccgggcaccgaatggtgacttgcttgtattcagaccagagaagcacttagagcgcatgaacaattcaaaccgccgtttatgcattccggaaattcctgctgaatatttttatgatgctattgatgccctggtaaagcttgatcaggactggattccgaatcaggaaggatgttcgttatatttaagaccattcatctttgcaaacgatccgttcattggcgttaaaccatcttctgcctataaattcatgatctttacatgtccggttgcaggttactacaaaggtactgtaaaggttatcatcgaatcagatttcgttcgtgcatctccgggcggtatcggtgcagctaaaacaggcggtaattatgcagcttctttattgcctgcaaaattagcagcagataaaggctatcagcagatcctttggacagacagcaaagaacataaatactttgaagaatccggaacgatgaacttaatgttcgtgatcaatgatgtattgatcacgccgtcattagatggctctatccttcccggtatcacacgcgatacaatcctgaccattgcaaaagactggggtgtaaaggtggaagaaagaagagtgagtgtagaagaagttattactgctttcaataatggaaccttacaggatgcatttggtacaggtacagccgcaacaatcacacagattgctgaaattcaccacaacggcaaagacatggtgctgccgccggttgcaggcagaacactgtcaaataaattaaaccaaaccattgttgatcttaaaaacggcattggtgaagataaatacaactgggtacacagaattaaaaaataa

SEQ ID NO: 90490 - protein, 358 aa, Cytophaga hutchinsonii ATCC 33406
MSASKAVNFPIERTQHSRLSETDFSNLEFGTVNSDHMFVVDYKKGEWVDPKIIPFQNISVSPACSSLHYGQTVFEGMKAFRAPNGDLLVFRPEKHLERMNNSNRRLCIPEIPAEYFYDAIDALVKLDQDWIPNQEGCSLYLRPFIFANDPFIGVKPSSAYKFMIFTCPVAGYYKGTVKVIIESDFVRASPGGIGAAKTGGNYAASLLPAKLAADKGYQQILWTDSKEHKYFEESGTMNLMFVINDVLITPSLDGSILPGITRDTILTIAKDWGVKVEERRVSVEEVITAFNNGTLQDAFGTGTAATITQIAEIHHNGKDMVLPPVAGRTLSNKLNQTIVDLKNGIGEDKYNWVHRIKK

SEQ ID NO: 90491 - DNA, 1110 bp, Rhizobium leguminosarum bv. viciae 3841
  CDS (1)..(1110): transl_table=11
gtgccagcaatgaccgcgacgacgacctctcctgaaatcaaaatcgaattacacaagtctcccgtctccgacgccgaccgcatccaggcactggagacacccggcttcggtaaggtcttcacggatcatatggtcctggcacgatggactgccgacaagggctggcacgatgcgaaggttacgccaaggcgtcctctggagctcgatcctgcaagcgccgtgctgcactatgctcaggaaattttcgaaggcatgaaagcctacaaggcagacgatggccggattctgctctttcggcccgaagagaacgcccgccgcttcgcgcagtcggcgacccgcatggctatgcctcctgtgcccgaagaactcttcctgaaggcggtcgaagaactggtccgcgttgacaaggcctggattccatccggcgacgccagtctctaccttcgccccttcatgttcgccaacgaggcgtttctcggcgttcgtccggctcaggagtatgtcttctgcatcatcgcctctccggtcggcgcctacttcaaaggcggagcaaaggcggtctccctatgggtcgagaccgaatacacccgtgctgccgccggcggcaccggagcggcaaaatgcggcggaaactacgcagccagcctcgtggcgcaagccgaggcggcgaagaaggattgcgatcaggtcgtcttcctggacgcagcagagcatcgctgggtcgaggagctcggcggcatgaacgtcttcttcgtcatgaatgacggatcggtggtgaccccgcctcttggcggcacgatcctgccgggtatcacccgggcctcggtgatcgtgctcgctggagaaaagggcttgcgcgtcgagcagcgtccctactccttcgcggaatggcagcaggacgcaaccagcggcaagctggtcgaagccttcgcttgcggcactgccgcggttctggcgggcatcggcctggttcggcatgccggcggcgagtttctggtcggagacggacagaccggcaagttgaccagcgaactgcgccagcagctcgtcagtctgcagaaaggcgtaaccaacgatgagcgcggctggacgcgccttatcccggcctga

SEQ ID NO: 90492 - protein, 369 aa, Rhizobium leguminosarum bv. viciae 3841
MPAMTATTTSPEIKIELHKSPVSDADRIQALETPGFGKVFTDHMVLARWTADKGWHDAKVTPRRPLELDPASAVLHYAQEIFEGMKAYKADDGRILLFRPEENARRFAQSATRMAMPPVPEELFLKAVEELVRVDKAWIPSGDASLYLRPFMFANEAFLGVRPAQEYVFCIIASPVGAYFKGGAKAVSLWVETEYTRAAAGGTGAAKCGGNYAASLVAQAEAAKKDCDQVVFLDAAEHRWVEELGGMNVFFVMNDGSVVTPPLGGTILPGITRASVIVLAGEKGLRVEQRPYSFAEWQQDATSGKLVEAFACGTAAVLAGIGLVRHAGGEFLVGDGQTGKLTSELRQQLVSLQKGVTNDERGWTRLIPA

SEQ ID NO: 90493 - DNA, 1074 bp, Nocardioides sp. JS614
  CDS (1)..(1074): transl_table=11
atggagatcagcaccaccccgtcgagcgccgcggtctccgacgagcgcctcgccgagatcctcgccaaccccggcttcggcctgcacttcaccgaccacatgctcacggtcgagtgggccccggacgccggctggcacgccgggcgcatcgagccgtacgggccgctcacgctcgaccccgcgaccgcggtcctgcactacgcgcaggagatcttcgagggcatgaaggcctaccggcacgcggacgggtcgatctggtcgttccggcccgaggagaacgccgcgcgcatgatgcgctcgagccggcggctcgcgctgcccgagctcgacgtcgccgactacgtccaggcggtcgacgcgctcgtgaccgccgaccagcgctgggtccccgacccggcgggggagaagagcctctacgtgcgcccgttcatgttcgcctcggaggcgttcttgggcgtgcggccggcccagcacgtcacgttcatggtgatcgcgagcccggccggcgcctacttcaagggcggcgtcaagccggtcacgctgtggctgaccgacgagtacacccgcgccggccgcggcggcatgggcgcggcgaagaccggcggcaactacgccagctcgctggtcgcgcagcagcaggcgagcgcccagggctgcgaccaggtcgtgttcctcgatgcccaggaggggcagtacgtcgaggagctcggcggcatgaacatgtacttcgtccacgacgacggcaccatcgtcacccccgagaccggcaccatcctcgaggggatcacccgctccagcatcatcgagctggccggcaagctcggccaccaggtcgaggagcgccggttctccatcgacgagtggcgcgagggcgtgcgcagcggccggatcgtggagatcttcgcctgcggcaccgccgccgtcgtcaccccggtcggcgagctgaagtgggacggcgggtcggcgcccgcccccgcgagcaccgacctcaccatgcgggtccggcaggccctggtcgacatccagtacggccgcgccgaggacacgttcggctggatgcaccggatcgtctga

SEQ ID NO: 90494 - protein, 357 aa, Nocardioides sp. JS614
MEISTTPSSAAVSDERLAEILANPGFGLHFTDHMLTVEWAPDAGWHAGRIEPYGPLTLDPATAVLHYAQEIFEGMKAYRHADGSIWSFRPEENAARMMRSSRRLALPELDVADYVQAVDALVTADQRWVPDPAGEKSLYVRPFMFASEAFLGVRPAQHVTFMVIASPAGAYFKGGVKPVTLWLTDEYTRAGRGGMGAAKTGGNYASSLVAQQQASAQGCDQVVFLDAQEGQYVEELGGMNMYFVHDDGTIVTPETGTILEGITRSSIIELAGKLGHQVEERRFSIDEWREGVRSGRIVEIFACGTAAVVTPVGELKWDGGSAPAPASTDLTMRVRQALVDIQYGRAEDTFGWMHRIV

SEQ ID NO: 90495 - DNA, 1089 bp, Xylella fastidiosa Dixon
  CDS (1)..(1089): transl_table=11
gtgtccatttcgttcgatattgcccgctcattgtctaccacttctgatgaagagctctctatgatcctgcaagcgccagggttcggtgttcatttcactgatcatatgattgctatcgcctgggataaggacaatggttggcacgacgcccaggtacgcgcctatgggccattgttgctagatcctgccgctgctgtgctgcactacgggcaagagattttcgaaggaatcaaagcatatcgccatgctgatggttcgatctggacgttccgcccagaggccaacgctcgccgcttgcagcgttcggccaaacgattagtgttgccagagttgccggtggaactgtttacagaatcgttgcgtcaactcattgcagtggatgcccgctgggttccttcagcaccagaaaccagcctttattttcgtcccttcatgattgccacagaagcgtatttaggcgtgcgtgctgcgcagcacgcctcttactacctgatcgccagccctgctggcccgtatttcgctaaaggcgttgctcccgtgtcgatctggttgtcgacagactgtgcccgtgctgccctagggggcacgggtgcggtgaagtgtggcggcaattatgccgcctccttgctgccgcaacaggtcgcgcaggcccagggatgctctcaggtactgttccttgatccggttgagggcaaatacctggaggagctgggagggatgaatgtgtttctcgtctacacagacggcaccttggtcacaccagcgttgtctggcagcatcctcgaaggtatcacccgcgagagtatcttgcagcttgctcgtgatcgagggatgtgtgttgaggaacgtaaggtagcaattgaggagtggaaagagggcgtggtttccggtgcgatcagcgaggtattcgcttgcggtacggctgctgtgatcactccaattggtgaattgaaagcggagggtttttcggtcggaaacatcaacgcaccacctggcgaagttactctgtcgttgcgcaaggaactgaccgacatccagtacggccgtttgccagaccgttatgggtggatgacgtgtttgaaggaataa

SEQ ID NO: 90496 - protein, 362 aa, Xylella fastidiosa Dixon
MSISFDIARSLSTTSDEELSMILQAPGFGVHFTDHMIAIAWDKDNGWHDAQVRAYGPLLLDPAAAVLHYGQEIFEGIKAYRHADGSIWTFRPEANARRLQRSAKRLVLPELPVELFTESLRQLIAVDARWVPSAPETSLYFRPFMIATEAYLGVRAAQHASYYLIASPAGPYFAKGVAPVSIWLSTDCARAALGGTGAVKCGGNYAASLLPQQVAQAQGCSQVLFLDPVEGKYLEELGGMNVFLVYTDGTLVTPALSGSILEGITRESILQLARDRGMCVEERKVAIEEWKEGVVSGAISEVFACGTAAVITPIGELKAEGFSVGNINAPPGEVTLSLRKELTDIQYGRLPDRYGWMTCLKE

SEQ ID NO: 90497 - DNA, 1074 bp, Croceibacter atlanticus HTCC2559
  CDS (1)..(1074): transl_table=11
atggaatcaatgacagatgctccaattaaaattacgaaaactacagcttctaaattagaacaggtagactttagtaatttaacattcgggaaaaattttacagaccacatgtttgtgtgcgactataaaaatggcgaatggcagacaccagagattgttccttacggcccaattactatggagccgtcagctaaagtgtttcactacggtcaagccgtttttgaaggcatgaaagcctttaaggatgataatgatgatgtgtttttgtttagaccaaaagacaatttagatagaattaataagtctgccaagcgtatggctataccagcatttccagaatcttactttatggaaggcttacaagcgctcttaaatttagatcgtaattggattaaagctggagcaggaaactctttatacataagaccttttgtaattgcaacagagtctggtgtatctgcatctccatcgtcgtcttataggtttatgataatttgtgcgccagcaaacgcatattacaaaggtgaagtaaaagtactgtttgccgaaaagtatagccgatctgcagatggtggtgttggttatgcaaaagcagcaggaaactacggtgcgcaatttttcccaacaagtttagcacaagcagaaggttttcagcaaattatctggacagatgctaaaactcacgagtatttagaggaagcaggtacaatgaatattttctttagagtaaatgacacgttactaacagcacctataagcgaccgtattttagatggtattacacgtaagagtttaatacaaattgctgaagataaaggtatagatgtacaagtaagaccagtatctgttaaggaaattgtggaggctgctaaaaatggatctttaaaagaaatatttggtgcaggtactgctgcaactattaatcctatttctggatttggacataaaggcgagacttttgatttaccaaaattagaatcttcttacgcttctaacttcaaaaaggagttaatggctatacaatacaacactaaagatgatccttatggttggagacataaagtattgtcttaa

SEQ ID NO: 90498 - protein, 357 aa, Croceibacter atlanticus HTCC2559
MESMTDAPIKITKTTASKLEQVDFSNLTFGKNFTDHMFVCDYKNGEWQTPEIVPYGPITMEPSAKVFHYGQAVFEGMKAFKDDNDDVFLFRPKDNLDRINKSAKRMAIPAFPESYFMEGLQALLNLDRNWIKAGAGNSLYIRPFVIATESGVSASPSSSYRFMIICAPANAYYKGEVKVLFAEKYSRSADGGVGYAKAAGNYGAQFFPTSLAQAEGFQQIIWTDAKTHEYLEEAGTMNIFFRVNDTLLTAPISDRILDGITRKSLIQIAEDKGIDVQVRPVSVKEIVEAAKNGSLKEIFGAGTAATINPISGFGHKGETFDLPKLESSYASNFKKELMAIQYNTKDDPYGWRHKVLS

SEQ ID NO: 90499 - DNA, 1080 bp, Erythrobacter sp. NAP1
  CDS (1)..(1080): transl_table=11
atgcaattcgagactattcctcacccctcacccacacctgatgcggcccgcgaagccgccattgccgaccccggtttcggcaaggtcttcaccgatcacatggtcacgatcgactatgacgaggacaagggcggctggcattccgcgcgcatcggtccgcgtgagccgattgcgctcgatccggcggcttccgtcctgcactatgcgcaggagatcttcgaagggatgaaggcgtttcgccacgctgacggcggtctcgccatgttccgcccggagcaaaacgcgcgccgcttcaacgaaagcgccaagcgcatggcgatgcccgaaatccccgaggacgtgttcctcgacgcggtgaaactcgcggtgaagaccgatgcgaagtggatgccgggcgtcgaaggcggctcgctctacatccgccccttcatgttcgcctccgaagcgttcctgggcgtgcgtccggccaagcagtacaagttcgtcgtgatcctcgtctccagcggcaattacttcaagggcggcgtgaacccggtgaagatctgggtcagccaagactacgtgcgcgcagcccccggcggcaccggcgcagccaagaccggtggcaactacgccgccagcctcgtcccgcaggcagaagccattgcgcatggctgcgatcaggtcgtcttcctcgatgcggtcgagaagaagtggatcgaggagctgggcggcatgaatctgttcttcgtgcgcagcgacggcagcgtcatcaccccgccgctcaccggcacgatcctgcccggcatcacccgcgacagcctgatcgcgatgctgcgcgaggaaggcctcgacgtgcgagaggagccctactccatcgcccaatggcgcgaggaagccgagagcggcaagctgctcgaaacgctcgcatgcggaaccgctgcggtcgtgaccccggtcggcaccgtcgcctcccccgctggcgagttcaccatcggcaccggcggtatcggtcagatggccgagaagatgcgcaagaagctcgtcggcattcagaacggcgcggtcgacgacaagcacggctgggtgatgcgggtttga

SEQ ID NO: 90500 - protein, 359 aa, Erythrobacter sp. NAP1
MQFETIPHPSPTPDAAREAAIADPGFGKVFTDHMVTIDYDEDKGGWHSARIGPREPIALDPAASVLHYAQEIFEGMKAFRHADGGLAMFRPEQNARRFNESAKRMAMPEIPEDVFLDAVKLAVKTDAKWMPGVEGGSLYIRPFMFASEAFLGVRPAKQYKFVVILVSSGNYFKGGVNPVKIWVSQDYVRAAPGGTGAAKTGGNYAASLVPQAEAIAHGCDQVVFLDAVEKKWIEELGGMNLFFVRSDGSVITPPLTGTILPGITRDSLIAMLREEGLDVREEPYSIAQWREEAESGKLLETLACGTAAVVTPVGTVASPAGEFTIGTGGIGQMAEKMRKKLVGIQNGAVDDKHGWVMRV

SEQ ID NO: 90501 - DNA, 1074 bp, delta proteobacterium MLMS-1
  CDS (1)..(1074): transl_table=11
atggaaattaaaaagcagcttttagcgccgacggagcgccggagcctgcccgatgaaaaagagtttggttttggccggatattcagcgaccatatgctggtcatgccctatgacgccgatctgggcggctggcaggagccggttatcaagccctatgagaatttctccctcgatcccgccgccatggtgctccattacgggcaggccatcttcgaaggcctgaaggcctaccggggccgggaacaccgcatctgtctgttccggccccaggccaacctggagcgcatgaaccgctcggcggcccggatgtgcatgccgccgctgcccctggatatcgccatggagtgcctgcgggaactggtccgcaccgacgccgactgggtacccgacggcgaccagggcgccaccctctatatccgtcccaccatggtggccaccgaggccggactgggagtgcggccggcccggcagtacctgttctttattattttaagcccggtgggggcctattatcccgagggcttcaacccggtgcggatctacgtcaccgacacccacgtgcgggcggtacccggcggagtgggcgaggccaagaccgccggcaactacgccgccagtattatggcggcggtggaggcccagaagctgggcttcacccaggtgctgtggctggacgcctgccaccgccactacgtggaagaggtcggcaccatgaatatcttcttcgtgctcaacgactgcgtaatcaccccgccgctcaccggcagcatcctgccggggatcacccgggaatcggtgctggagttgctgcgggactggggattacgggtggaagagcgccagatcaccatcgacgaggtcttcaccgccaaccagcaaggcgagttgcaggaggtcttcggcaccggcaccgcggcggtgatctcaccggtgggctcactccactaccagggacgggactgcgaaatcaaccagggccaaaccggcaaactttcccgccgcctgttcgacgagctgaccgccatccagtacggccacaagcccgacccccacggttgggtaaccaccctgtag

SEQ ID NO: 90502 - protein, 357 aa, delta proteobacterium MLMS-1
MEIKKQLLAPTERRSLPDEKEFGFGRIFSDHMLVMPYDADLGGWQEPVIKPYENFSLDPAAMVLHYGQAIFEGLKAYRGREHRICLFRPQANLERMNRSAARMCMPPLPLDIAMECLRELVRTDADWVPDGDQGATLYIRPTMVATEAGLGVRPARQYLFFIILSPVGAYYPEGFNPVRIYVTDTHVRAVPGGVGEAKTAGNYAASIMAAVEAQKLGFTQVLWLDACHRHYVEEVGTMNIFFVLNDCVITPPLTGSILPGITRESVLELLRDWGLRVEERQITIDEVFTANQQGELQEVFGTGTAAVISPVGSLHYQGRDCEINQGQTGKLSRRLFDELTAIQYGHKPDPHGWVTTL

SEQ ID NO: 90503 - DNA, 1074 bp, delta proteobacterium MLMS-1
  CDS (1)..(1074): transl_table=11
atggaaattaaaaagcagcttttagcgccgacggagcgccggagcctgcccgatgaaaaagagtttggttttggccggatattcagcgaccatatgctggtcatgccctatgacgccgatctgggcggctggcaggagccggttatcaagccctatgagaatttctccctcgatcccgccgccatggtgctccattacgggcaggccatcttcgaaggcctgaaggcctaccggggccgggaacaccgcatctgtctgttccggccccaggccaacctggagcgcatgaaccgctcggcggcccggatgtgcatgccgcccctgcccctggatatcgccatggagtgcctgcgggaattggtccgcaccgacgccgcctgggtacccgacggcgaccagggcgccaccctctatatccgtcccaccatggtggccaccgaggccggactgggagtgcggccggcccggcagtacctgttctacattatcctaagtccggtgggggcctactaccccgagggcttcaacccggtgcggatctacgtcaccgacacccacgtgcgggcggtacccggcggagtgggcgaggccaagaccgccggcaactacgccgccagtattatggcggcggtggaagcccagaagctgggcttcacccaggtgctgtggctggacgcctgccaccgccactacgtggaagaggtcggcaccatgaatatcttctttgtgctcaacgactgcgtaatcaccccgccgctcaccggcagcatcctgccggggatcacccgggaatcggtgctggagttgctgcgggactggggattacgggtggaagagcgccagatcaccatcgacgaggtcttcaccgccaaccggcaaggcgagttgcaggaggtcttcggcaccggcaccgcggcggtgatctcaccggtgggctcactccactaccagggacgggactgcgaaatcaaccagggccaaaccggcaaactttcccgccgcctgttcgacgagctgaccgccatccagtacggccacaagcccgacccccacggttgggtaaccaccctgtag

SEQ ID NO: 90504 - protein, 357 aa, delta proteobacterium MLMS-1
MEIKKQLLAPTERRSLPDEKEFGFGRIFSDHMLVMPYDADLGGWQEPVIKPYENFSLDPAAMVLHYGQAIFEGLKAYRGREHRICLFRPQANLERMNRSAARMCMPPLPLDIAMECLRELVRTDAAWVPDGDQGATLYIRPTMVATEAGLGVRPARQYLFYIILSPVGAYYPEGFNPVRIYVTDTHVRAVPGGVGEAKTAGNYAASIMAAVEAQKLGFTQVLWLDACHRHYVEEVGTMNIFFVLNDCVITPPLTGSILPGITRESVLELLRDWGLRVEERQITIDEVFTANRQGELQEVFGTGTAAVISPVGSLHYQGRDCEINQGQTGKLSRRLFDELTAIQYGHKPDPHGWVTTL

SEQ ID NO: 90505 - DNA, 1101 bp, Janthinobacterium lividum
  CDS (1)..(1101): transl_table=11
atgaccacttccacaccgaatctcgtcgtcactccatccgcccaccccttgtccgacgccgagcgcgccgcgcgcatggtcaatcccgcctttggccgcatcttcaccgaccacatggtggtgatcccttaccgcgacggcaagtggcagcagggcgaactgaaggcttacggcccgctgatgctggacccgtccgcctcgtcgctgcactatggccaggccatcttcgaaggttataaagcgtttgcccagcccgatggcagcatcaagactttccgtccagaacaaaatgccgagcgcttcaaccgcagcgccgcgcgcctggccatgccggccattcccgtcgagctgttcctggaagcgggcgatgcgctgatcgcgcaagaccgcaactgggtgccaaagaacacgggcgagagcctgtacatgcgtccgctgatgatcgccaccgacccgtacctgggcgtgcgtccatcggaagaatacctgttcgtgctgtttgcctcgccggccggcgcctacttcccgaaaggcgtgaaacccgtcaccgtgtggatcagcgaagacttcgtgcgcgccgcgccgggcggcaccggtgaagcgaaatgcgcgggcaactacgcggccagcctgatggcccagtcgcaagcgcaagaaaagggctgcgaccaggtcgtgtggctggacgccgtgcaccgcgaattcatcgaagaaatgggcggcatgaacttgttcttcgtctacaaggatggcgagaaggtcaccgtcgtgacgccggaactgacgggcaccttgctgccaggtatcactcgccgcagcctgctggaaatggcgaaagatctcggctatgcgacggaagagcgtaaattgtccgtccagcaatggcgcgatgacatcgcctcgggccgcatgaccgaagtgttcgcctgcggcacggccgccgtcatcacgccggtgggcgtggccaaggccaacggctttgaaatgaccatcaacaacaatgaaaacggcgccgtcaccctggccctgcgcgaagccctgctgggcttgcagcatggcacggcaccggatacgcatggctggatgcacaccgtttgctag

SEQ ID NO: 90506 - protein, 366 aa, Janthinobacterium lividum
MTTSTPNLVVTPSAHPLSDAERAARMVNPAFGRIFTDHMVVIPYRDGKWQQGELKAYGPLMLDPSASSLHYGQAIFEGYKAFAQPDGSIKTFRPEQNAERFNRSAARLAMPAIPVELFLEAGDALIAQDRNWVPKNTGESLYMRPLMIATDPYLGVRPSEEYLFVLFASPAGAYFPKGVKPVTVWISEDFVRAAPGGTGEAKCAGNYAASLMAQSQAQEKGCDQVVWLDAVHREFIEEMGGMNLFFVYKDGEKVTVVTPELTGTLLPGITRRSLLEMAKDLGYATEERKLSVQQWRDDIASGRMTEVFACGTAAVITPVGVAKANGFEMTINNNENGAVTLALREALLGLQHGTAPDTHGWMHTVC

SEQ ID NO: 90507 - DNA, 1206 bp, Aspergillus niger
  CDS (1)..(1206)
atgggttctgttgcgccttctcctgcggagctcgacgcctccgtcgtcaaggttactcgctcgaccaaccttcgcgatgtgcctcttcctggctcccccgaggaattgagccactcccactgcaccgaccacatggtcactgtgcgttggaccgtcgccaatggctgggaaactcctgaggtgcggccattcgagaatttgagcatcccgcccacggcctcgtgcttgcactatgccaccgaatgtttcgagggtatgaaggtgtaccggggatttgatggaaagctgcgtctgttccggcctgactgcaatggcgagcgtctgatgaacagcgctaagcggtcttctttgccctcgttccggtatgaggagatcaagcgcctcattgctaagttgatgcagatagatggacctcgttggctacccaaggatcaacccggtcgtttcctctaccttcgtcccgcgatgattggcagcggcccacacctgggcgtccagacacccaaggaagcccttcttttcatcatcgccgtgccgtggcccgacccctcgaagaaggtgtccgagcagcctggcgttccgtctgggctgaagctttacgcttcccagcctgacagcatccgcgcttggcctggtggtttcggatacgcgaagctcggcgccaactatggtccgtcgttgctggcgcatggcaaggcacaggagcttgggttcgatcaggtgctgtggctgttcggtgaggaccgtcaggtgactgaagcgggtgctagcaacttcttcgtggtgtgggagaacaaggagacgaagaagctggagctggttactccatcgttggagagtcagctcatccttccgggtgttactcgtcgtagtgtgctggagttggccagggagcgtctgactcagtcggtgggcaagctcgctgctgttgatgttgtcgagaagcacttcactattggcgatgttgaggaggcttggaaggaggggagaattgtggagtcgtttgtctgtggtactgctttcttcgtcactcctgtcaagctcattcgcaacggagatgtagatatgaacatgcaggaggccggtgctgaacgcgccggatatgctgctcagatcaaggcctggctcgaggccatcatgttcggcatgaagggcgaggcggcccatgagtggggatatgtcattgatggtgaagttgaacaataa

SEQ ID NO: 90508 - protein, 401 aa, Aspergillus niger
MGSVAPSPAELDASVVKVTRSTNLRDVPLPGSPEELSHSHCTDHMVTVRWTVANGWETPEVRPFENLSIPPTASCLHYATECFEGMKVYRGFDGKLRLFRPDCNGERLMNSAKRSSLPSFRYEEIKRLIAKLMQIDGPRWLPKDQPGRFLYLRPAMIGSGPHLGVQTPKEALLFIIAVPWPDPSKKVSEQPGVPSGLKLYASQPDSIRAWPGGFGYAKLGANYGPSLLAHGKAQELGFDQVLWLFGEDRQVTEAGASNFFVVWENKETKKLELVTPSLESQLILPGVTRRSVLELARERLTQSVGKLAAVDVVEKHFTIGDVEEAWKEGRIVESFVCGTAFFVTPVKLIRNGDVDMNMQEAGAERAGYAAQIKAWLEAIMFGMKGEAAHEWGYVIDGEVEQ

SEQ ID NO: 90509 - DNA, 1239 bp, Aspergillus niger
  CDS (1)..(1239)
atgaagtcatttcaattcgctcgtcgcagggcgttgcaaagcctcgtcgcaccgcgtgcctttcaatctcccgcaacggctcagttatggaagagatgcttcagtgctacttcagctgctgcctcccaactagccccccttgacccctcgaaacttaccgtctcgaagacgactactcctaaggaattgactgccccgaaggacttggtctttggcaagactttcaccgatcatatgctgtcgattgaatggaccgcgacggagggatggcactccccccagattgttccgtaccagaacctcagtctcgacccgtcggcttgtgttttccactatgcgttcgagtgttttgagggtatgaaggcctacaaagacgagtctggtcagatccgcttgttccgtcccgacaagaacatggcgcgcttgaacaaatcctcgaagcgcattgctttgccttcctttgatggcgaggccctcaccaagctgattggagagtttgtgaagctggacagcaggttcatcccaagtgagcggggctactcactgtacttgcggcccacgatgattggaactcaaaagaccctcggtgtgggacccccgggctctgctcttttgttcgtgattgcaagcccggttggcccgtattaccctactggcttcaaggccatttcgttggaggctaccgactatgctgtcagagcctggcctggtggtgttggcgacaagaagctgggtgccaattacgccccctgcgttctccctcagctggaagcggcgtcccgtggcttccagcagaatctgtggctctttggagaggaagaatatattactgaggtcggcaccatgaaccttttcgttgccttgaagaacaaggaaactggccagaaggaactgatcactgcgcctctggacggaacgatcctcgagggtgtgaccagagactccgtgctggggctggccagggaaaggctggtgcccaagggctggaacatctccgagcgtaagctcaagatgtccgaagtcgccgaagcggccgaggagggcagaatgatcgaggtgttcggtgccggtaccgcagctattgtcagtcccgtgcggacaatcagctaccggggtaagctggtcgactgcggcctgaaggaaactgaggaagcaggcgaaattgctcttcagatgaagaactggatcgagggtatccagtatggtgatgagagtcacccttggagctatgtcctctaa

SEQ ID NO: 90510 - protein, 412 aa, Aspergillus niger
MKSFQFARRRALQSLVAPRAFQSPATAQLWKRCFSATSAAASQLAPLDPSKLTVSKTTTPKELTAPKDLVFGKTFTDHMLSIEWTATEGWHSPQIVPYQNLSLDPSACVFHYAFECFEGMKAYKDESGQIRLFRPDKNMARLNKSSKRIALPSFDGEALTKLIGEFVKLDSRFIPSERGYSLYLRPTMIGTQKTLGVGPPGSALLFVIASPVGPYYPTGFKAISLEATDYAVRAWPGGVGDKKLGANYAPCVLPQLEAASRGFQQNLWLFGEEEYITEVGTMNLFVALKNKETGQKELITAPLDGTILEGVTRDSVLGLARERLVPKGWNISERKLKMSEVAEAAEEGRMIEVFGAGTAAIVSPVRTISYRGKLVDCGLKETEEAGEIALQMKNWIEGIQYGDESHPWSYVL

SEQ ID NO: 90511 - DNA, 1233 bp, Oryza sativa
  CDS (1)..(1233)
atggagctcctcccgcgtgtgggtgtggccgcccccggtcccggacgcggcggcgcgtcgccgtccccgacgcgccgtcatcgcgcgccctctcaccccattctgaagcgatcggcggcggtttgcggcgcagtcgccgtctgcagaggaggggctgtcgccaggaggagccggtggtcaactctggtgaccgcagcatattacacaggaactgctgacctggtcgactttaactgggaaactcttgggtttcaacccgtgccgactgactttatgtatgtgatgaaatgttccgaggaaggggtgttctccaagggtgaattggtgccatatgggccaatagaactgaacccagcagctggagtgttgaattatggtcagggtttacttgaaggtctgcgagcacatagaaaagaggatggatcagtccttctatttcgtcctgatgaaaatgctttacggatgagagtaggcgcagaccggttatgtatgcctgcaccaagtgtagagcagttcctagaagctataaagctaacaattttagcaaacaagcgctgggtaccccctactggcaaaggttctttatatatcagaccgctgctgattggaagtggggctatcctcggtgttgcaccagccccagagtacacatttgttgtctttgcttgcccagttgggcactattttaaggatggcttatctccaatcagcttgttaaccgaggaagaatatcagtgtgcggcaccaggtggaactggtgatataaagactatcggaaattatgcttcagccgtttatgctaaagaaagagctaaggagagaggtcattctgatgttctttacttggatccagtgcataaaaagtttgttgaggaactttcgtcctgtaatatattcatggtgaaggacaacattatttctactccactattaacgggaacagttcttcctggcatcacaagaagaagtataattgaatacgcccgtagccttggatttcaggttgaagagtgtcttattacaatagatgagttgcttgacgctgatgaagttttctgtactggaacttctgtggtactatcctctgttggttgcatagtgtaccaggggagaagagtggagtatgggaaccagaagttcagaactgtgtctcagcaactctattcagcacttacggctatccagaaaggcctcgtggaggacagtatgggatggactgtgcaactgaattag

SEQ ID NO: 90512 - protein, 410 aa, Oryza sativa
MELLPRVGVAAPGPGRGGASPSPTRRHRAPSHPILKRSAAVCGAVAVCRGGAVARRSRWSTLVTAAYYTGTADLVDFNWETLGFQPVPTDFMYVMKCSEEGVFSKGELVPYGPIELNPAAGVLNYGQGLLEGLRAHRKEDGSVLLFRPDENALRMRVGADRLCMPAPSVEQFLEAIKLTILANKRWVPPTGKGSLYIRPLLIGSGAILGVAPAPEYTFVVFACPVGHYFKDGLSPISLLTEEEYQCAAPGGTGDIKTIGNYASAVYAKERAKERGHSDVLYLDPVHKKFVEELSSCNIFMVKDNIISTPLLTGTVLPGITRRSIIEYARSLGFQVEECLITIDELLDADEVFCTGTSVVLSSVGCIVYQGRRVEYGNQKFRTVSQQLYSALTAIQKGLVEDSMGWTVQLN

SEQ ID NO: 90513 - DNA, 1248 bp, Arabidopsis thaliana
  CDS (1)..(1248)
  misc_feature (254)..(254): n is a, g, c or t
atggagagaagcgccgttgcctcaggttttcatagaaattacatcctctgtgcttcacgcgccgccacttccacgacgcgcctccactctttgtcctccctcagaaactttccctcttcctctctcaggattcgtcactgtccttctcccatctcttccaatttcatcgttagtgaagtttcccgaaaccgacgatgcgacgccgtttcttccagcaccaccgatgtgactgaattagccgaaattgattgggncaagattgattttgggcttaaaccaacggattacatgtacgccatgaaatgtagccgtgatggtgaattctctcaaggtcaattgcaaccttttggtaacattgacattaacccagcagctggtgttctcaactatggacaaggtttgtttgaaggtctaaaagcttacagaaaacaagatgggaatattctactcttccgtcctgaggagaatgcgatccgaatgagaaatggcgctgaaagaatgtgtatgccttctccaaccgttgaacagtttgttgaggctgtgaaaactactgtattagctaacaaacgctggattccacctccaggtaaaggatcattatacataaggccattgctaatgggaactggagctgttcttggtcttgctcctgctcctgaatacactttccttatctttgtttcacctgtcgggaactacttcaaggaaggtgttgcgccgatcaacttaattgttgaaactgaattccatcgtgcaactcccggcggtactggaggtgttaaaaccatcggtaattatgctgcagtcttgaaggctcagtcgattgcgaaagctaaagggtattctgatgttttataccttgattgccttcacaaaagatatcttgaggaggtttcatcgtgcaatattttcattgtgaaggataatgtgatatctactcctgaaattaaaggaaccatcttgcctggaattacccggaagagtatcatcgaagtagctcgtagccaaggtttcaaggtggaggaacgaaatgtgacagttgatgaattggtagaagcagacgaggttttctgcacaggaaccgccgttgttttatctccggttggaagcatcacttacaaaagccaaaggttttcttatggagaagatggctttggaacagtctcgaaacaactctacacttccttgacgagcctgcaaatgggtctgagcgaagataacatgaactggactgttcaattgagttaa

SEQ ID NO: 90514 - protein, 415 aa, Arabidopsis thaliana
  misc_feature (85)..(85): The Xaa at location 85 stands for Ala, Asp, Gly, or Val.
MERSAVASGFHRNYILCASRAATSTTRLHSLSSLRNFPSSSLRIRHCPSPISSNFIVSEVSRNRRCDAVSSSTTDVTELAEIDWXKIDFGLKPTDYMYAMKCSRDGEFSQGQLQPFGNIDINPAAGVLNYGQGLFEGLKAYRKQDGNILLFRPEENAIRMRNGAERMCMPSPTVEQFVEAVKTTVLANKRWIPPPGKGSLYIRPLLMGTGAVLGLAPAPEYTFLIFVSPVGNYFKEGVAPINLIVETEFHRATPGGTGGVKTIGNYAAVLKAQSIAKAKGYSDVLYLDCLHKRYLEEVSSCNIFIVKDNVISTPEIKGTILPGITRKSIIEVARSQGFKVEERNVTVDELVEADEVFCTGTAVVLSPVGSITYKSQRFSYGEDGFGTVSKQLYTSLTSLQMGLSEDNMNWTVQLS

SEQ ID NO: 90515 - DNA, 1288 bp, Arabidopsis thaliana
  CDS (57)..(1127)
gacacgcctctcttcttctgcttcacttcactactgctttctctatttctccatagatggctccttcttcatcacctcttcgtactacaagtgaaacagatgaaaaatatgcgaatgtcaaatgggaagagcttggattcgctctgactccaatagattatatgtatgtagccaaatgcagacaaggagagggctttacacaagggaagattgttccttatggcgacatttcaattagcccttgttctccgattctcaattacggccagggactatttgaaggtctcaaagcttacagaacagaagacgaccggattaggattttccggcctgaccaaaacgctcttcgcatgcaaactggtgcggagaggctttgtatgacacctcctactctagaacaatttgtcgaggcagttaagcaaactgtgcttgccaacaagaaatgggttcctcctccgggtaaaggaactctgtatataaggcctctgctactagggagtggtgctacccttggagtagctccagcacctgaatacacttttctcatatatgcatctcccgtaggagattaccataaggtaagctcaggcttgaacctcaaagttgatcataagtatcaccgagtccattcaggtggaacggggggtgtcaagagctgcacaaactattctccagttgtgaaatcgttactcgaagcaaagtcagcgggtttctctgatgtcctgttcctggatgcagcaactggtagaaacatcgaagagcttactgcttgtaacatcttcattgtcaagggaaacattgtatccaccccaccaacttcaggaaccattttacctggagtcacgaggaaaagcataagtgagctggctcatgatattggctaccaggtcgaagaacgcgatgtatctgtggatgagctactagaggcagaagaagttttctgcacagggactgcagtggtcgttaaagctgttgaaactgtgaccttccatgacaaaaaggtaaaatacaggacaggagaagcagcattgtctacgaagcttcactcgatgttgaccaatattcagatgggagttgttgaagataagaaaggttggatggtggacattgatccttgtcaaggttgaaagaagaagtttagaaagctgatgattctatgtactcaaacgtgtatcttttcttctcatgtgttggtttattaggattcttctttttttatcatgggacttgtaataaataatgggtaactcttaagatacaagaggcggcagtatgttcagaaaaaaaa

SEQ ID NO: 90516 - protein, 356 aa, Arabidopsis thaliana
MAPSSSPLRTTSETDEKYANVKWEELGFALTPIDYMYVAKCRQGEGFTQGKIVPYGDISISPCSPILNYGQGLFEGLKAYRTEDDRIRIFRPDQNALRMQTGAERLCMTPPTLEQFVEAVKQTVLANKKWVPPPGKGTLYIRPLLLGSGATLGVAPAPEYTFLIYASPVGDYHKVSSGLNLKVDHKYHRVHSGGTGGVKSCTNYSPVVKSLLEAKSAGFSDVLFLDAATGRNIEELTACNIFIVKGNIVSTPPTSGTILPGVTRKSISELAHDIGYQVEERDVSVDELLEAEEVFCTGTAVVVKAVETVTFHDKKVKYRTGEAALSTKLHSMLTNIQMGVVEDKKGWMVDIDPCQG

SEQ ID NO: 90517 - DNA, 1074 bp, Medicago truncatula
  CDS (1)..(1074)
atggctcctccttctattttaagggacactgaagatggttctgaaagtgatatgggtgaaaattatgctgacatcaattgggaaggacttagttttagtctgactcaaacagattacatgcatgtcatgaaatgcacaaaaggagaaaagttttctcaaggatccctcattcgctacggaaacattgagataagcccggctgctggtatcataaactatggacagggaatcttcgagggactaaaagcatatagaacagaagatgggcgaatccttcttttccgaccggaggagaatgctctacgcatgaagatgggggctgataggttgtgtatgccgtcaccatcggttgagcagtttgttgatgctgttaagcaaacagttcttgccaataaacgttgggtacctcctccagggaaagggacgctttatcttaggcctttgctgatgggaacaggagctgcattaggcctggctccatcacctgagtacacatttctcatttattgctcccctgttggaaagtatcacgagggaggaagactaaacttaaaagtggaggataaatttcatcgatcaatagctggcagcggtggaacaggaggaatcaagagtgttactaattatgccccaatatatactgcagtaactgaagcaaaagccaatggattttctgatgtcttgttcttggattcagcaactggtaaaaatattgaggaggctactgcgtgcaatatatttgttgtgaaggaaaatgatatcttcactccggcaatagatggatctattctgcctggggtcacacgaaaatccatcatagacattgccattgatttgggttataaggtcatagaacgttccatatcagtggaggaaatgatgagcgctgatgaagtgttctgcacaggaactgcagtggttgttacctctgttgcatctgtaacatataaggaaacaagagctgaatataaaacaggcgcagaaacgttgtctcaaaaactacaaggaatactggttggaatacaaacagggtgtattgaggacaaaaagtcatggacagtccaagtagattga

SEQ ID NO: 90518 - protein, 357 aa, Medicago truncatula
MAPPSILRDTEDGSESDMGENYADINWEGLSFSLTQTDYMHVMKCTKGEKFSQGSLIRYGNIEISPAAGIINYGQGIFEGLKAYRTEDGRILLFRPEENALRMKMGADRLCMPSPSVEQFVDAVKQTVLANKRWVPPPGKGTLYLRPLLMGTGAALGLAPSPEYTFLIYCSPVGKYHEGGRLNLKVEDKFHRSIAGSGGTGGIKSVTNYAPIYTAVTEAKANGFSDVLFLDSATGKNIEEATACNIFVVKENDIFTPAIDGSILPGVTRKSIIDIAIDLGYKVIERSISVEEMMSADEVFCTGTAVVVTSVASVTYKETRAEYKTGAETLSQKLQGILVGIQTGCIEDKKSWTVQVD

SEQ ID NO: 90519 - DNA, 1275 bp, Aspergillus oryzae
  CDS (1)..(1275)
atgaccgaagcgcatgctcgtaagctcgccgcagagctgcaaggtgcaacccgagagcaggctatggctaaggtcatggaagacgccgaccagaaccagcttgatgcctctgtggtcaagatcactcggtcgacaaatctccgcccggttcctgaaccgggctcgcccgaggaattgagccattcgtactgtactgaccatatggtcactgcccgatggaccgtggccaatggctgggagacccccgaagtgaagccctttgagaatcttagcatccctcccacggcttcttgcttgcactatgccactgaatgctttgagggtatgaaggtgtacagaggatatgatggcaaactgcgcctgttccgcccggattgcaatggagagagattgctctcgagtgctcaacgagcctctttgcccagcttccggtatgaggagctgaaggttctcatcgctaagttgatgcagatcgatggaccacgctggctccccaaggaccaacccggtcgtttcctctatctccgtcccacaatgattggtagcggccctcatctgggtgttcagactcccaaggaagctctccttttcatcattgccgtgccatggcccgacccatccaagctgaagaagcctgaagaaggcactaaacccggattgaagcttcttgcttctacacctgatactatccgtgcctggcccggtggtttcggctatgcaaagctcggagcgaactacggtccttcgttggttgcgcacggtaaagctcaagccattggctttgatcagattctttggttgtttggtcaggaccgtcaggtaactgaggccggtgctagcaacttcttcattgtttgggagaacaaggaaacaggaaagatcgagctcgtcaccgctcccctggaaaaccagttgattcttcccggtgttactcgccgtagtgtcctccaattggcacgcacagagctgtcaaagcctactggttcccttgccccagttgaggttgttgagagagacttcactattagcgaggtcgaacaggcttggaaggagggccgcatcatcgaagctttcgtctgcggcactgccttcttcgttacgccagttaagcttatccggaatggtgacgtcgatatggacatgctggaggctggtgcagcccgtggaggatatgcagtccagatcaagtcttggttggaggccatcatgtacggtaaggatggtaaggagaatgacgaatggtcttacatcattgagggggagagcgaaaaataa

SEQ ID NO: 90520 - protein, 424 aa, Aspergillus oryzae
MTEAHARKLAAELQGATREQAMAKVMEDADQNQLDASVVKITRSTNLRPVPEPGSPEELSHSYCTDHMVTARWTVANGWETPEVKPFENLSIPPTASCLHYATECFEGMKVYRGYDGKLRLFRPDCNGERLLSSAQRASLPSFRYEELKVLIAKLMQIDGPRWLPKDQPGRFLYLRPTMIGSGPHLGVQTPKEALLFIIAVPWPDPSKLKKPEEGTKPGLKLLASTPDTIRAWPGGFGYAKLGANYGPSLVAHGKAQAIGFDQILWLFGQDRQVTEAGASNFFIVWENKETGKIELVTAPLENQLILPGVTRRSVLQLARTELSKPTGSLAPVEVVERDFTISEVEQAWKEGRIIEAFVCGTAFFVTPVKLIRNGDVDMDMLEAGAARGGYAVQIKSWLEAIMYGKDGKENDEWSYIIEGESEK

SEQ ID NO: 90521 - DNA, 1239 bp, Aspergillus oryzae
  CDS (1)..(1239)
atgaactcgctgcgtcaattcactcgtcgcaaggcgctacagagcctggctgtccctccgagccagggcttcagcacaattagattatggcagagacatttcaacagtactccagctgttgcttcccggctagctggcattgatccttcaaagcttacggtcaccaaaacgagctcccctaaagaattgacacctgcaaaggatctcgtttttggcaagaccttcactgatcatatgcttgctattgaatggtcagcatccaatggctgggatgcccctcgtattgttccctaccaaaacctcagcttggatccctcggcttgtgtgtttcactatgcatttgaatgctttgaaggcatgaaagcctacaaagacaacaatggccaaattcggctgttccgtccagacaagaacatggagcgcttgaacaagtcttcgtcgcgaattgctctccctaccgttgacggtgaggctctgacccagttggttggggagctcgtgaaactggacagcagattcatccctagtgcccggggatattcactatacctccggcccacaatgatcggcacgcaaagtacccttggagttggaccaccaggatctgcccttttgttcgtcatcgcaagtcccgttgggccttattaccccactggcttcaaagccatctcgctagaggccactgactatgctgttcgagcctggcccggtggtgttggggataaaaagctgggtgctaactacgctccgtgcattgttcctcagttgagcgcagcctcccgaggcttccaacaaaacttgtggcttttcggcgaggaagaatacgtaaccgaggtcggcactatgaacctctttattgcgctgaagaacaaggaaacagggcagaaggaactagtcactgctcctttagatggaaccattcttgagggcgtgacccgtgactctgttttaggacttgcccgggagagattagcaccaaacggctggactgtgtctgaacgcaagattagaatgtctgaggttgctgaggcagcagacgagggtaggttgattgaggtgttcggatctggcaccgcagccatcgtaagccctgtacgaaacatcagctacaaaggcaagatggtcgattgtggcttgaaggaagatgaggaagctggcgagattgcttcccagatgaaaaattggatcgaggggatccagtatggtgatgaagatcacaagtggagctacgtcctgtaa

SEQ ID NO: 90522 - protein, 412 aa, Aspergillus oryzae
MNSLRQFTRRKALQSLAVPPSQGFSTIRLWQRHFNSTPAVASRLAGIDPSKLTVTKTSSPKELTPAKDLVFGKTFTDHMLAIEWSASNGWDAPRIVPYQNLSLDPSACVFHYAFECFEGMKAYKDNNGQIRLFRPDKNMERLNKSSSRIALPTVDGEALTQLVGELVKLDSRFIPSARGYSLYLRPTMIGTQSTLGVGPPGSALLFVIASPVGPYYPTGFKAISLEATDYAVRAWPGGVGDKKLGANYAPCIVPQLSAASRGFQQNLWLFGEEEYVTEVGTMNLFIALKNKETGQKELVTAPLDGTILEGVTRDSVLGLARERLAPNGWTVSERKIRMSEVAEAADEGRLIEVFGSGTAAIVSPVRNISYKGKMVDCGLKEDEEAGEIASQMKNWIEGIQYGDEDHKWSYVL

SEQ ID NO: 90523 - DNA, 1200 bp, Aspergillus oryzae
  CDS (1)..(1200)
atggctccctccgctatcgagtcacagaaaaccaaacccgaagcccctgttgtcaccgagaaacaggccggtcaaccccttgacgcctccaagttgatctacacctacactaccaacccacgcgatgttcccgacgaaacaacagctcattccggcgacgagaccatctgcaccgaccacatggtcgtcgcaacctggaaagcctccacaggctggtcagccccagagttgaagccatacggtccattgaatctcatgcccacagcctcctgcttacactacgctaccgagtgcttcgagggactcaaagtataccgcggctacgacggtaagctccgggtcttccgtccagatcgcaacgccgcccgcttgaacatgtccgcgagtcgtatctccctaccccaagccgacgccgacgagataacaaagctcatattcgccctcctcgaagtcgacggcgcgaaatggctccccaaggagagagccggtaacttcctgtacttgagaccgacactcatcggcacccagccgactatcggtcttgtgaagtccaagcaagcgatcttatacatcatcctgagctatatgcctcgacaggatactccacccgggggaatgaggcttttgacttcaccagaagatatggttcgttcttgggtgggtggattcggctatgccaaggttggtgcgaattatgggccgtcggtcctcgccacgcaagatgctatgcaacgtggctttcatcaaatactctggctatacggtgatcagggtgagtgtacagaggcgggcggtagtaatttctttgtggtctggcaccgcaaggatggcaagaaggaaattatcacggcgccgttagatgaccggcttattctggatggtgttacccggcgcagctgcttggagttggcaaaggaaagactcagtgatgagtttgaagtcactgagcgcaagtatactattggtgagctgatcgaggccgaggcggaaggccgactgctggagtcgtttgctgcgggcacggcgtggttcatcacccctgtctcggcgattcagcaccgagagcatgatattcctatcccgacgggacctgatggtggacccggtgaggtcactggtaagatcaagggctggttgagcgatatcatgtatgggcgtgcagagcatgagtggggtattgtggtgtctgagagggaatag

SEQ ID NO: 90524 - protein, 399 aa, Aspergillus oryzae
MAPSAIESQKTKPEAPVVTEKQAGQPLDASKLIYTYTTNPRDVPDETTAHSGDETICTDHMVVATWKASTGWSAPELKPYGPLNLMPTASCLHYATECFEGLKVYRGYDGKLRVFRPDRNAARLNMSASRISLPQADADEITKLIFALLEVDGAKWLPKERAGNFLYLRPTLIGTQPTIGLVKSKQAILYIILSYMPRQDTPPGGMRLLTSPEDMVRSWVGGFGYAKVGANYGPSVLATQDAMQRGFHQILWLYGDQGECTEAGGSNFFVVWHRKDGKKEIITAPLDDRLILDGVTRRSCLELAKERLSDEFEVTERKYTIGELIEAEAEGRLLESFAAGTAWFITPVSAIQHREHDIPIPTGPDGGPGEVTGKIKGWLSDIMYGRAEHEWGIVVSERE

SEQ ID NO: 90525 - DNA, 1314 bp, Cryptococcus neoformans
  CDS (1)..(1314)
atgtccagactcgcccctagactcgccacagctgcctgcgctgtccgacagcccgctgccactcgtgctattgctgccgcgtttgccgctccgttgaccaaacagattagggggtaccgatcccaacctatgagggatgtcatgaccggcgagatcatccagttgcccgacatcgacccctcaactgtaaaggtcgacttgacgacccacgccaaatcacgtctccccaactctaaactcgttttcggccacaccttcaccgaccacatgctcaccattccttggtctagcaggagtggatggggaacccctcatatcaagccttacggtccactggagctcgacccttcatcgaccgttttccattacgcattcacattgttcgagggtatgaaggcctacaggcaggaggacggtactattagattgttcaggcccgacatgaacatggcgaggatgaacaggagtgccgctcgtattgctctcccccatttcgatagcaaggctctcatcgaacttatcaagaagctcgttatcctcgactctgaatggatccccaaggagaagggttactcattgtacatccgacctacattgatcggtacccaaaacgctctcggtgtcggaccttccagtgatgctttattgtttgtcatctgctctcccgtgggcccttactacgcctctggattcaagcccgtccaacttttggctacgaccaagtttgtccgtgccgctcccggtggtacaggtggttacaagctcggtgccaactacgcccccggtgtcgtccctcaagctgaggcagcgaaagaaggctacagtcaaaacctttggttgcttggtcccgagcacgctttgactgaggtcggtactatgaacttgttcgttgctctcaagaaagccgatggctccgttgagctcgttacccctcctttggacgacgtcgtcctccccggtgtcacgcgagactccgctctccaactcgcacgagaacacgcttccggcaagacacctatccccggccttcccgaaaaacttgttgtctctgagcgaaagctcgtgatggcggacctcgtcgaggccgagaagaatggtacattggtcgaggtctttggtaccggtacggccgccatcgtctctgccgttgacaagattggttatgaggggcgtgatattatcatccccaccggccctgagggtttgggtaacatcgccaagggtatcttggacaggatcacggccatccagactggtgagattgagcatccctggagtgtgattgcgaacgacgtgtcaagctccagtttctag

SEQ ID NO: 90526 - protein, 437 aa, Cryptococcus neoformans
MSRLAPRLATAACAVRQPAATRAIAAAFAAPLTKQIRGYRSQPMRDVMTGEIIQLPDIDPSTVKVDLTTHAKSRLPNSKLVFGHTFTDHMLTIPWSSRSGWGTPHIKPYGPLELDPSSTVFHYAFTLFEGMKAYRQEDGTIRLFRPDMNMARMNRSAARIALPHFDSKALIELIKKLVILDSEWIPKEKGYSLYIRPTLIGTQNALGVGPSSDALLFVICSPVGPYYASGFKPVQLLATTKFVRAAPGGTGGYKLGANYAPGVVPQAEAAKEGYSQNLWLLGPEHALTEVGTMNLFVALKKADGSVELVTPPLDDVVLPGVTRDSALQLAREHASGKTPIPGLPEKLVVSERKLVMADLVEAEKNGTLVEVFGTGTAAIVSAVDKIGYEGRDIIIPTGPEGLGNIAKGILDRITAIQTGEIEHPWSVIANDVSSSSF

SEQ ID NO: 90527 - DNA, 1194 bp, Hordeum vulgare
  CDS (1)..(1194)
atggctgtgctgtcttctgcgaagcgcgtcctcccgtgcgcctcggccggcggggtcagcggcggcctccgagctctactcgggacggacggaggcggccgctctcttctcccgtcccggtggaagtcgtcgctgccgcagctggaccccgtcgacaggtccgacgaggagagcggcggcgacatcgactgggacaacctcggcttcgggctcaccccgacggactacatgtacgtcatgcggtgctcgcgggaggagggcggcttctcccgcggcgagctcgcccgctacggcaacatcgagctcagcccctcctccggcgtcctcaactacggccaggggctgttcgaggggctgaaggcgtacaggcggtcggacggggccgggtacatgctgttccggccggaggagaacgcgcggcggatgcagcacggcgcgggccgcatgtgcatgccgtccccgtctgtcgagcagttcgtgcacgccgtcaagcagaccgtcctcgccaacaggcgctgggtgccgccgcaaggcaagggagcgctgtacatcaggccgctgctcatcgggagcggggcgatcctcgggctggcgccggcccccgagtacaccttcatgatctacgccgcgcctgtggggacatatttcaaggaaggcatggcggcgataaacctgctggtcgaggaggagatccaccgcgcgatgccgggcggcaccggcggggtcaagaccatctccaactacgcgccggtgctcaagccgcagatggacgcgaaaagcaaggggttcgcggacgtgctgtacctggacgcggtccacaagaggtacgtcgaggaggcctcctcctgcaacctcttcgtcgtcaagggcggcgccgtcgcgacgccggcgacgacggcagggaccatcctgccgggtgtcacgcgcaggagcatcatcgagctcgccagggatgacggctaccaggtcgaagagcgcctcgtctccatcgacgatctcgtcggcgcagacgaagtgttctgcacgggaacggccgtcggcgtcaccccggtgtcgaccatcacctaccaagggacaaggcacgagttcaggactggggaagacacgttgtcgaggaaattgtacacgactctcacatcgatccagatggggctggcagaggacaagaaaggatggacggtagcgattgattga

SEQ ID NO: 90528 - protein, 397 aa, Hordeum vulgare
MAVLSSAKRVLPCASAGGVSGGLRALLGTDGGGRSLLPSRWKSSLPQLDPVDRSDEESGGDIDWDNLGFGLTPTDYMYVMRCSREEGGFSRGELARYGNIELSPSSGVLNYGQGLFEGLKAYRRSDGAGYMLFRPEENARRMQHGAGRMCMPSPSVEQFVHAVKQTVLANRRWVPPQGKGALYIRPLLIGSGAILGLAPAPEYTFMIYAAPVGTYFKEGMAAINLLVEEEIHRAMPGGTGGVKTISNYAPVLKPQMDAKSKGFADVLYLDAVHKRYVEEASSCNLFVVKGGAVATPATTAGTILPGVTRRSIIELARDDGYQVEERLVSIDDLVGADEVFCTGTAVGVTPVSTITYQGTRHEFRTGEDTLSRKLYTTLTSIQMGLAEDKKGWTVAID

SEQ ID NO: 90529 - DNA, 1398 bp, Capsicum annuum
  CDS (85)..(1242)
ttactcacaatttttctctttgcctctacctaatctgttgcttgcaaagatctaacactaaggtttatatttcttttggcaaagatgattcgaggggctgcatgttttcgaaagttgtttcaatcttctgctctatcatcaaagtttacaacaaggtactatacggctcaggcagcagtacagcctgctatttacagtagtgatgaggagtctggaagtattgactgggacaatcttggattcaagttaatgcaaactgattatatgtatgtgacaaaaacctctgatgatggaatttttagacaaggccaacttgatcgttatggcaatattcaattgagcccatctgctggtgtactgaactatggacaggggttattcgaaggtacaaaagcgtttagaagagaggatggacgactatttctatttcgccctgaacagaacgcgatcagaatgcaaattggtgcagagagaatgtgtatgccagctccttcgactgatcaatttgtcgacgcccttaaacaaacagccctttctaacaagcgctggattcctcctcctggaaaaggatcactttacattaggcctcttttaataggcactggccccattttgggtttggccccagcacctgagtacacattccttgtctatgcctgccctgtgggtaattatttcaaggaaggaacagcaccattgaacttgtacgttgaagaagacgttcatcgtgcctcacgtggtggagctggcggagtcaaaagcattactaactatgctccggttttaaaagcgatgaagaaagcaaaggcgaacggatattcagatgtactgtatgttgatgcagtaaataagaaatatattgaagaagtttcttcttgcaacattttcgttgtcaaaggaaatgtagtttcaactccaatagccaaaggaactattcttgaaggagtaacaagaaaaagcatcatggacattgcacttgatcttggatatacggttgaagaacgtttaattgaagctgatgaattaattagtgctgatgaagtattctgtacgggaactgcagttggtgttgctcctgttggaagtatcacttacaaaggccaaaggattgagtataaaataagctcagatctatcttgtaagaaattttattcaagattagtagggattcaaaaaggtgtgatcaaagatgaaaggaactggatcgtggagattgaatcatcttatttggttcaagattagtagagattcaaaaaggtgttatcaaggatgaaaggaactggatcatggagattgaatcgtcttaaagttattttacaaatctttttgccattatattaattcatgtgctagcaggctgtatattatatgataatatacaatatataatttttttta

SEQ ID NO: 90530 - protein, 385 aa, Capsicum annuum
MIRGAACFRKLFQSSALSSKFTTRYYTAQAAVQPAIYSSDEESGSIDWDNLGFKLMQTDYMYVTKTSDDGIFRQGQLDRYGNIQLSPSAGVLNYGQGLFEGTKAFRREDGRLFLFRPEQNAIRMQIGAERMCMPAPSTDQFVDALKQTALSNKRWIPPPGKGSLYIRPLLIGTGPILGLAPAPEYTFLVYACPVGNYFKEGTAPLNLYVEEDVHRASRGGAGGVKSITNYAPVLKAMKKAKANGYSDVLYVDAVNKKYIEEVSSCNIFVVKGNVVSTPIAKGTILEGVTRKSIMDIALDLGYTVEERLIEADELISADEVFCTGTAVGVAPVGSITYKGQRIEYKISSDLSCKKFYSRLVGIQKGVIKDERNWIVEIESSYLVQD

SEQ ID NO: 90531 - DNA, 1146 bp, Oryza sativa
  CDS (1)..(1146)
atggagtacggtgcagcaacgcgtggcgcgctcctcgcggccaccctgctcgccggcgcccggcgtagccggttgcccctctcaccgccgccgtcgccgccctctattcagattcagaatcgactttattcgatgtcgtcgcttccactaaaggctcgaggcgtgagaagatgcgaggcttctctagcaagtgactacacgaaggcatctgaggtagctgattttgattgggagaaccttggttttggaatcgtgcagaccgactacatgtatatcacaaaatgcggacaggacgggaatttttctgagggtgaaatgattccatttggacctatagcgctgaacccatcttctggagaaaatgcactgagaatgagaacaggtgcagaaagaatgtgcatgcctgcgcctagtgttgagcagtttgtggatgcagtaaagcagactgttttagcaaacaagagatgggtgcctcctaccggtaaaggttctttatatattagaccgctacttatgggtagtggtgctgttcttggtcttgcacctgctcctgagtatacgttcattatatttgtctcccctgtggggaactactttaaggaaggtttagctccaataaatttgatagttgaagataagtttcatcgtgcaacccctggtggaactggaagtgtgaagaccataggaaattatgcctcggtcttgatggcacaaaagattgcaaaagaaaagggctattctgatgttctctacttggatgctgttcacaaaaagtatcttgaagaagtttcttcatgtaatatttttgttgtcaagggcaatgtcatttcaactccagcagtaaaaggaacaatattgccaggcatcacaaggaaaagtatcattgatgttgctctgagcaagggtttccaggtcgaggagcgacttgtgtcagtagacgagctgcttgaagctgatgaggttttctgcacaggaactgctgtcgtagtgtctcctgtgggtagtattacctatcaagggaaaagggtcgaatatgctggcaacaaaggagttggtgtcgtgtctcagcagctatatacttcattgacaagcctgcagatgggccaggcagaagattggctaggctggactgtgcaactgagttag

SEQ ID NO: 90532 - protein, 381 aa, Oryza sativa
MEYGAATRGALLAATLLAGARRSRLPLSPPPSPPSIQIQNRLYSMSSLPLKARGVRRCEASLASDYTKASEVADFDWENLGFGIVQTDYMYITKCGQDGNFSEGEMIPFGPIALNPSSGENALRMRTGAERMCMPAPSVEQFVDAVKQTVLANKRWVPPTGKGSLYIRPLLMGSGAVLGLAPAPEYTFIIFVSPVGNYFKEGLAPINLIVEDKFHRATPGGTGSVKTIGNYASVLMAQKIAKEKGYSDVLYLDAVHKKYLEEVSSCNIFVVKGNVISTPAVKGTILPGITRKSIIDVALSKGFQVEERLVSVDELLEADEVFCTGTAVVVSPVGSITYQGKRVEYAGNKGVGVVSQQLYTSLTSLQMGQAEDWLGWTVQLS

SEQ ID NO: 90533 - DNA, 1080 bp, Staphylococcus carnosus
  CDS (1)..(1080): transl_table=11
atgtcagaaaaagtaaaatttgaaaaacgtgaagacttaaaacaaaaaccagatccaaaaaatttagggtttggtcaatacttcacagattacatgttaagttatgactacgatagcgaaaaaggcggttggcatgatttgaagattacaccttatgcaccgatcgaactagatccagctgcacaaggacttcattatggtcaacttgtattcgaaggattaaaagcttataaacataacggtgaagtggttttattcagaccagaccaaaacttcgcacgtatcaatcaatcacttgatcgtttggaaatgcctcagattgatgaagaagagctattagaaggcttgaaacaattagtagatgtagaacgtgattgggtgcctgaaggcgaaggacaatctttatatattcgtccatttgtatttgcaacagaagcaggattaggtgttcaccctgcacataactataaattattaattatcttatctccttctgggtcttactatggtggagattcattgaaaccaacacgtatttatgttgaagacgaatacgttcgtgctgtacgcggtggtgtaggttttgcaaaagttgcaggtaactatgcagctagtttactatcacaatctaatgctaatgaacaaggctatgaccaagtattatggttagatggtgtagaacgcaaatatattgaagaagtgggcagtatgaatatcttcttcgtagaaaatggtaaacttgtaacacctaaattaaacggtagtatcttaccaggtattacacgtaagactgttatcgctttagcaaaagaattaggatatgaagtagaagaacgtcatatctctatcgatgaattactagagtcttatgataaaggcgaattagaagaagtatttggaacaggtactgctgcggttatttcaccagtaggcactttaaaatatgaagatcgtgaaatcacaatcaacaataatgaaactggtccaattacacaacgcttatatgatgaatatacaggtattcaaagcggtaaattagacgatccacaaggttggagagtcgtagtaccagaatattaa

SEQ ID NO: 90534 - protein, 359 aa, Staphylococcus carnosus
MSEKVKFEKREDLKQKPDPKNLGFGQYFTDYMLSYDYDSEKGGWHDLKITPYAPIELDPAAQGLHYGQLVFEGLKAYKHNGEVVLFRPDQNFARINQSLDRLEMPQIDEEELLEGLKQLVDVERDWVPEGEGQSLYIRPFVFATEAGLGVHPAHNYKLLIILSPSGSYYGGDSLKPTRIYVEDEYVRAVRGGVGFAKVAGNYAASLLSQSNANEQGYDQVLWLDGVERKYIEEVGSMNIFFVENGKLVTPKLNGSILPGITRKTVIALAKELGYEVEERHISIDELLESYDKGELEEVFGTGTAAVISPVGTLKYEDREITINNNETGPITQRLYDEYTGIQSGKLDDPQGWRVVVPEY

SEQ ID NO: 90535 - DNA, 1700 bp, Solanum tuberosum
  CDS (340)..(1473)
gggggggggggaatttgtaacgccggagctgagcagagagataacataaaagataaatggagagcgccgccgtattgcggggcttcaccctactcctggtcaccataaccaccttctgggtccatcacgaactgctattaagcttcttcctccttccattgataaaatcattttttctcctttgcccatcaaggttttttcttccttaagccattcatatttcagtttctccattgaaactgatgctgttttatgattactgtgtgtatgatgttagcttcatgcgtgtagttttgtgtagagttgactaattcgtgtagatttcattgactttgtgtgatggaatttgtattgcagcttcagaagcagtcgcatttcacttcttatattgataatagtgccataaacagtggaaattcctttcgtgtggcctctcctgcaagcgacgttgcatctgaattagccgacatcgattgggacaaccttggctttggctttatgcctactgattatatgtatagcatgaaatgctctcaaggtgaaaacttttctaagggtgaattacagcgtttcggtaatattgagttgagtccgtctgctggaatattaaattatggtcagggattgtttgaaggtttaaaagcatatcgaaaacatgacggcaatatattgttgtttcgacccgaggaaaatgcaacgcgtttgaagatgggtgctgaacgtatgtgtatgccttcaccgtctgttgaacagtttgtggaagcagtgaaagccactgttttagctaatgaaagatggattcctcctcccggtaaaggctcattatacataagacctctgcttatggggagtggagctgtccttggtcttgctcctgctcctgagtacacattcctgatttatgtgtcacctgttggaaattattttaaggaaggtttggcaccaattaatttggtaattgagactgaaatgcaccgtgcaacacctggtggcactggaggcgtcaagactattggaaattatgctgcagttctgaaggcacagagtgctgctaaagcaaaaggctattccgatgttctgtaccttgattgtgttcagaaaaaatatctcgaagaggtttcctcttgcaatgtctttattgtgaagggtaatctgatagtaactcctgcaattaaaggaaccattcttcctggaattacgcgaaagagcataatcgatgtagcaattagtcaaggattccaggttgaggaacgacaggtgtctgtggacgaattgcttgatgctgatgaagttttctgtacgggaactgcagtggttgtatctcctgttggtagcattactcatcaagggagaagggtaacatatggaaatgatggtgttggccttgtgtcgcagcagttatactctgcacttactagcctacaaatggggctctcagaggataagatgggttggattgttgagctcaaatgagctctccaaccaaagggttgtactttccattgatgaaaaaatgttgacttggaagttctcagacacttgtgatccagagtttatccttgatcatacatccatgatgcgtgtcaagtatatctgtgtgtttgatatgtatccttcagctatgaaatagtcgtcgttttcaccccaaatttggtgatttaatctagtaaagtcttgtgttcaaaaaaaaaaaaaaaaaa

SEQ ID NO: 90536 - protein, 377 aa, Solanum tuberosum
MEFVLQLQKQSHFTSYIDNSAINSGNSFRVASPASDVASELADIDWDNLGFGFMPTDYMYSMKCSQGENFSKGELQRFGNIELSPSAGILNYGQGLFEGLKAYRKHDGNILLFRPEENATRLKMGAERMCMPSPSVEQFVEAVKATVLANERWIPPPGKGSLYIRPLLMGSGAVLGLAPAPEYTFLIYVSPVGNYFKEGLAPINLVIETEMHRATPGGTGGVKTIGNYAAVLKAQSAAKAKGYSDVLYLDCVQKKYLEEVSSCNVFIVKGNLIVTPAIKGTILPGITRKSIIDVAISQGFQVEERQVSVDELLDADEVFCTGTAVVVSPVGSITHQGRRVTYGNDGVGLVSQQLYSALTSLQMGLSEDKMGWIVELK

SEQ ID NO: 90537 - DNA, 1683 bp, Solanum tuberosum
  CDS (116)..(1372)
ttcggcacgaggtacgtcgttgttgtcaaaacaaaagaattagaaaaattaagacaacattgaaagtgagtgacaaacgaaacggctcaagtcgtagaagaagaagaacaaatcaatggagagcggcggcgcattagcagggcttcaccggaatcccactttccaccaccttctccggccaccacgaaccgccgttaataatcttctctcttcttcttcctccacctataagcgccatttttctcctcttcctctcaagtttcagaagcagtcacattttgcttcttatagttataattgctccataaacgatgggagtacttttcaggtggcttattctgctagtgcaacacactcattagccaacatcgattgggacaacttggcctttggggttatgcctactgattatatgtatagcatgaaatgttctcaagatgggaacttttctaagggcgagctacaacgttttgggaatattgagttgagcccagcttctgggatattaaattatggacagggattgtttgaaggtttaaaagcctataaaagacatgatggtaatatattgctgtttcgacccgaagaaaatgctctgcgtatgaagatgggagcagaacgtatatgcatgccttcaccatctgttgaacagtttgtggaagcagtaaaagccactgttttagcaaatgaaagatggattcctccaccaggtaaaggttcattatacataagaccactgcttatggggagtggagctattcttggtgttgctccagctcctgagtacacattcctgatttatgtatcacctgtgggaaattattttaaggaaggtatggcaccaataaatttggtaattgagacagaaatgcatcgcgcaactcctggtggtactggaggtgtcaagactatcggaaattatgctgcagttctgaaggcacagagtgctgctaaagcaaaaggctactctgatgttctgtaccttgattctgttaacaaaagatacctagaggaggttccctcttgtaatggcttcatcgtaaagggtaatctgatagcaactcctgcaattaaaggaaccattcttcctggtatcacacgaaagagcataattgacgtagctttaagccaagggttccaggttgaagaacggcaagtgtctgtggacgaattgcttgatgctgatgaagtgttctgcacaggaactgcagtggttgtatctcctgttggcagcattactcatcttgggaaaagggtatcatatggaagtgatggggttggtcgtgtatcaaagcaattatattctacacttacaagcctacaaatgggactagcaacggataacatgaattggactgttgcgctaaaatgaactttgctatctttggattaaagttatattcactgatagtgaatattcatgacgctatcagtgcaattttactgctcacagcaggttattactttattttcaaggtttattaggcctcttatggagagctacctattgttgtatgtcaaatttagttcatgctgtatattttttttacaatgtcgatgcacataacttaaacactctcttctagcttaagtttgtctgaagttctcgccttgtcatatagacttttatatgtctgttaacgatctcagttgatatcatttgtaaaaaaaaaaaaaaaaaaa

SEQ ID NO: 90538 - protein, 418 aa, Solanum tuberosum
MESGGALAGLHRNPTFHHLLRPPRTAVNNLLSSSSSTYKRHFSPLPLKFQKQSHFASYSYNCSINDGSTFQVAYSASATHSLANIDWDNLAFGVMPTDYMYSMKCSQDGNFSKGELQRFGNIELSPASGILNYGQGLFEGLKAYKRHDGNILLFRPEENALRMKMGAERICMPSPSVEQFVEAVKATVLANERWIPPPGKGSLYIRPLLMGSGAILGVAPAPEYTFLIYVSPVGNYFKEGMAPINLVIETEMHRATPGGTGGVKTIGNYAAVLKAQSAAKAKGYSDVLYLDSVNKRYLEEVPSCNGFIVKGNLIATPAIKGTILPGITRKSIIDVALSQGFQVEERQVSVDELLDADEVFCTGTAVVVSPVGSITHLGKRVSYGSDGVGRVSKQLYSTLTSLQMGLATDNMNWTVALK

SEQ ID NO: 90539 - DNA, 1143 bp, Schizosaccharomyces pombe
  CDS (1)..(1143)
atggttcaaactgctgctctccatggcccaaagcccatggatagctcccatataaaagttactaatgttaaggagcttaaacctttgcccgaatggaagagtttgaagtttggtgagaattttactgatcatatgcttattatgaaatggaacagagaaaagggttggagtactcctgagatcgttccatttggtaaactttgctttcaccctgcttcctccgttttccattatggttttgagtgctttgaaggcatgaaagctttccgtgacgaaaagggtgtcccacgtcttttccgtcccatcaagaatgctgagcgtatgctttcaactggtactcgtatatctcttccttccttcgaccctgctgagcttgctgaaattatcagaaagttcgtcgctcacgaaaaccgttgggtccctgatcagcgtggttactctttgtacattcgtcctactttcattggtactgatgaagccttaggtgtccaccattgtgacaacgctatgctttatgttattgcctctcccgttggcccctactacagctctggtttcaaggccgttaagctttgttgctccgaagaatccgttcgtgcttggcctggcggtactggtcactacaagcttggtggtaactatgctcctagtgttttgcctcaaaaagaggctgccaagaaggggtatgctcagattctctggctttatggagacgaggactacattactgaggttggtactatgaactgctttactgtttggattaacaagaatggcgaaaaagaaatcattactgcccctcttgacggtatgatcttacctggtgtcactcgtgattctattttggaaatttgccgtgaacgtctcgcacctaaaggctggaagattactgagggcaagtattccatgaaagaggttgctcaagcttctaaggaaggtcgccttttggaagtctttggagctggtactgctgcccttgtttcccccgtcaaggctattaactacaagggtactgagtatgaaattcccatgcctgagggtcaggaagctggtcccatcacttctgaaatcagcaaatggattttggatatccaatacggcaaggaacctaacaacccttggagcgttcctgctttgccttaa

SEQ ID NO: 90540 - protein, 380 aa, Schizosaccharomyces pombe
MVQTAALHGPKPMDSSHIKVTNVKELKPLPEWKSLKFGENFTDHMLIMKWNREKGWSTPEIVPFGKLCFHPASSVFHYGFECFEGMKAFRDEKGVPRLFRPIKNAERMLSTGTRISLPSFDPAELAEIIRKFVAHENRWVPDQRGYSLYIRPTFIGTDEALGVHHCDNAMLYVIASPVGPYYSSGFKAVKLCCSEESVRAWPGGTGHYKLGGNYAPSVLPQKEAAKKGYAQILWLYGDEDYITEVGTMNCFTVWINKNGEKEIITAPLDGMILPGVTRDSILEICRERLAPKGWKITEGKYSMKEVAQASKEGRLLEVFGAGTAALVSPVKAINYKGTEYEIPMPEGQEAGPITSEISKWILDIQYGKEPNNPWSVPALP

SEQ ID NO: 90541 - DNA, 1182 bp, Saccharomyces cerevisiae
  CDS (1)..(1182)
atgttgcagagacattccttgaagttggggaaattctccatcagaacactcgctactggtgccccattagatgcatccaaactaaaaattactagaaacccaaatccatccaagccaagaccaaatgaagaattagtgttcggccagacattcaccgatcatatgttgaccattccttggtcagccaaagaagggtggggcactccacacatcaagccttacggtaatctttctcttgacccatctgcttgtgtattccattatgcatttgaattatttgaaggtttgaaagcctacagaactcctcaaaatactatcaccatgttccgtccggataagaacatggcccgtatgaacaagtctgccgctagaatttgtttgccaactttcgaatctgaagaattgatcaaacttaccgggaaattgatcgaacaagataaacacttggttcctcaaggtaatggttactcattatacatcagaccaacaatgattggtacatccaagggtttaggtgttggcactccctccgaggctcttctttatgttattacttctccagtcggtccttattataagactggtttcaaagccgtacgtcttgaagcaacagactatgctacaagagcttggccaggtggtgttggcgacaaaaaattgggtgctaactatgccccatgcatcttacctcaactacaagctgccaaaagagggtaccaacaaaatctatggttgttcggcccagaaaagaacatcactgaggttggtactatgaacgtgttcttcgttttcctcaacaaagtcactggcaagaaggaattggttaccgctccattagatggtaccattttagaaggtgttaccagagactctgttttaacattggctcgtgacaaactagatcctcaagaatgggacatcaacgagcgttattacactattactgaagtcgccactagagcaaaacaaggtgaactattagaagccttcggttctggtactgctgctgtcgtttcacctatcaaggaaattggctggaacaacgaagatattcatgttccactattgcctggtgaacaatgtggtgcattgaccaagcaagttgctcaatggattgctgatatccaatacggtagagtcaattatggtaactggtcaaaaactgttgccgacttgaactaa

SEQ ID NO: 90542 - protein, 393 aa, Saccharomyces cerevisiae
MLQRHSLKLGKFSIRTLATGAPLDASKLKITRNPNPSKPRPNEELVFGQTFTDHMLTIPWSAKEGWGTPHIKPYGNLSLDPSACVFHYAFELFEGLKAYRTPQNTITMFRPDKNMARMNKSAARICLPTFESEELIKLTGKLIEQDKHLVPQGNGYSLYIRPTMIGTSKGLGVGTPSEALLYVITSPVGPYYKTGFKAVRLEATDYATRAWPGGVGDKKLGANYAPCILPQLQAAKRGYQQNLWLFGPEKNITEVGTMNVFFVFLNKVTGKKELVTAPLDGTILEGVTRDSVLTLARDKLDPQEWDINERYYTITEVATRAKQGELLEAFGSGTAAVVSPIKEIGWNNEDIHVPLLPGEQCGALTKQVAQWIADIQYGRVNYGNWSKTVADLN

SEQ ID NO: 90543 - DNA, 1155 bp, Arabidopsis thaliana
  CDS (1)..(1155)
atggctcttcgtcgctgcttacctcaatattcaacaacttcatcttatctctccaagatctggggatttcgtatgcatgggaccaaggcagcagcttctgttgtagaagaacatgtctcgggggcagaacgtgaggatgaagaatatgctgatgtagattgggacaaccttggattcagtcttgtacggacagatttcatgttcgccaccaaaagttgcagagacggaaacttcgaacagggttaccttagccgttacggcaacatcgagctcaaccctgctgctggaattctcaactatggccagggactaatagaggggatgaaagcgtacagaggagaagacggtagggttcttctcttccgtccagagctaaacgcgatgcgtatgaagataggagctgagagaatgtgtatgcattctccttctgttcatcagtttattgaaggtgttaagcagaccgttcttgcaaacaggcgttgggttcctcctccgggcaaaggctcgttgtatctcagaccgttgttgttcggaagtggagcaagcttgggtgtggctgcagcatcagagtacacgtttcttgtgtttggctctcctgttcaaaactacttcaaggaaggcacagcggcgttgaacctgtatgtggaggaggtgattccacgcgcttatcttggaggaactggtggtgtaaaggcaatatccaattacggtccagtgcttgaagtgatgagaagagcaaaatcaagagggttttcggatgttttgtatcttgatgcagatactgggaagaacatagaagaagtctctgctgctaatatattccttgtgaagggcaatacaatagtgacaccagctacgagcggaacgattctcggagggatcacacgtaagagcataatcgaaatcgcccttgatcttggttacaaagtggaagaacgaagtgttccggtagaagaactgaaggaagctgaagaagttttctgcactggaactgccgctggagttgcttctgttggaagcatcacttttaagaacacaaggactgagtacaaagttggagatgggattgttacacagcaacttcgatctattcttgtcggaatacaaactggttctatccaagacactaaagattgggttttgcagattgcctaa

SEQ ID NO: 90544 - protein, 384 aa, Arabidopsis thaliana
MALRRCLPQYSTTSSYLSKIWGFRMHGTKAAASVVEEHVSGAEREDEEYADVDWDNLGFSLVRTDFMFATKSCRDGNFEQGYLSRYGNIELNPAAGILNYGQGLIEGMKAYRGEDGRVLLFRPELNAMRMKIGAERMCMHSPSVHQFIEGVKQTVLANRRWVPPPGKGSLYLRPLLFGSGASLGVAAASEYTFLVFGSPVQNYFKEGTAALNLYVEEVIPRAYLGGTGGVKAISNYGPVLEVMRRAKSRGFSDVLYLDADTGKNIEEVSAANIFLVKGNTIVTPATSGTILGGITRKSIIEIALDLGYKVEERSVPVEELKEAEEVFCTGTAAGVASVGSITFKNTRTEYKVGDGIVTQQLRSILVGIQTGSIQDTKDWVLQIA

SEQ ID NO: 90545 - DNA, 1167 bp, Arabidopsis thaliana
  CDS (1)..(1167)
atgatcaaaacaatcacatctctacgcaaaactctggttctacctcttcatttacatattcgtacgctacaaactttcgccaagtacaacgcacaagctgcatcggctttgcgagaagagcgtaagaaacctctttatcaaaatggagatgatgtatatgcggatttggattgggataatctcgggtttggtctaaatccagctgattacatgtatgtcatgaaatgctcaaaagacggcgaattcactcaaggagaacttagtccctatgggaatattcagctaagtccttctgctggagtcttaaactatggacaggcgatatacgaaggtacaaaagcatacaggaaagaaaatgggaagcttcttttgtttcgtccggatcacaacgctatccggatgaagcttggcgctgaacggatgctcatgccttctccttcggttgatcagtttgttaatgcagttaaacaaaccgctcttgcaaacaaacgttgggttcctcctgcagggaaagggactttgtacattaggcctttgttgatgggaagtggtccaatacttggtttaggtcctgcacctgaatatacattcattgtctatgcatctccagttggtaactacttcaaggaagggatggctgctcttaacctctatgttgaggaagaatatgtccgagcggctcctggtggagctggaggcgtcaagagcatcacaaattatgcgccagttttgaaagcactgagcagagccaagagtcgggggttttcagacgttctttatctcgactctgtcaagaagaagtacttagaggaggcttcttcttgcaacgtctttgttgtcaagggtcggacaatctcaactcctgcaactaatggaacaattcttgaagggattacgcggaaaagtgtgatggagatcgcaagtgatcaaggttatcaggtagtagagaaggcagttcatgtggatgaagtaatggatgcagatgaagttttttgcaccggaactgctgtagtagttgctcccgtgggcactatcacatatcaggaaaaaagagtagagtataaaaccggggatgaatctgtctgccagaaactgcgttcagtcctcgtaggtatccagacaggattgattgaagataacaagggatgggtcacagatatcaactga

SEQ ID NO: 90546 - protein, 388 aa, Arabidopsis thaliana
MIKTITSLRKTLVLPLHLHIRTLQTFAKYNAQAASALREERKKPLYQNGDDVYADLDWDNLGFGLNPADYMYVMKCSKDGEFTQGELSPYGNIQLSPSAGVLNYGQAIYEGTKAYRKENGKLLLFRPDHNAIRMKLGAERMLMPSPSVDQFVNAVKQTALANKRWVPPAGKGTLYIRPLLMGSGPILGLGPAPEYTFIVYASPVGNYFKEGMAALNLYVEEEYVRAAPGGAGGVKSITNYAPVLKALSRAKSRGFSDVLYLDSVKKKYLEEASSCNVFVVKGRTISTPATNGTILEGITRKSVMEIASDQGYQVVEKAVHVDEVMDADEVFCTGTAVVVAPVGTITYQEKRVEYKTGDESVCQKLRSVLVGIQTGLIEDNKGWVTDIN

SEQ ID NO: 90547 - DNA, 1242 bp, Arabidopsis thaliana
  CDS (1)..(1242)
atggagagagcagcaattctcccgagtgttaatcaaaattacctactttgtccttcacgcgccttctccacgcgcctccactcctctactcgtaacttatcgccgccgtcatttgcctccatcaagcttcagcattcttcttcctctgtttcttctaatggtggaatctctcttactcgatgcaacgctgtttcgtccaattcttccagtacgttggtaactgaattagccgacatagattgggataccgttggatttgggcttaagccagctgattatatgtatgtgatgaaatgtaacattgatggagagttctcaaaaggtgagttgcaacgttttgggaatattgaaattagcccatctgctggtgtactcaactatggacagggattgtttgaagggctaaaagcttacagaaagaaagatggtaataacatcctcctctttcgtcctgaggagaatgcaaagcgtatgagaaatggtgctgagaggatgtgtatgcctgctccaaccgttgagcagtttgtagaagctgtgacagaaactgtactagcaaacaaacgttgggttccaccaccaggtaaaggttccttatatgttagaccattgctaatgggaacaggagctgttcttggtcttgcgcctgcaccagaatatactttcattatctatgtttcgcctgttgggaactacttcaaggaaggtgtggcacctatcaatttgattgtggagaatgaatttcaccgtgcaactcctggtggtaccggaggtgttaaaaccataggcaattatgctgcagtactgaaggcacagtcaattgcgaaagctaaaggatattccgatgttttgtaccttgattgcatttacaaaagatatcttgaggaggtctcgtcttgcaatattttcatcgtgaaggacaatgtgatatctactcctgaaataaaaggaaccattttacccggtattactcgaaaaagtatgatagacgtggctcgaacacaagggtttcaggtggaggaacggaatgtgacagtggatgaattgttagaagcagacgaggttttctgcacaggaaccgccgtggttgtctctcctgttggaagcgtcacttacaaaggcaaaagagtgtcttacggagaaggtaccttcggaactgtgtcgaagcaactctacaccgttctgacaagcttgcagatgggtctgattgaagacaacatgaaatggactgtgaatcttagttaa

SEQ ID NO: 90548 - protein, 413 aa, Arabidopsis thaliana
MERAAILPSVNQNYLLCPSRAFSTRLHSSTRNLSPPSFASIKLQHSSSSVSSNGGISLTRCNAVSSNSSSTLVTELADIDWDTVGFGLKPADYMYVMKCNIDGEFSKGELQRFGNIEISPSAGVLNYGQGLFEGLKAYRKKDGNNILLFRPEENAKRMRNGAERMCMPAPTVEQFVEAVTETVLANKRWVPPPGKGSLYVRPLLMGTGAVLGLAPAPEYTFIIYVSPVGNYFKEGVAPINLIVENEFHRATPGGTGGVKTIGNYAAVLKAQSIAKAKGYSDVLYLDCIYKRYLEEVSSCNIFIVKDNVISTPEIKGTILPGITRKSMIDVARTQGFQVEERNVTVDELLEADEVFCTGTAVVVSPVGSVTYKGKRVSYGEGTFGTVSKQLYTVLTSLQMGLIEDNMKWTVNLS

SEQ ID NO: 90549 - DNA, 1065 bp, Arabidopsis thaliana
  CDS (1)..(1065)
atggctccttctgcgcaacctcttcctgtgagtgtttcggatgaaaaatatgcgaatgtcaagtgggaagagttggcattcaagtttgttcgtacggattatatgtatgttgcgaagtgcaatcatggagagagttttcaagaggggaagattcttccttttgctgatttgcaacttaacccttgcgctgctgttcttcagtatggccagggtttatatgaaggactgaaagcttacaggacagaagatggtcggattctgctattccgaccagaccaaaacggtctccgccttcaagccggagctgacagactctatatgccttatccttcggtcgatcaattcgtctccgccatcaaacaagttgctcttgccaacaagaaatggattcctcctccggggaaaggaacattgtatattaggcctatcttgtttgggagtggtccgattcttggttcatttcccattcctgagaccaccttcacagcttttgcctgtcctgttggacgttatcataaggataactctggtttgaatctgaaaatcgaagatcagtttcgtcgagcttttcctagtggaactggtggtgtgaagagcatcacaaactattgtcctgtttggataccattggcagaggcgaaaaaacaaggtttctctgatattttgtttttggatgctgcaactggcaaaaacattgaagaacttttcgcagctaatgtttttatgctcaagggcaatgttgtatcgacaccaacaattgcaggaactattttgcccggagtcactcgaaactgcgtaatggaattgtgtcgtgatttcggctaccaggtcgaggaacgtacgattcctctagtggactttctcgatgcggacgaagctttctgtactggcactgcttccattgtgactagtattgcatccgtaacctttaaagacaaaaagaccggattcaaaacaggggaagaaacattggctgcgaagctatacgagacgttaagtgatatccagacgggtcgggtcgaggataccaagggatggacggtggagattgaccgccagggctga

SEQ ID NO: 90550 - protein, 354 aa, Arabidopsis thaliana
MAPSAQPLPVSVSDEKYANVKWEELAFKFVRTDYMYVAKCNHGESFQEGKILPFADLQLNPCAAVLQYGQGLYEGLKAYRTEDGRILLFRPDQNGLRLQAGADRLYMPYPSVDQFVSAIKQVALANKKWIPPPGKGTLYIRPILFGSGPILGSFPIPETTFTAFACPVGRYHKDNSGLNLKIEDQFRRAFPSGTGGVKSITNYCPVWIPLAEAKKQGFSDILFLDAATGKNIEELFAANVFMLKGNVVSTPTIAGTILPGVTRNCVMELCRDFGYQVEERTIPLVDFLDADEAFCTGTASIVTSIASVTFKDKKTGFKTGEETLAAKLYETLSDIQTGRVEDTKGWTVEIDRQG

SEQ ID NO: 90551 - DNA, 1339 bp, Arabidopsis thaliana
  CDS (30)..(1277)
aacatcagcatcacgaatattttcgagtcatggagagaagcgccgttgcctcaggttttcatagaaattacatcctctgtgcttcacgcgccgccacttccacgacgcgcctccactctttgtcctccctcagaaactttccctcttcctctctcaggattcgtcactgtccttctcccatctcttccaatttcatcgttagtgaagtttcccgaaaccgacgatgcgacgccgtttcttccagcaccaccgatgtgactgaattagccgaaattgattgggacaagattgattttgggcttaaaccaacggattacatgtacgccatgaaatgtagccgtgatggtgaattctctcaaggtcaattgcaaccttttggtaacattgacattaacccagcagctggtgttctcaactatggacaaggtttgtttgaaggtctaaaagcttacagaaaacaagatgggaatattctactcttccgtcctgaggagaatgcgatccgaatgagaaatggcgctgaaagaatgtgtatgccttctccaaccgttgaacagtttgttgaggctgtgaaaactactgtattagctaacaaacgctggattccacctccaggtaaaggatcattatacataaggccattgctaatgggaactggagctgttcttggtcttgctcctgctcctgaatacactttccttatctttgtttcacctgtcgggaactacttcaaggaaggtgttgcgccgatcaacttaattgttgaaactgaattccatcgtgcaactcccggcggtactggaggtgttaaaaccatcggtaattatgctgcagtcttgaaggctcagtcgattgcgaaagctaaagggtattctgatgttttataccttgattgccttcacaaaagatatcttgaggaggtttcatcgtgcaatattttcattgtgaaggataatgtgatatctactcctgaaattaaaggaaccatcttgcctggaattacccggaagagtatcatcgaagtagctcgtagccaaggtttcaaggtggaggaacgaaatgtgacagttgatgaattggtagaagcagacgaggttttctgcacaggaaccgccgttgttttatctccggttggaagcatcacttacaaaagccaaaggttttcttatggagaagatggctttggaacagtctcgaaacaactctacacttccttgacgagcctgcaaatgggtctgagcgaagataacatgaactggactgttcaattgagttaaaaccagtcacgaacatatcaatattatacatatggatgtgttagtagatacgaaaaaaaaaa

SEQ ID NO: 90552 - protein, 415 aa, Arabidopsis thaliana
MERSAVASGFHRNYILCASRAATSTTRLHSLSSLRNFPSSSLRIRHCPSPISSNFIVSEVSRNRRCDAVSSSTTDVTELAEIDWDKIDFGLKPTDYMYAMKCSRDGEFSQGQLQPFGNIDINPAAGVLNYGQGLFEGLKAYRKQDGNILLFRPEENAIRMRNGAERMCMPSPTVEQFVEAVKTTVLANKRWIPPPGKGSLYIRPLLMGTGAVLGLAPAPEYTFLIFVSPVGNYFKEGVAPINLIVETEFHRATPGGTGGVKTIGNYAAVLKAQSIAKAKGYSDVLYLDCLHKRYLEEVSSCNIFIVKDNVISTPEIKGTILPGITRKSIIEVARSQGFKVEERNVTVDELVEADEVFCTGTAVVLSPVGSITYKSQRFSYGEDGFGTVSKQLYTSLTSLQMGLSEDNMNWTVQLS

SEQ ID NO: 90553 - DNA, 1196 bp, Arabidopsis thaliana
  CDS (9)..(1079)
ctccatagatggctccttcttcatcacctcttcgtactacaagtgaaacagatgaaaaatatgcgaatgtcaaatgggaagagcttggattcgctctgactccaatagattatatgtatgtagccaaatgcagacaaggagagagctttacacaagggaagattgttccttatggcgacatttcaattagcccttgttctccgattctcaattacggccagggactatttgaaggtctcaaagcttacagaacagaagacgaccggattaggattttccggcctgaccaaaacgctcttcgcatgcaaactggtgcggagaggctttgtatgacacctcctactctagaacaatttgtcgaggcagttaagcaaactgtgcttgccaacaagaaatgggttcctcctccgggtaaaggaactctgtatataaggcctctgctactagggagtggtgctacccttggagtagctccagcacctgaatacacttttctcatatatgcatctcccgtaggagattaccataaggtaagctcaggcttgaacctcaaagttgatcataagtatcaccgagcccattcaggtggaacggggggtgtcaagagctgcacaaactattctccagttgtgaaatcgttactcgaagcaaagtcagcgggtttctctgatgtcctgttcctggatgcagcaactggtagaaacatcgaagagcttactgcttgtaacatcttcattgtcaagggaaacattgtatccaccccaccaacttcaggaaccattttacctggagtcacgaggaaaagcataagtgagctggctcatgatattggctaccaggtcgaagaacgcgatgtatctgtggatgagctactagaggcagaagaagttttctgcacagggactgcagtggtcgttaaagctgttgaaactgtgaccttccatgacaaaaaggtaaaatacaggacaggagaagcagcattgtctacgaagcttcactcgatgttgaccaatattcagatgggagttgttgaagataagaaaggttggatggtggacattgatccttgtcaaggttgaaagaagaagtttagaaagctgatgattctatgtactcaaacgtgtatctttcttctcatgtgttggtttttattaggattcttctttttttatcatgggacttgtaataaataatgg

SEQ ID NO: 90554 - protein, 356 aa, Arabidopsis thaliana
MAPSSSPLRTTSETDEKYANVKWEELGFALTPIDYMYVAKCRQGESFTQGKIVPYGDISISPCSPILNYGQGLFEGLKAYRTEDDRIRIFRPDQNALRMQTGAERLCMTPPTLEQFVEAVKQTVLANKKWVPPPGKGTLYIRPLLLGSGATLGVAPAPEYTFLIYASPVGDYHKVSSGLNLKVDHKYHRAHSGGTGGVKSCTNYSPVVKSLLEAKSAGFSDVLFLDAATGRNIEELTACNIFIVKGNIVSTPPTSGTILPGVTRKSISELAHDIGYQVEERDVSVDELLEAEEVFCTGTAVVVKAVETVTFHDKKVKYRTGEAALSTKLHSMLTNIQMGVVEDKKGWMVDIDPCQG

SEQ ID NO: 90555 - DNA, 1104 bp, Arabidopsis thaliana
  CDS (1)..(1104)
atggctccttctgtgcacccttcttcatcacctctttttacaagtaaagccgatgaaaagtatgcgaatgtaaaatgggatgagctcggattcgcactggttccaacagattatatgtatgtggcgaaatgcaaacaaggagagagcttttcaacaggagagattgttccttatggggatatttctataagcccttgtgctgggattctcaattatggccagggactatttgaaggtctcaaggcttacaggacagaagacggtcggatcacactcttccgacctgaccaaaacgctattcgtatgcaaacaggtgcagataggctttgtatgacacctccttccccggagcaattcgttgaagcagttaagcaaactgtgcttgccaacaacaaatgggtacctcctccggggaaaggagctttgtatattaggcctctactcataggtactggtgctgtccttggagtagcttcagctcctgaatatacgttcctcatttacacatctcccgtgggaaattatcacaaggcaagctcaggcttgaacctcaaagttgatcataaccatcgccgagcccacttcggtggaacagggggtgtgaagagctgcacaaattattctccagttgtaaaatcgttgatcgaagcaaagtcttcgggtttctctgatgtcttgttcctggatgcggcaactggtaaaaacatcgaagaggtttctacttgtaacatcttcattctaaagggaaacattgtatccactcccccaacttcaggaaccattttaccaggaatcacaaggaagagcatatgtgagctagcccgtgacattggctatgaggttcaagaacgtgatctttctgtggatgagctattagaggcagaggaagttttttgcacggggacggcagtggtcattaaagctgttgaaaccgtgacattccatgacaaaagggtaaaatatagaacaggagaagaagcattctctacgaagcttcacttgatattaactaatattcaaatgggagttgtcgaagataagaagggttggatgatggagatcgatcatttggttggaacagattcgtttcctgatgaaacataa

SEQ ID NO: 90556 - protein, 367 aa, Arabidopsis thaliana
MAPSVHPSSSPLFTSKADEKYANVKWDELGFALVPTDYMYVAKCKQGESFSTGEIVPYGDISISPCAGILNYGQGLFEGLKAYRTEDGRITLFRPDQNAIRMQTGADRLCMTPPSPEQFVEAVKQTVLANNKWVPPPGKGALYIRPLLIGTGAVLGVASAPEYTFLIYTSPVGNYHKASSGLNLKVDHNHRRAHFGGTGGVKSCTNYSPVVKSLIEAKSSGFSDVLFLDAATGKNIEEVSTCNIFILKGNIVSTPPTSGTILPGITRKSICELARDIGYEVQERDLSVDELLEAEEVFCTGTAVVIKAVETVTFHDKRVKYRTGEEAFSTKLHLILTNIQMGVVEDKKGWMMEIDHLVGTDSFPDET

SEQ ID NO: 90557 - DNA, 1092 bp, Bacillus subtilis
  CDS (1)..(1092): transl_table=11
atgactaaacaaacaattcgcgttgaattgacatcaacaaaaaaaccgaaaccagacccaaatcagctttcgttcggaagagtgtttacagaccacatgtttgtaatggactatgccgcagataaaggttggtacgatccaagaatcattccttatcaacccttatcaatggatccaactgcaatggtctatcactacggccaaaccgtgtttgaagggttaaaggcttacgtgtcagaggatgaccatgttctgcttttcagaccggaaaaaaatatggaacgcctgaatcaatcaaacgaccgcctctgcatcccgcaaattgatgaagaacaggttcttgaaggcttaaagcagcttgtcgcaattgataaagactggattccaaatgcggagggcacgtccctttacatccgtccgttcatcatcgcaaccgagcctttccttggtgttgcggcatctcatacgtataagctcttgatcattctttctccggtcggctcttattacaaagaaggcattaagccggtcaaaatcgctgttgaaagtgaatttgtccgtgcggtaaaaggcggaacaggaaatgccaaaaccgcaggaaactatgcttcaagcttaaaagcgcagcaggtagccgaagagaaaggattttctcaagtactctggctggacggcattgagaagaaatacatcgaagaagtcggaagcatgaacatcttcttcaaaatcaacggtgaaatcgtaacaccgatgctgaacgggagcatcctggaaggcattacgcgcaattcagtcatcgccttgcttaagcattggggccttcaagtttcagaacgaaaaattgcgatcgatgaggtcatccaagcccataaagacggcatcctggaagaagccttcggaacaggtacagcagctgttatttccccagtcggcgagctgatctggcaggatgaaacactttcgatcaacaacggtgaaacaggagaaatcgcaaaaaaactatatgacacgattacaggcattcaaaaaggcgctgtcgcagacgaattcggatggacgaccgaagtcgcagcgctgactgaaagcaagtaa

SEQ ID NO: 90558 - protein, 363 aa, Bacillus subtilis
MTKQTIRVELTSTKKPKPDPNQLSFGRVFTDHMFVMDYAADKGWYDPRIIPYQPLSMDPTAMVYHYGQTVFEGLKAYVSEDDHVLLFRPEKNMERLNQSNDRLCIPQIDEEQVLEGLKQLVAIDKDWIPNAEGTSLYIRPFIIATEPFLGVAASHTYKLLIILSPVGSYYKEGIKPVKIAVESEFVRAVKGGTGNAKTAGNYASSLKAQQVAEEKGFSQVLWLDGIEKKYIEEVGSMNIFFKINGEIVTPMLNGSILEGITRNSVIALLKHWGLQVSERKIAIDEVIQAHKDGILEEAFGTGTAAVISPVGELIWQDETLSINNGETGEIAKKLYDTITGIQKGAVADEFGWTTEVAALTESK

SEQ ID NO: 90559 - DNA, 1077 bp, Staphylococcus aureus
  CDS (1)..(1077): transl_table=11
atgtcacaagcagttaaaattgaattacgcgaaacattaaaagaaaaaccagatacatctcaattaggatttggtaagtattttacagattatatgttgagttatgattatgatgcggataaaggatggcatgatttgaagattgtaccttatggtccaattgaaatttcgccagcagcacaaggtgttcactatggacaatcagtgttcgaaggtttaaaagcatataaaaaagatggagaggttgcacttttccgtccagatgaaaactttaagcgtcttaataactcgttagcacgcttagaaatgcctcaagtcaatgaaggtgaattgctagaaggacttaagcaattagttgatttagagagagaatgggttccggaaggtgaaggtcaatcattatatattcgtccttttgtttttgcgacagaaggggtacttggcgttggtgcatcacatcagtataaattattaattattttatctccttcaggtgcatattatggtggtgaaactttaaaaccaactaaaatctatgtagaagatgaatatgtacgtgctgttcgtggcggtgtaggctttgcgaaagttgcaggtaactatgcggcaagtttattagcacaaactaatgcaaataaattaggttatgaccaagtattatggcttgatggtgttgaacagaaatatatcgaagaagttggtagcatgaacattttcttcgttgaaaatggcaaagtaattacaccagagttgaatggcagtattctacctggtattacacgtaaatctattatcgaattagctaaaaacttaggatatgaagtcgaagagcgccgcgtttcaatcgatgaattattcgaatcatatgataaaggtgagttaacagaagtatttggtagtggtactgcagcagttatttcacctgtaggtacattgagatatgaagatcgtgaaatcgttattaataataatgagactggtgaaattactcaaaaattatacgacgtctatactggtattcaaaatggtactttagaagataaaaatggttggagagtcgttgtaccaaaatattaa

SEQ ID NO: 90560 - protein, 358 aa, Staphylococcus aureus
MSQAVKIELRETLKEKPDTSQLGFGKYFTDYMLSYDYDADKGWHDLKIVPYGPIEISPAAQGVHYGQSVFEGLKAYKKDGEVALFRPDENFKRLNNSLARLEMPQVNEGELLEGLKQLVDLEREWVPEGEGQSLYIRPFVFATEGVLGVGASHQYKLLIILSPSGAYYGGETLKPTKIYVEDEYVRAVRGGVGFAKVAGNYAASLLAQTNANKLGYDQVLWLDGVEQKYIEEVGSMNIFFVENGKVITPELNGSILPGITRKSIIELAKNLGYEVEERRVSIDELFESYDKGELTEVFGSGTAAVISPVGTLRYEDREIVINNNETGEITQKLYDVYTGIQNGTLEDKNGWRVVVPKY

SEQ ID NO: 90561 - DNA, 1164 bp, Brassica napus
  CDS (1)..(1164)
atggctcttcgctgcttatctcaatcttcatcaacaactttctcttatctctctaagatctgtggatttcgtatgcatgggactaaggcagcagtttctgttgtagaagaacatgtctcgaagatggtggggacaggacgtgaggatgaagagtatgctgatgtggattgggacaacctcggattcagtcttgtacggacagattacatgttcgccaccagaagttgcagagaaggaaacttcgaacaaggttgccttagccgttacggcaacatcgagctcaaccctgctgctggaattctcaactacggccagggattaatcgaggggatgaaagcttacagaggagaagatggtagggttcttctatttcgtccagagttaaatgccgtgcgtatgaagaaaggagcagagagaatgtgtatgcattctccttctgttcaacagtttattgaaggtgttaagcaaaccgttcttgcaaacagacgctgggttcctcctcctggaaaaggctccttgtatctcagaccattgttgtttggaagtggagcaagcttgggtttgtctgcagcatcagagtttacgtttcttgtgtttggttctcctgttcaaaactattttaaagaaggtacatcagcactgaatctctacgttgaggaggtgattccacgcgcgtatcttggaggaagtggtggcgttaagtccatttctaattacggtccagtgcttgaagtcatgagaagagcgaaagcgagagggttttcggatgttttgtatctggatgcagaaactaagaagaatatggaggaagtttctgcttctaatatattccttgtgaaggggaatacaatagtgactccagctacaaacgggacgattctcggagggatcacacgaaagagcgtaatcgaaattgctattgatcttggttacaaggtggaagaacgagtagttccggtagaagaactgaaggaagcagaagaagttttctgcactggaactgccaccggagttgcttctgttgggagcatcacgtttcagaacaccaggactgagtacaaagttggagatgggcttgtaacgcagcaacttcgatctattcttgtcggaatacaaactggttctatccaagacactaagaattgggtgttggagatagattaa

SEQ ID NO: 90562 - protein, 387 aa, Brassica napus
MALRCLSQSSSTTFSYLSKICGFRMHGTKAAVSVVEEHVSKMVGTGREDEEYADVDWDNLGFSLVRTDYMFATRSCREGNFEQGCLSRYGNIELNPAAGILNYGQGLIEGMKAYRGEDGRVLLFRPELNAVRMKKGAERMCMHSPSVQQFIEGVKQTVLANRRWVPPPGKGSLYLRPLLFGSGASLGLSAASEFTFLVFGSPVQNYFKEGTSALNLYVEEVIPRAYLGGSGGVKSISNYGPVLEVMRRAKARGFSDVLYLDAETKKNMEEVSASNIFLVKGNTIVTPATNGTILGGITRKSVIEIAIDLGYKVEERVVPVEELKEAEEVFCTGTATGVASVGSITFQNTRTEYKVGDGLVTQQLRSILVGIQTGSIQDTKNWVLEID

SEQ ID NO: 90563 - DNA, 1236 bp, Brassica napus
  CDS (1)..(1236)
atggagagagcaaccatttccccgagcctgagtcaaaactacttactttgtccttcaccacgcgcctttaccacgcgcctccactccttctccactactcggaacctatctccgtcatcttgctcctcctccatcaagcttcagcattcttcttccaatggcggaacctcccttactcgttgcaacgccgtcctctccaattcgtcttccagtgcggaggtagcagacatagattgggacaacatagggttcggtcttaagccgactgattacatgtacgtcatgaaatgcaacctcgatggggagttctcaaagggtgaattgcaactttttgggaacattgaagtcagcccatctgctggtgttctcaactatggacagggactgttcgaaggaatgaaagcttacagaaagcaagacggtaagaacatcctcctctttcgtcctgaagagaatgcaaatcgtatgagaagtggcgccgagaggatgtgtatgcctgctcctaccattgaccagtttgtcaaagctgtcaaagcaaccgtattagcaaacaaacgttgggttccacctgcagggaaaggttctttgtatattagaccgttgctaatgggaactggagctgttcttggtcttgcccctgctccagaatatactttccttgtctatgtttctcctgttggaaactacttcaaggaaggtgtggcaccaatcaatttgattgtggaaagtgaatttcaccgtgcaacacctggtggtaccggtggtgttaagaccatcggcaactacgctgcagtactgaaagcacagtcgattgcgaaatctaaaggatattccgacgttttgtaccttgattgcgttcacaaacgataccttgaagaggtctcctcttgcaatatcttcattgtcaaggacaatgtgatctctactcctgatataaaaggaacaatcttaccagggattacgcggaaaagtataatcgacgtggctcgtacccaaggttttaaggtggaggaacggaatgtgacagttgacgagttactagaagctgacgaggttttctgcacaggaaccgccgtggttgtctctccagttggaagcattacgcacaaaggcaaaagagtatcttatggagaaggtagctttggacccgtctcggagaaactctacaccgttctgacaagcttgcagatgggtctgagcgaggacaacatgaactggactctgaatctgagttag

SEQ ID NO: 90564 - protein, 411 aa, Brassica napus
MERATISPSLSQNYLLCPSPRAFTTRLHSFSTTRNLSPSSCSSSIKLQHSSSNGGTSLTRCNAVLSNSSSSAEVADIDWDNIGFGLKPTDYMYVMKCNLDGEFSKGELQLFGNIEVSPSAGVLNYGQGLFEGMKAYRKQDGKNILLFRPEENANRMRSGAERMCMPAPTIDQFVKAVKATVLANKRWVPPAGKGSLYIRPLLMGTGAVLGLAPAPEYTFLVYVSPVGNYFKEGVAPINLIVESEFHRATPGGTGGVKTIGNYAAVLKAQSIAKSKGYSDVLYLDCVHKRYLEEVSSCNIFIVKDNVISTPDIKGTILPGITRKSIIDVARTQGFKVEERNVTVDELLEADEVFCTGTAVVVSPVGSITHKGKRVSYGEGSFGPVSEKLYTVLTSLQMGLSEDNMNWTLNLS

SEQ ID NO: 90565 - DNA, 1239 bp, Glycine max
  CDS (1)..(1239)
atggagagcagcgccgtctacggaagcattcgaccaagttacccgatctgcccctctcgacgttcttcctctcttctctctcaccaatctcccttcctattcgagccttctctttctctcaagcttcgcaagcagtttcctctcatttcgcagaattttctggaagccgcttctcctctcaggccttctgccactttgtcttctgattcctaccgtgagacgattgaattagctgatatagaatgggacaaccttggttttgggcttcaacccacggattatatgtattccatgaaatgcacacgaggtggaaccttctccaaaggtgaactgcagcgttttggtaacattgaattgaacccctcagcaggagttttaaactatggtcagggattatttgagggtttgaaagcgtatcggaaacaagatgggagtatactcctcttccgtccggaagaaaatggtttgcggatgcagataggtgcagagaggatgtgcatgccatcgcctactgttgagcagtttgtggaagctgtaaaggagacagttttagcaaacaaacgttgggttccccctgcaggtaaaggttccctgtatattagacctttgctaatgggaagtggaccggtacttggtcttgcacctgctccagagtacacctttctaatatacgtttcacctgttgggaactacttcaaggaaggtttggccccaatcaatttgattgtggaaaatgaattacatcgtgcaactcctggtggcactggaggtgtgaagaccattggaaactatgctgcagttctgaaggcacagtctgaagcaaaagctaaaggctactctgatgttttataccttgactgtgtgcacaaaagatatttggaggaggtttcttcatgcaacatttttgttgttaagggtaacgttatttcaactccagctattaaagggacaatcctacctggcattactcgcaaaagtataattgatgttgctcgaagccaagggttccaggttgaggagcgattagtgtcagtggatgaattgctagatgctgacgaggtcttctgcacgggaacagctgtggttgtatcacctgttggcagtattacttatcttgacaagagggtagcatatggggatggtattggcgtggttgcacagcaactttatactgtctttaccagattacagatgggtcttacggaggatgagatgaattggactgttgagctgagataa

SEQ ID NO: 90566 - protein, 412 aa, Glycine max
MESSAVYGSIRPSYPICPSRRSSSLLSHQSPFLFEPSLSLKLRKQFPLISQNFLEAASPLRPSATLSSDSYRETIELADIEWDNLGFGLQPTDYMYSMKCTRGGTFSKGELQRFGNIELNPSAGVLNYGQGLFEGLKAYRKQDGSILLFRPEENGLRMQIGAERMCMPSPTVEQFVEAVKETVLANKRWVPPAGKGSLYIRPLLMGSGPVLGLAPAPEYTFLIYVSPVGNYFKEGLAPINLIVENELHRATPGGTGGVKTIGNYAAVLKAQSEAKAKGYSDVLYLDCVHKRYLEEVSSCNIFVVKGNVISTPAIKGTILPGITRKSIIDVARSQGFQVEERLVSVDELLDADEVFCTGTAVVVSPVGSITYLDKRVAYGDGIGVVAQQLYTVFTRLQMGLTEDEMNWTVELR

SEQ ID NO: 90567 - DNA, 1212 bp, Zea mays
  CDS (1)..(1212)
atggagcccggcctcgcatcccgcgtcgcccgttcagccgctcagccgctttccggctgcctgtcgcggcactcgctctcgccgtggctcaagatccagaaccacttttatcctatgccaagtctctgtcacaaggttcctagcacgggaaaatgccacgcttctatgacaacaagttacatggaaacatcagatgtcactgatttggactgggaaaaccttggctttggcctcatcgagactgactttatgtatgttgcaaaatgtggaactgatggaatcttttccaaaggtgaagtcctaccatttggtcctatagcactgagtccttcagctggagtcttaaattatgggcagggattgtttgaaggcctaaaagcatataggaaaactgatgggtccatccttctatttcgtccagaggagaatgctataaggatgctaagcggtgcagagaggatgtgtatgcctgctccaactgttgagcaattcgttgatgctgttaaacaaactgttttggcaaataaaagatgggtgcctcctactggtaaaggttccctatatatcaggccactcctaataggaagcggtgcagttcttggtcttgcgcctgctcctgagtatagctttatcatttttgtatcccctgttgggaattatttcaaggaaggtttatctcctattaatttgatcgttgaggataaatttcaccgtgccagccctggtggaactggaggtgtgaaaaccattggaaactatgcctcggtactgaaagcacaaaagattgcaaaggggaaaggatattctgatgtcctttatttggatgctgttcatgacaaatatcttgaagaagtctcttcctgcaatatttttgttgtgaaagacaatgttatttctacgcctgccattaaaggaacaatacttcctggtataacgaggaaaagtatcattgaagttgctcagagcaaaggtttcaaggttgaggagcgtctggtgtgtgtagatgagttgattaacgctgatgaagttttctgcacggggactgctgttgtggtgtcacctgtggggagtgttacatatatggggaaaagggtggaatatggcaaccaaggagtcggtgtcgtgtctcagcaactatacaagtcacttacaagcctccagatgggcaatgtggaggactggatgggttggaccatgcaacttaatcagtag

SEQ ID NO: 90568 - protein, 403 aa, Zea mays
MEPGLASRVARSAAQPLSGCLSRHSLSPWLKIQNHFYPMPSLCHKVPSTGKCHASMTTSYMETSDVTDLDWENLGFGLIETDFMYVAKCGTDGIFSKGEVLPFGPIALSPSAGVLNYGQGLFEGLKAYRKTDGSILLFRPEENAIRMLSGAERMCMPAPTVEQFVDAVKQTVLANKRWVPPTGKGSLYIRPLLIGSGAVLGLAPAPEYSFIIFVSPVGNYFKEGLSPINLIVEDKFHRASPGGTGGVKTIGNYASVLKAQKIAKGKGYSDVLYLDAVHDKYLEEVSSCNIFVVKDNVISTPAIKGTILPGITRKSIIEVAQSKGFKVEERLVCVDELINADEVFCTGTAVVVSPVGSVTYMGKRVEYGNQGVGVVSQQLYKSLTSLQMGNVEDWMGWTMQLNQ

SEQ ID NO: 90569 - DNA, 1080 bp, Brassica napus
  CDS (1)..(1080)
atggctccatctgtgcaaccttcttcgtcacctcttcgtacaagtaaaggcgatgaaaaatatgcgaatgtgaaatgggaagagctcggattctctctgattccgacagattgcatgtatgtggccaagtgcagacaaggagagagtttcacagaagggaagattgttccttacggtgacatttcaatcagcccttgttctcctattctcaactatggccagggactatttgaaggtctgaaagcttacaggacagaagacgaccggattctgattttcagacctcacgaaaacgctctccgtatgcaagatggtgcagaaaggctttgtatggcaccaccttctgtggagttcttcgtggaagcagttaagcaaactgtgcttgccaacaagaaatgggttcctcctccgggtaaaggagctttgtatataaggcctctgctaatagggagtggcgctatacttggagtagctccagcgcctgagtacaccttcctcatttatgcatctcccgtaggagattaccataaggcaagctcaggtctgaaccttaaagttgatcataaaagtcaccgagcacattctggtgggacaggtggtgtcaagagttgcacaaactattctccagttgtgaagtcgttggtggaagcaaagtcatcaggcttctctgatgtcttgttcctagacgcggcaactgggagaaacatcgaagaggcgtctgcatgtaacatcttcattgtcaaggggaacattgtgtccactccaccgacttcaggaaccattttaccaggaatcacaaggaaaagcataagcgagctagcccgtgatatcggctatcaggttcaagaacgagatgtttcagtggatgagttattagaggcagatgaagtgttctgcacaggaactgcagtggtcgttaaagctgttgaaaccgtgaccttccatgacaagaaggtgaaatacagaacaggaaaagaagcgttgtctaagaagcttcactcgatgttgacgagtattcagacaggtcttgttgaagatacaaaaggttggatggtggacatcgatccttgtcaaggttga

SEQ ID NO: 90570 - protein, 359 aa, Brassica napus
MAPSVQPSSSPLRTSKGDEKYANVKWEELGFSLIPTDCMYVAKCRQGESFTEGKIVPYGDISISPCSPILNYGQGLFEGLKAYRTEDDRILIFRPHENALRMQDGAERLCMAPPSVEFFVEAVKQTVLANKKWVPPPGKGALYIRPLLIGSGAILGVAPAPEYTFLIYASPVGDYHKASSGLNLKVDHKSHRAHSGGTGGVKSCTNYSPVVKSLVEAKSSGFSDVLFLDAATGRNIEEASACNIFIVKGNIVSTPPTSGTILPGITRKSISELARDIGYQVQERDVSVDELLEADEVFCTGTAVVVKAVETVTFHDKKVKYRTGKEALSKKLHSMLTSIQTGLVEDTKGWMVDIDPCQG

SEQ ID NO: 90571 - DNA, 1161 bp, Brassica napus
  CDS (1)..(1161)
atggctcttcgctgcttacttaaatctccaacaacttcctcttatatttctaagatctgtggatttcgtatgcatgggaccaaggcagtagcttctgttgtagaagaacatgtatcagcgatgctgaggtcagaacgtgaggatgaagagtatgctgatgtggactgggacaacctcggattcagtcttgtaccaacagattacatgttcgccaccaaaagttgtagagaaggaaacttcgaacaaggttgccttagccgttacggcaacatggaactcaaccctgctgctggaattctcaactatggccagggactaatcgaggggatgaaggcgtacagaggagaagacggcagggttcttatgtttcgtccagagctaaacgcgatgcgtatgaagaatggagctgagagaatgtgtatgcattctccttctgttcagcagtttatggaaggtgtcaagcagaccgttctcgcaaacaaacgttgggttcctcctccgggaaaaggctcgttgtatctcagaccgttgttgtttggaagcggagcaagcctgggtgtgtctgcagcatcagaatacacttttcttgtgtttggctctcctgttcaaaactattttaaagaaggtacagcagcactgaacctctacgttgaggaggtgattccacgcgcgtatattggaggaagtggtggcgttaaggccatttctaattacggtccagtgcttgaagtgatgagaagagcgaaagcgagagggttttccgatgtattgtatctggacgcagaaactaagaagaacatagaggaagtttctgcttctaatatattccttgtaaaggggaatacaatagtaactccagctacaaacgggacgattctcagagggatcacacgaaagagcgtaatcgaaattgccattgatcttggttacaaggtggaagaaagagtagttccggtagaagaaatgaaggaagcagaagaagttttctgcaccggaactgccaccggaattgcttctgttggaagcatcacgtatcagaacacaaggactgagtacaaagtgggagatgggctagtaacacaacaacttcgatctattcttgtcggaatacaaaatggttctatacaagacacaaaaaactgggtgctggagatagactaa

SEQ ID NO: 90572 - protein, 386 aa, Brassica napus
MALRCLLKSPTTSSYISKICGFRMHGTKAVASVVEEHVSAMLRSEREDEEYADVDWDNLGFSLVPTDYMFATKSCREGNFEQGCLSRYGNMELNPAAGILNYGQGLIEGMKAYRGEDGRVLMFRPELNAMRMKNGAERMCMHSPSVQQFMEGVKQTVLANKRWVPPPGKGSLYLRPLLFGSGASLGVSAASEYTFLVFGSPVQNYFKEGTAALNLYVEEVIPRAYIGGSGGVKAISNYGPVLEVMRRAKARGFSDVLYLDAETKKNIEEVSASNIFLVKGNTIVTPATNGTILRGITRKSVIEIAIDLGYKVEERVVPVEEMKEAEEVFCTGTATGIASVGSITYQNTRTEYKVGDGLVTQQLRSILVGIQNGSIQDTKNWVLEID

SEQ ID NO: 90573 - DNA, 1158 bp, Brassica napus
  CDS (1)..(1158)
atgtttaaagcaatctcatctctgcgcaaaagtctggttctacctcttcattcaaatattcgtacgctacaaactttctctaagtacaacgcacaagctgcctcagccttagaggagcgagagaaacctctttatcaagatgatgagtatgctgatatggactgggacaatctcgggtttggtctaactccagctgattacatgtacgtcatgaaatgctcaaaagacggtgagttcactaaaggtgaacttagtcgctttggtaatattcagctaagtccttctgctggagtcttgaactatggacaggcgatatatgaaggtacaaaagcatacaggaaagaaaacgggaagcttcttctgtttcgccctgatcacaacgctgtccgaatgcagcttggagctgaacgtatgctcatgccttctccttcggttgatcagtttgttgatgctgttaaacaaaccgcttttgcaaataaacgttgggttcctccttcagggaaagggtctttgtacattaggcctctgttgatgggaactggtccagttcttggtttgggaccagcacctgaatatacatttattgtctatgcatctccagttggtaactacttcaaggaaggtattgctgctcttaacctctatgttgaggaagagcatgctcgtgcagctcctggtggatctggaggcgtcaagagcatcacaaactatgccccggttttgaaagcactgagtagagccaagagtcttgggttttcagacgttctttaccttgactctgtcaagaagaagtatcttgaggaagcttctgcttgcaacgtcttcgttgttaagggtcggacaatctcaactcctgcaactaatggaacaattcttgaggggattactaggaaaagtgtgatggagatcgcaagtgatcaaggttatcaggtagtagagaaggcagttcatgtgaatgaagtaatggatgcagatgaagttttctgcacaggaactgctgtaggagttgctcctgtaggcactataacatatcaagacaaaagaataaagtatgaaactggggatgaatctgtctgccagaaactgcggtcggtcctggtcggtatccagacaggaaccattgaagataccaagggatgggtcacatgcatcaactga

SEQ ID NO: 90574 - protein, 385 aa, Brassica napus
MFKAISSLRKSLVLPLHSNIRTLQTFSKYNAQAASALEEREKPLYQDDEYADMDWDNLGFGLTPADYMYVMKCSKDGEFTKGELSRFGNIQLSPSAGVLNYGQAIYEGTKAYRKENGKLLLFRPDHNAVRMQLGAERMLMPSPSVDQFVDAVKQTAFANKRWVPPSGKGSLYIRPLLMGTGPVLGLGPAPEYTFIVYASPVGNYFKEGIAALNLYVEEEHARAAPGGSGGVKSITNYAPVLKALSRAKSLGFSDVLYLDSVKKKYLEEASACNVFVVKGRTISTPATNGTILEGITRKSVMEIASDQGYQVVEKAVHVNEVMDADEVFCTGTAVGVAPVGTITYQDKRIKYETGDESVCQKLRSVLVGIQTGTIEDTKGWVTCIN

SEQ ID NO: 90575 - DNA, 1164 bp, Brassica napus
  CDS (1)..(1164)
atggctcttcgctgcttatctcaatcttcatcaacaactttctcttatctctctaagatctgtggatttcgtatgcatgggactaaggcagcagtttctgttgtagaagaacatgtctcgaagatggtggggacaggacgtgaggatgaagagtatgctgatgtggattgggacaacctcggattcagtcttgtacggacagattacatgttcgccaccagaagttgcagagaaggaaacttcgaacaaggttgccttagccgttacggcaacatcgagctcaaccctgctgctggaattctcaactacggccagggattaatcgaggggatgaaagcttacagaggagaaaatggtagggttcttctctttcgtccagagttaaatgcgatgcgtatgaagaaaggagcagagagaatgtgtatgcattctccctctgttcaacaatttattgaaggtgttaagcaaaccgttcttgcaaacagacgctgggttcctcctcctggaaaaggctccttgtatctcagaccattgttgtttggaagtggagcaagcttgggtttgtctgcagcatcagagtttacgtttcttgtgtttggttctcctgttcaaaactattttaaagaaggtacatcagcactggatctctacgttgaggaggtgattccacgcgcgtatcttggaggaagtggtggcgttaagtccatttctaattacggtccagtgcttgaagtgatgagaagagcgaaagcgagagggttttccgatgtattgtatctggacgcagaaactaagaagaacatagaggaagtttctgcttctaatatattccttgtaaaggggaatacaatagtgactccagctacaaacgggacgattctcggagggatcacacgaaagagcgtaatcgaaattgctattgatcttggttacaaggtggaagaacgagtagttccggtagaagaactgaaggaagcagaagaagttttctgcactggaactgccaccggagttgtttctgttgggagcatcacgtatcagaacaccaggactgagtacaaagttggagatgggcttgtaacgcagcaacttcgatctattcttgtcggaatacaaactggttctatccaagacactaagaattgggtgttggagatagattaa

SEQ ID NO: 90576 - protein, 387 aa, Brassica napus
MALRCLSQSSSTTFSYLSKICGFRMHGTKAAVSVVEEHVSKMVGTGREDEEYADVDWDNLGFSLVRTDYMFATRSCREGNFEQGCLSRYGNIELNPAAGILNYGQGLIEGMKAYRGENGRVLLFRPELNAMRMKKGAERMCMHSPSVQQFIEGVKQTVLANRRWVPPPGKGSLYLRPLLFGSGASLGLSAASEFTFLVFGSPVQNYFKEGTSALDLYVEEVIPRAYLGGSGGVKSISNYGPVLEVMRRAKARGFSDVLYLDAETKKNIEEVSASNIFLVKGNTIVTPATNGTILGGITRKSVIEIAIDLGYKVEERVVPVEELKEAEEVFCTGTATGVVSVGSITYQNTRTEYKVGDGLVTQQLRSILVGIQTGSIQDTKNWVLEID

SEQ ID NO: 90577 - DNA, 1080 bp, Brassica napus
  CDS (1)..(1080)
atggctccatctgtgcaaccttcttcgtcacctcttcgtacaagtgaaggcgatgaaaaatatgcgaatgtgaaatgggaggagctcggattctctctgattccgacagattgcatgtatgtggccaagtgcagacaaggagagagtttcactgaagggaagattgttccttacggtgacatttcaatcagcccttgttgtcctattctcaattatggccagggactatttgaaggtctgaaagcttacaggacagaagacgaccggattctgattttcagacctcacgaaaacgctctccgtatgcaagatggtgcagaaaggctttgtatggcaccaccttctgtggagttcttcgtggaagcagttaagcaaactgtgcttgccaacaagaaatgggttcctcctccgggtaaaggagctttgtatataaggcctctgctaatagggagtggcgctatacttggagtagctccagcgcctgagtacaccttcctcatttatgcatctcccgtaggagattaccataaggcaagctcaggtctgaaccttaaagttgatcataaaagtcaccgagcacattctggtgggacaggtggtgtcaagagttgcacaaactattctccagttgtgaagtcgttggtggaagcaaagtcatcaggcttctctgatgtcttgttcctagatgcggcaactgggagaaacatcgaagaggcgtctgcatgtaacatcttcattgtcaaggggaacattgtgtccactccaccgacttcaggaaccattttaccaggaatcacaaggaaaagcataagcgagctagctcgtgatatcggctatcaggttcaagaacgagatgtttcagtggatgagttattagaggcagatgaagtgttctgcacaggaactgcagtggtcgttaaagctgttgaaaccgtgaccttccatgacaagaaggtgaaatacaggacaggaaaagaagcgttgtctaagaagcttcactcgatgttgacgagtattcagacaggtcttgttgaagatacaaaaggttggatggtggacatcgatccttgtcaaggttga

SEQ ID NO: 90578 - protein, 359 aa, Brassica napus
MAPSVQPSSSPLRTSEGDEKYANVKWEELGFSLIPTDCMYVAKCRQGESFTEGKIVPYGDISISPCCPILNYGQGLFEGLKAYRTEDDRILIFRPHENALRMQDGAERLCMAPPSVEFFVEAVKQTVLANKKWVPPPGKGALYIRPLLIGSGAILGVAPAPEYTFLIYASPVGDYHKASSGLNLKVDHKSHRAHSGGTGGVKSCTNYSPVVKSLVEAKSSGFSDVLFLDAATGRNIEEASACNIFIVKGNIVSTPPTSGTILPGITRKSISELARDIGYQVQERDVSVDELLEADEVFCTGTAVVVKAVETVTFHDKKVKYRTGKEALSKKLHSMLTSIQTGLVEDTKGWMVDIDPCQG

SEQ ID NO: 90579 - DNA, 1161 bp, Brassica napus
  CDS (1)..(1161)
atggctcttcgctgcttacttaaatctccaacaacttcctcttatatttctaagatctgtggatttcgtatgcatgggaccaaggcagtagcttctgttgtagaagaacatgtatcagcgatgctgaggtcagaacgtgaggatgaagagtatgctgatgtggactgggacaacctcggattcagtcttgtaccaacagattacatgttcgccaccaaaagttgtagagaaggaaacttcgaacaaggttgccttagccgttacggcaacatggaactcaaccctgctgctggaattctcaactatggccagggactaatcgaggggatgaaggcgtacagaggagaagacggtagggttcttatgtttcgtccagagctaaacgcgatgcgtatgaagaatggagctgagagaatgtgtatgcattctccttctgtccagcagtttatggaaggtgtcaagcagaccgttctcgcaaacaaacgttgggttcctcctccgggaaaaggctcgttgtatctcagaccgttgttgtttggaagcggagcaagcctgggtgtgtctgcagcttcagaatacacttttgttgtgtttggctctcctgttcagaactattttaaggaaggtacagcagccttgaacctctacgttgaggaggtgattccacgcgcgtatattggaggaactggtgccgttaaggccatttctaattacggtccagtgcttgacgcggtgagaagggccaaagcaagaggattctcggatgtattgtatcttgatgcagaaacaaagaagaacatagaagaagtttctgctgctaatatattccttgtaaaggggaatacaatagtaactccagctacaaatgggactattctcagagggatcatacgagagagcgttatcgaaattgcccttgatcttggttataaggtggaagaaagagtagttccggtagaagaaatgaaggaagcagaagaagttttctgcaccggaactgccgctggaattgcttctgttggaagcatcacgtttcagaacataaggactgagtacaaagtgggagatgggctagttacacaacaacttcgatctattcttgtcggaatacaaaatggttctatacaagacacaaaaggctgggtgctggagattgactaa

SEQ ID NO: 90580 - protein, 386 aa, Brassica napus
MALRCLLKSPTTSSYISKICGFRMHGTKAVASVVEEHVSAMLRSEREDEEYADVDWDNLGFSLVPTDYMFATKSCREGNFEQGCLSRYGNMELNPAAGILNYGQGLIEGMKAYRGEDGRVLMFRPELNAMRMKNGAERMCMHSPSVQQFMEGVKQTVLANKRWVPPPGKGSLYLRPLLFGSGASLGVSAASEYTFVVFGSPVQNYFKEGTAALNLYVEEVIPRAYIGGTGAVKAISNYGPVLDAVRRAKARGFSDVLYLDAETKKNIEEVSAANIFLVKGNTIVTPATNGTILRGIIRESVIEIALDLGYKVEERVVPVEEMKEAEEVFCTGTAAGIASVGSITFQNIRTEYKVGDGLVTQQLRSILVGIQNGSIQDTKGWVLEID

SEQ ID NO: 90581 - DNA, 1257 bp, Brassica napus
  CDS (1)..(1257)
atggagagagctacactttccccgagtcttaatcaaagttacctgctttctccttcacgcgcctccaccacgcgcctccattcattctccttcactcggaacttatcgccatcaacttcctccatcaagcttcagccttcttcttcctctgtctcttcaagtttcatcaatggcggagtctctcttactcggtgcaacgccgtcctgtcaaactcttcttccagtacggatgcgtctgaggtagccgacatagattgggacaacatcgggttcggtcttaagccgaccgattacatgtacgtcatgaaatgtaaccttgggggtgagttctctaatggtgagttgcaacgttttgggaacattgaagtcagcccatctgctggtgtactcaactacggacaggggttgttcgaagggatgaaagcttacagaaagcaagacggtaagaataccctcctcttccgtcctgaagagaatgctacacgtatgagatgtggtgctgagaggatgtgtatgcctgctcctaccattgaccagtttgtcgaagctgtgaaagcaactgttttagcaaataaacgttgggttccacccccaggtaaaggttccttgtacattagaccgttgctaatgggaactggagctgttcttggtcttgctcctgcaccagaatatactttccttgtctatgtctctcctgttggaaactacttcaaagaaggtgtgtcaccaatcaatttgattgtggaaagtgaatttcaccgtgcgacacctggtggtacgggaggtgttaaaaccattggcaattatgctgcagttttaaaagcacagtcggtggcaaaagccaaaggatattccgacgttttgtaccttgattgcgtttacaaaagatatcttgaggaggtctcctcatgcaatatcttcattgtcaaggacaaagtgatatctactcctgaaataaaaggaaccattttgccagggattacgcggaaaagtataatcgacgtggctcgtacccaagggtttaaggtggaggaaaggaatgtgacagtggacgagttactagaagcggacgaagttttctgcacaggaaccgccgtggttgtctctcccgttggaagcattacccacaaaggcaaaagagtatcttatggagaaggtagctttggacctgtctccgagaaactctacaccgttctgacaagcttgcagatgggtctgagcgaggacaacatgaactggactgttaatctgagttag

SEQ ID NO: 90582 - protein, 418 aa, Brassica napus
MERATLSPSLNQSYLLSPSRASTTRLHSFSFTRNLSPSTSSIKLQPSSSSVSSSFINGGVSLTRCNAVLSNSSSSTDASEVADIDWDNIGFGLKPTDYMYVMKCNLGGEFSNGELQRFGNIEVSPSAGVLNYGQGLFEGMKAYRKQDGKNTLLFRPEENATRMRCGAERMCMPAPTIDQFVEAVKATVLANKRWVPPPGKGSLYIRPLLMGTGAVLGLAPAPEYTFLVYVSPVGNYFKEGVSPINLIVESEFHRATPGGTGGVKTIGNYAAVLKAQSVAKAKGYSDVLYLDCVYKRYLEEVSSCNIFIVKDKVISTPEIKGTILPGITRKSIIDVARTQGFKVEERNVTVDELLEADEVFCTGTAVVVSPVGSITHKGKRVSYGEGSFGPVSEKLYTVLTSLQMGLSEDNMNWTVNLS

SEQ ID NO: 90583 - DNA, 1233 bp, Brassica napus
  CDS (1)..(1233)
atggagagagcaaccatttccccgagcctgagtcaaaactacctactttgtccttcacgcgcctttaccacgcgcctccactacttctccactactcggaacttatcaccgtcatcttgttcctcctccatcaagcttcagcattcttcttccaatggcggaacctcccttactcgttgcaacgccgtcctctccaattcgtcttccagtgcggaggtagcagacatagattgggacaacatagggttcggtcttaagccgactgattacatgtacgtcatgaaatgcaacctcgatggggagttctcaaagggtgaattgcaacgttttgggaacattgaagtcagcccatctgctggtgtactcaactacggacaggggttgttcgaagggatgaaagcttacagaaagcaagacggtaagaatatcctcctcttccgtcctgaagagaatgccacacgtatgagatgtggtgctgagaggatgtgtatgcctgctcctaccattgaccagtttgtcgaagctgtcaaagcaactgtcttagcaaacaaacgttgggtcccacctgcagggaaaggttctttgtatattagaccgttgctaatgggaactggagctgttcttggtcttgcccctgctccagaatatactttccttgtctatgtttctcctgttggaaactacttcaaggaaggtgtggcaccaatcaatttgattgtggaaagtgaatttcaccgtgcaacacctggtggtaccggtggtgttaagaccatcggcaactacgctgcagtactgaaagcacagtcgattgcgaaatctaaaggatattccgacgttttgtaccttgattgcgttcacaaacgataccttgaagaggtctcctcttgcaatatcttcattgtcaaggacaatgtgatctctactcctgaaataaaaggaacaatcttaccagggattacgcggaaaagtataatcgacgtggctcgtacccaaggttttaaggtggaggaacggaatgtgacagttgacgagttactagaagctgacgaggttttctgcacaggaaccgccgtggttgtctctccagttggaagcattacgcacaaaggcaaaagagtatcttatggagaaggtagctttggacccgtctcggagaaactctacaccgttctgacaagcttgcagatgggtctgagcgaggacaacatgaactggactctgaatctgagttag

SEQ ID NO: 90584 - protein, 410 aa, Brassica napus
MERATISPSLSQNYLLCPSRAFTTRLHYFSTTRNLSPSSCSSSIKLQHSSSNGGTSLTRCNAVLSNSSSSAEVADIDWDNIGFGLKPTDYMYVMKCNLDGEFSKGELQRFGNIEVSPSAGVLNYGQGLFEGMKAYRKQDGKNILLFRPEENATRMRCGAERMCMPAPTIDQFVEAVKATVLANKRWVPPAGKGSLYIRPLLMGTGAVLGLAPAPEYTFLVYVSPVGNYFKEGVAPINLIVESEFHRATPGGTGGVKTIGNYAAVLKAQSIAKSKGYSDVLYLDCVHKRYLEEVSSCNIFIVKDNVISTPEIKGTILPGITRKSIIDVARTQGFKVEERNVTVDELLEADEVFCTGTAVVVSPVGSITHKGKRVSYGEGSFGPVSEKLYTVLTSLQMGLSEDNMNWTLNLS

SEQ ID NO: 90585 - DNA, 1167 bp, Glycine max
  CDS (1)..(1167)
atgattcaaagaactgtgtcctttcccagtttaaggaaattgcttcttcgggctggttgttctaaatctgcttcgtccaagatcggaacttacaattgctttgcttctcagtcctcccctctaccgagccacaaccctagttaccgtgatgacgagtatgctgatgtggactgggacagtcttggatttggactgatgcccactgattatatgtatattactaaatgttgtgagggccaaaattttggacaaggacaactcagtcgttatgggaacattgaactcagtccatcagctggtgtcctaaattatggtcagggtttattcgaaggcacgaaagcatacagaaaagaaaatgggggcttgctactcttccgtccagaagaaaatgccattcgcatgaagactggtgcccaaagaatgtgcatggcatcgccttccattgatcattttgttgatgctttgaagcaaactgtcttggctaataagcgttgggttcctccaccgggcaaaggatccttgtaccttaggcctctgctcctaggaactggtccggttttgggtttggctcctgcacctgaatacacattcctcatatttgcttcccctgttcgcaactatttcaaggagggctctgctccactcaacttgtacgtggaggaaaactttgaccgtgcttctagccgcggcactggaaacgttaaaaccatttccaattatgcaccggtcttgatggcacaaattcaagccaagaaaagaggattttcggatgtgctataccttgattcagacaccaagaaaaatctcgaggaggtctcttcttgtaacatttttattgccaagggcaaatgcatctcaacacctgctactaatggaactattctttccggaattacccgaaaaagtgtcattgaaattgctcgcgatcatggctatcaggtagaagagcgtgctgttgccgtggatgaattgattgaggctgatgaagttttctgcacaggaactgcggtcggtgttgctccagtagggagtatcacataccaggataaaaggatggaatatataacaggttctggaaccatttgtcaagagctgaacaataccatttcaggaattcaaacgggtactattgaagataagaagggatggattgtcgaagttgattaa

SEQ ID NO: 90586 - protein, 388 aa, Glycine max
MIQRTVSFPSLRKLLLRAGCSKSASSKIGTYNCFASQSSPLPSHNPSYRDDEYADVDWDSLGFGLMPTDYMYITKCCEGQNFGQGQLSRYGNIELSPSAGVLNYGQGLFEGTKAYRKENGGLLLFRPEENAIRMKTGAQRMCMASPSIDHFVDALKQTVLANKRWVPPPGKGSLYLRPLLLGTGPVLGLAPAPEYTFLIFASPVRNYFKEGSAPLNLYVEENFDRASSRGTGNVKTISNYAPVLMAQIQAKKRGFSDVLYLDSDTKKNLEEVSSCNIFIAKGKCISTPATNGTILSGITRKSVIEIARDHGYQVEERAVAVDELIEADEVFCTGTAVGVAPVGSITYQDKRMEYITGSGTICQELNNTISGIQTGTIEDKKGWIVEVD

SEQ ID NO: 90587 - DNA, 1212 bp, Zea mays
  CDS (1)..(1212)
atggagcccggcctcgcatcccgcgtcgcccgttcagccgctcagccgctttccggctgcctgtcgcggcactcgctctcgccgtggctcaagatccagaaccacatttatcctatgccaagtctctgtcacaaggttcctagcacgggaaaatgccacgcttctatgacaacaagttacatggaaacatcagatgtcactgatttggactgggaaaaccttggctttggcctcatcgagactgactttatgtatgttgcaaaatgtggaactgatggaatcttttccaaaggtgaagtcctaccatttggtcctatagcactgagtccttcagctggagtcttaaattatgggcagggattgtttgaaggcctaaaagcatataggaaaactgatgggtccatccttctatttcgtccagaggagaatgctataaggatgctaagcggtgcagagaggatgtgtatgcctgctccaactgttgagcaattcgttgatgctgttaaacaaactgttttggcaaataaaagatgggtgcctcctactggtaaaggttccctatatatcaggccactcctaataggaagcggtgcagttcttggtcttgcgcctgctcctgagtatagctttatcatttttgtatcccctgttgggaattatttcaaggaaggtttatctcctattaatttgatcgttgaggataaatttcaccgtgccagccctggtggaactggaggtgtgaaaaccattggaaactatgcctcggtactgaaagcacaaaagattgcaaaggggaaaggatattctgatgtcctttatttggatgctgttcatgacaaatatctcgaagaagtctcttcctgcaatatttttgttgtgaaagacaatgttatttctacgcctgccattaaaggaacaatacttcctggtataacgaggaaaagtatcattgaagttgctcagagcaaaggtttcaaggttgaggagcgtctggtgtgtgtagatgagttgattaacgctgatgaagttttctgcacggggactgctgttgtggtgtcacctgtggggagtgttacatatatggggaaaagggtggaatatggcaaccaaggagtcggtgtcgtgtctcagcaactatacaagtcacttacaagcctccagatgggcaatgtggaggactggatgggttggaccatgcaacttaatcagtag

SEQ ID NO: 90588 - protein, 403 aa, Zea mays
MEPGLASRVARSAAQPLSGCLSRHSLSPWLKIQNHIYPMPSLCHKVPSTGKCHASMTTSYMETSDVTDLDWENLGFGLIETDFMYVAKCGTDGIFSKGEVLPFGPIALSPSAGVLNYGQGLFEGLKAYRKTDGSILLFRPEENAIRMLSGAERMCMPAPTVEQFVDAVKQTVLANKRWVPPTGKGSLYIRPLLIGSGAVLGLAPAPEYSFIIFVSPVGNYFKEGLSPINLIVEDKFHRASPGGTGGVKTIGNYASVLKAQKIAKGKGYSDVLYLDAVHDKYLEEVSSCNIFVVKDNVISTPAIKGTILPGITRKSIIEVAQSKGFKVEERLVCVDELINADEVFCTGTAVVVSPVGSVTYMGKRVEYGNQGVGVVSQQLYKSLTSLQMGNVEDWMGWTMQLNQ

SEQ ID NO: 90589 - DNA, 1206 bp, Zea mays
  CDS (1)..(1206)
atggaatacggcgccgtcctcgccgccgcgccgctcgtcgcacggccgaactggctcctcctctcgccgccgccactggcgccgtctattcagattcagaatcgtctttattcgatctcgtcattcccactaaaggctggacctgtaagggcatgcagagctttagcaagcaactacacgcaaacatctgaaacagttgatttggactgggagaacctgggttttgggattgtgcaaactgattatatgtatattgctaagtgcgggacagacgggaatttttctgagggtgaaatggtgccttttggacctatagcgctgagtccatcttctggagtcctaaattatggacagggattgtttgagggcctaaaggcgtataagaaaactgatggatccatcctattatttcgcccagaggaaaatgctgagaggatgcggacaggtgctgagaggatgtgcatgcctgcaccctctgtcgagcagtttattgatgcagtaaaacaaaccgttcttgcaaataagagatggattcctcctactggtaaaggttctctgtatattaggcccttacttatgggaagtggggctgttcttggtcttgcacctgctcctgagtatacattcattatatttgtctctcctgttggaaactactttaaggaaggtttagcaccaataaatttgatagttgaagacaagttccatcgtgctactcctggtggtactgggggtgtgaagaccataggaaattatgcttcggtgttgatggcacagaaaattgcaaaggaaaagggttattctgatgtcctctacttggacgctgttcacaagaagtaccttgaagaagtttcttcatgcaatgtttttgttgtcaaggacaatgttatttctaccccagcaataaaaggaacaatattacctggtatcacaaggaaaagtataattgacgttgctttgagtaaaggcttccaggttgaggagcggcttgtttcagtggatgaactgcttgatgctgatgaggtattctgcacaggaactgctgttgtggtgtctcctgttgggagcattacatatcaagggaaaagagtggaatacggccaccaaggtgttggcgttgtgtcccagcagctgtacacttcactgacgagtcttcagatgggtcaaaccgaggattggatgggctggactgtgcaactgaattag

SEQ ID NO: 90590 - protein, 401 aa, Zea mays
MEYGAVLAAAPLVARPNWLLLSPPPLAPSIQIQNRLYSISSFPLKAGPVRACRALASNYTQTSETVDLDWENLGFGIVQTDYMYIAKCGTDGNFSEGEMVPFGPIALSPSSGVLNYGQGLFEGLKAYKKTDGSILLFRPEENAERMRTGAERMCMPAPSVEQFIDAVKQTVLANKRWIPPTGKGSLYIRPLLMGSGAVLGLAPAPEYTFIIFVSPVGNYFKEGLAPINLIVEDKFHRATPGGTGGVKTIGNYASVLMAQKIAKEKGYSDVLYLDAVHKKYLEEVSSCNVFVVKDNVISTPAIKGTILPGITRKSIIDVALSKGFQVEERLVSVDELLDADEVFCTGTAVVVSPVGSITYQGKRVEYGHQGVGVVSQQLYTSLTSLQMGQTEDWMGWTVQLN

SEQ ID NO: 90591 - DNA, 1218 bp, Zea mays
  CDS (1)..(1218)
atggagctctgcacctgcgcggcccgcagttctgcgcccccctcttctagctgccgcgcggcgccattcccgcgagttctctcccatcgcatttggagccgatcgggatactgcactgtctgctttaccccgtcaagccctgttgctaggagtcgattctctactctaatgacgactgcacacaacacagggaccccagatctagttgacttcaattgggatgatcttgggtttcaactgatcccaacggacttcatgtatttaatgagctgttcttcagatggggtgtttatgaatggtaaattagtgccatatgggtcaattgagctgaatccagcagccgccgtgctgaattatggtcagggattgcttgaaggtctacgatcacatagaaaagaggatggatcaatccttctttttcgtccacatgaaaatgcacggcggatggaaattggtgcagaccggttatgcatgcctgcaccaagtgtagagcaattcctagaagctgtgaaactaactgttctggcaaacaagcattgggtgcctccttttggtaaaggttctttgtatatcagaccgcagctaattggaagtggggctatgcttggtgtggcacctgccccacagtacacattcattgtgtttgtttgcccagttgggcattatttcaagggtggtctagctccaatcagcttgttaactgaggaagaataccaccgtgctgcacctggtggaactggtgatataaaaactattgggaactatgcttcggttgtcagtgctcagagaagatccaaggaaaaaggccattctgatgttttatacttagatccactccataataagtttgttgaggaagtttcttcttgtaatatattcatggtgaaggacaatattatttctactccactgttaacggggacaattcttcctggaatcacaaggagaagtgtgattgaaatttctcagaatcttggatttcaggttgaggagcgtcttatcacaatagatgaactgcttggggctgatgaagtcttttgtacaggaacagctgttgtattgtcacctgttgggagcatcacttaccgtggaagaagagtggagtatgggaagaaccaggaggccggagtcgtgtcccaacaactctatgccgcactcacagctatccagaaaggtctcacggaggacagcatgggatggacgttgcagctaacttag

SEQ ID NO: 90592 - protein, 405 aa, Zea mays
MELCTCAARSSAPPSSSCRAAPFPRVLSHRIWSRSGYCTVCFTPSSPVARSRFSTLMTTAHNTGTPDLVDFNWDDLGFQLIPTDFMYLMSCSSDGVFMNGKLVPYGSIELNPAAAVLNYGQGLLEGLRSHRKEDGSILLFRPHENARRMEIGADRLCMPAPSVEQFLEAVKLTVLANKHWVPPFGKGSLYIRPQLIGSGAMLGVAPAPQYTFIVFVCPVGHYFKGGLAPISLLTEEEYHRAAPGGTGDIKTIGNYASVVSAQRRSKEKGHSDVLYLDPLHNKFVEEVSSCNIFMVKDNIISTPLLTGTILPGITRRSVIEISQNLGFQVEERLITIDELLGADEVFCTGTAVVLSPVGSITYRGRRVEYGKNQEAGVVSQQLYAALTAIQKGLTEDSMGWTLQLT

SEQ ID NO: 90593 - DNA, 22 bp, Artificial sequence
  primer
atgaccttggcacccctagacg

SEQ ID NO: 90594 - DNA, 25 bp, Artificial sequence
  primer
tcagttcaaatcagtaacaaccctt

SEQ ID NO: 90595 - protein, 384 aa, Artificial sequence
  consensus sequence
  Variant (2)..(6): Xaa in position 2 to 6 is any amino acid
  Variant (7)..(14): Xaa in position 7 to 14 is any or no amino acid
  Variant (16)..(16): Xaa in position 16 is any amino acid
  Variant (18)..(24): Xaa in position 18 to 24 is any amino acid
  Variant (25)..(26): Xaa in position 25 to 26 is any or no amino acid
  Variant (28)..(42): Xaa in position 28 to 42 is any amino acid
  Variant (43)..(43): Xaa in position 43 is any or no amino acid
  Variant (45)..(47): Xaa in position 45 to 47 is any amino acid
  Variant (48)..(50): Xaa in position 48 to 50 is any or no amino acid
  Variant (52)..(55): Xaa in position 52 to 55 is any amino acid
  Variant (59)..(59): Xaa in position 59 is any amino acid
  Variant (63)..(65): Xaa in position 63 to 65 is any amino acid
  Variant (66)..(66): Xaa in position 66 is any or no amino acid
  Variant (68)..(71): Xaa in position 68 to 71 is any amino acid
  Variant (72)..(73): Xaa in position 72 to 73 is any or no amino acid
  Variant (77)..(77): Xaa in position 77 is any amino acid
  Variant (78)..(78): Xaa in position 78 is any or no amino acid
  Variant (80)..(81): Xaa in position 80 to 81 is any amino acid
  Variant (83)..(86): Xaa in position 83 to 86 is any amino acid
  Variant (88)..(88): Xaa in position 88 is any amino acid
  Variant (90)..(92): Xaa in position 90 to 92 is any amino acid
  Variant (94)..(113): Xaa in position 94 to 113 is any amino acid
  Variant (114)..(114): Xaa in position 114 is any or no amino acid
  Variant (116)..(116): Xaa in position 116 is any amino acid
  Variant (118)..(121): Xaa in position 118 to 121 is any amino acid
  Variant (122)..(126): Xaa in position 122 to 126 is any or no amino acid
  Variant (129)..(129): Xaa in position 129 is any amino acid
  Variant (132)..(139): Xaa in position 132 to 139 is any amino acid
  Variant (142)..(154): Xaa in position 142 to 154 is any amino acid
  Variant (155)..(155): Xaa in position 155 is any or no amino acid
  Variant (158)..(158): Xaa in position 158 is any amino acid
  Variant (160)..(160): Xaa in position 160 is any amino acid
  Variant (161)..(166): Xaa in position 161 to 166 is any or no amino acid
  Variant (168)..(182): Xaa in position 168 to 182 is any amino acid
  Variant (183)..(187): Xaa in position 183 to 187 is any or no amino acid
  Variant (189)..(190): Xaa in position 189 to 190 is any amino acid
  Variant (193)..(193): Xaa in position 193 is any amino acid
  Variant (195)..(196): Xaa in position 195 to 196 is any amino acid
  Variant (198)..(200): Xaa in position 198 to 200 is any amino acid
  Variant (203)..(211): Xaa in position 203 to 211 is any amino acid
  Variant (213)..(215): Xaa in position 213 to 215 is any amino acid
  Variant (217)..(220): Xaa in position 217 to 220 is any amino acid
  Variant (222)..(222): Xaa in position 222 is any amino acid
  Variant (224)..(231): Xaa in position 224 to 231 is any amino acid
  Variant (232)..(235): Xaa in position 232 to 235 is any or no amino acid
  Variant (237)..(240): Xaa in position 237 to 240 is any amino acid
  Variant (242)..(242): Xaa in position 242 is any amino acid
  Variant (244)..(258): Xaa in position 244 to 258 is any amino acid
  Variant (259)..(269): Xaa in position 259 to 269 is any or no amino acid
  Variant (272)..(272): Xaa in position 272 is any amino acid
  Variant (274)..(274): Xaa in position 274 is any amino acid
  Variant (277)..(277): Xaa in position 277 is any amino acid
  Variant (279)..(289): Xaa in position 279 to 289 is any amino acid
  Variant (290)..(303): Xaa in position 290 to 303 is any or no amino acid
  Variant (305)..(305): Xaa in position 305 is any amino acid
  Variant (308)..(312): Xaa in position 308 to 312 is any amino acid
  Variant (314)..(318): Xaa in position 314 to 318 is any amino acid
  Variant (319)..(324): Xaa in position 319 to 324 is any or no amino acid
  Variant (326)..(326): Xaa in position 326 is any amino acid
  Variant (328)..(329): Xaa in position 328 to 329 is any amino acid
  Variant (333)..(367): Xaa in position 333 to 367 is any amino acid
  Variant (368)..(372): Xaa in position 368 to 372 is any or no amino acid
  Variant (374)..(374): Xaa in position 374 is any amino acid
  Variant (376)..(380): Xaa in position 376 to 380 is any amino acid
  Variant (381)..(383): Xaa in position 381 to 383 is any or no amino acid
FXXXXXXXXXXXXXDXMXXXXXXXXXGXXXXXXXXXXXXXXXXPXXXXXXYXXXXFEGXKAYXXXXGXXXXXXFRPXXNXXRXXXXAXRXXXPXXXXXXXXXXXXXXXXXXXXXWXPXXXXXXXXXLYXRPXXXXXXXXLGXXXXXXXXXXXXXXSPXGXXXXXXXYXXXXXXXXXXXXXXXXXXXXAXXGGXGXXKXXXNYXXXXXXXXXAXXXGXXXXLXLXXXXXXXXXXXXEXXXXNXFXXXXXXXXXXXXXXXXXXXXXXXXXXILXGXTRXSXXXXXXXXXXXXXXXXXXXXXXXXXVXERXXXXXEXXXXXXXXXXXEXFXXGTAXXXXXXXXXXXXXXXXXXXXXXXXXXXXXXXXXXXXXXXXQXGXXXXXXXXW

SEQ ID NO: 90596 - protein, 19 aa, Artificial sequence
  protein pattern
  Variant (2)..(3): Xaa in position 2 to 3 is Ala, Cys, Ser or Thr
  Variant (4)..(5): Xaa in position 4 to 5 is any amino acid
  Variant (6)..(6): Xaa in position 6 is Phe, Ile or Leu
  Variant (7)..(7): Xaa in position 7 is any amino acid
  Variant (9)..(9): Xaa in position 9 is Ala, Gly or Ser
  Variant (10)..(12): Xaa in position 10 to 12 is any amino acid
  Variant (16)..(16): Xaa in position 16 is any amino acid
  Variant (18)..(18): Xaa in position 18 is Ala, Gly, Leu or Val
  Variant (19)..(19): Xaa in position 19 is Phe or Tyr
PXXXXXXYXXXXFEGXKXX

SEQ ID NO: 90597 - protein, 38 aa, Artificial sequence
  protein pattern
  Variant (2)..(2): Xaa in position 2 is any or no amino acid
  Variant (4)..(4): Xaa in position 4 is any amino acid
  Variant (5)..(5): Xaa in position 5 is any or no amino acid
  Variant (8)..(8): Xaa in position 8 is any amino acid
  Variant (10)..(11): Xaa in position 10 to 11 is any amino acid
  Variant (13)..(14): Xaa in position 13 to 14 is any amino acid
  Variant (15)..(15): Xaa in position 15 is Ala, Gly, Ser or Thr
  Variant (18)..(18): Xaa in position 18 is Ala, Gly or Ser
  Variant (19)..(19): Xaa in position 19 is Ala, Pro or Ser
  Variant (20)..(20): Xaa in position 20 is Cys, Gly, Ser, Thr or Val
  Variant (21)..(26): Xaa in position 21 to 26 is any amino acid
  Variant (28)..(30): Xaa in position 28 to 30 is any amino acid
  Variant (32)..(33): Xaa in position 32 to 33 is any amino acid
  Variant (34)..(34): Xaa in position 34 is Asp or Gln
  Variant (35)..(36): Xaa in position 35 to 36 is any amino acid
  Variant (37)..(37): Xaa in position 37 is Phe, Trp or Tyr
RXAXXGGXGXXKXXXNYXXXXXXXXXAXXXGXXXXXXL

SEQ ID NO: 90598 - protein, 23 aa, Artificial sequence
  protein pattern
  Variant (3)..(3): Xaa in position 3 is Ala, Gly, Pro or Val
  Variant (4)..(5): Xaa in position 4 to 5 is any amino acid
  Variant (6)..(6): Xaa in position 6 is Asn or Ser
  Variant (7)..(8): Xaa in position 7 to 8 is any amino acid
  Variant (10)..(10): Xaa in position 10 is Phe, Ile, Leu or Met
  Variant (11)..(12): Xaa in position 11 to 12 is any amino acid
  Variant (13)..(13): Xaa in position 13 is Ala, Gly or Ser
  Variant (15)..(15): Xaa in position 15 is any amino acid
  Variant (17)..(19): Xaa in position 17 to 19 is any amino acid
  Variant (20)..(22): Xaa in position 20 to 22 is any or no amino acid
FRXXXXXXRXXXXAXRXXXXXXP

SEQ ID NO: 90599 - protein, 21 aa, Artificial sequence
  protein pattern
  Variant (2)..(2): Xaa in position 2 is any or no amino acid
  Variant (4)..(5): Xaa in position 4 to 5 is any amino acid
  Variant (6)..(6): Xaa in position 6 is any or no amino acid
  Variant (8)..(8): Xaa in position 8 is any amino acid
  Variant (9)..(9): Xaa in position 9 is Ile or Leu
  Variant (11)..(11): Xaa in position 11 is any amino acid
  Variant (13)..(13): Xaa in position 13 is Ile or Val
  Variant (16)..(16): Xaa in position 16 is any amino acid
  Variant (17)..(17): Xaa in position 17 is Cys, Ser or Thr
  Variant (18)..(20): Xaa in position 18 to 20 is any amino acid
  Variant (21)..(21): Xaa in position 21 is Ile, Leu, Met or Val
TXPXXXGXXLXGXTRXXXXXX

SEQ ID NO: 90600 - protein, 16 aa, Artificial sequence
  protein pattern
  Variant (2)..(2): Xaa in position 2 is any or no amino acid
  Variant (4)..(4): Xaa in position 4 is Ile or Leu
  Variant (7)..(7): Xaa in position 7 is any amino acid
  Variant (8)..(8): Xaa in position 8 is Leu, Met or Val
  Variant (9)..(9): Xaa in position 9 is Phe, Ile, Leu, Met or Val
  Variant (10)..(10): Xaa in position 10 is Ala, Gly or Ser
  Variant (11)..(11): Xaa in position 11 is any amino acid
  Variant (12)..(12): Xaa in position 12 is Ala, Asp, Glu, Gly, Gln, Ser or Thr
  Variant (13)..(14): Xaa in position 13 to 14 is any amino acid
LXYXRPXXXXXXXXLG

SEQ ID NO: 90601 - protein, 17 aa, Artificial sequence
  protein pattern
  Variant (2)..(2): Xaa in position 2 is any amino acid
  Variant (3)..(5): Xaa in position 3 to 5 is any or no amino acid
  Variant (7)..(7): Xaa in position 7 is Ala, Cys or Gly
  Variant (8)..(8): Xaa in position 8 is Ala, Cys, Ser or Thr
  Variant (12)..(12): Xaa in position 12 is any amino acid
  Variant (13)..(13): Xaa in position 13 is any or no amino acid
  Variant (15)..(15): Xaa in position 15 is any amino acid
  Variant (16)..(16): Xaa in position 16 is Ala, Pro, Ser or Thr
  Variant (17)..(17): Xaa in position 17 is Ile, Pro or Val
EXXXXFXXGTAXXVXXX

SEQ ID NO: 90602 - DNA, 3513 bp, SACCHAROMYCES CEREVISIAE
  CDS (1)..(3513)
atgaacgagctgaacactgtttcgactaactccagtgactccaccaagaacggtggtacatccaatagtcccgacgatatggactccgcagcagcagcaagtcacgcaataaagaaaagaacaaaggcctcccgggcctgcgatcagtgtcgtaaaaagaagattaaatgtgactacaaagatgaaaagggggtctgctcaaactgccaaaggaatggagaccgttgtagttttgatagggttcctttgaaaaggggaccctcgaaaggctatacgaggagcaccagccatccaaggactaacgaaatacaagaccacaataactcaaggtcgtataatacgtttgataatagtaacaataccctgaataataatacgggcaatagcggcgacaacggtataaacagtaacacagttccaagtaccccttcgagatctaattcagttttattgcccccactgacacagtacattccccaggctggtggcattcctcctagtttccaaaatccagcgatacaatcaactatgcccgcgggtaatattggccaacagcagttttggaaagtgccctaccatgagtttcaacaccaaagaaaaggatctatcgattctttgcaaagtgatatatcggtaagaacattaaatcccaacgagcagttgtcttataacaccgttcaacagtctcccataacgaataaacatactaatgattctggaaatgcaaacggaagtgtcaccggctcaggcagtgcctctggtagtggtggttattggtcctttataagaacttctggtttactagctcctactgatgatcataatggggaacagacaagaagatcaagttccataccttctttgctacgaaatacttcaaattctcttttactaggtggccagcctcagcttcccccacctcagcaacaatcgcagccacaagcacaccaacaaaagttgcaacaaggacagaacctatactcgtattctcaattttcccagcagcaaccgtacaacccatcgatatcatcttttggccagttcgctgctaatggttttcattctagacaaggatcagtcgccagcgaggctatgtctcccagtgcacctgccatgtttactagcacatctacaaaccccgtaaatgttgcacagcaaacacaaagacctcaaggacagcaggtaccgcaattttcatctgagttggatggaaataaaaggcgacaatcagcccccgtatcagtaacattatccacggacaggctgaatggtaatgagaataataatggtgaaattaacaacaataatggcagcaataatagcggttcttctaaggatacatctcaacattcccaagaatctgtaactacaccagcggctttggaagcatccagccctggatcaacgccacagagaagtacaaaaaaacgcagaaaaagttacgtatctaagaagacaaaaccaaagagagattcatctatatctataacatcgaaagattctgctcacccaatgaccacttcatcaactatcgcgtatggacagatatccgatgtagatctaatagacacctactatgagttcatacatgtaggatttccgatcatacctttaaacaaaacgaccttgaccagtgacttattgttagttaacacacagccaatttccaatatacacgaagtcaattcatatgttattttgtggtttagaaattcattggaattgttagttcgtgttgctctgaaacaaaagccaggtggcaagtttttcgataatattgttggcgtggctttgtcgccaagtaatgacaacaacaaagctgggttcactacagccacggcaagggatgatgctgaaaaaacaagacgtgattcacataatgaagtacaggatactttggaagtgcaaagcgtttttattgccgccctcaatgaatgtttccaaaaaatcgtggatattcatcccaaattcagagaaaacaacgaccaaatttcgccgaagatcaaagtcatttatttatctacttttattcttttaaattacattttggcatttgttggatacgataactcatttgtacttggaatgtcggtgacaatttttaacgaatttaaattatacaaacttctattatttccggagccggatataaatgatgtgaagcctccagttgatgaagaggtcagcactggtaatgggaatacaaaaacgtccgaatttgaaattggatctgaaagtgctgggcatatgaatccatccaattcaccaaattccatggacgaaaacattagtcactattcagtgttgtttaaaagattatacgttttgctttcagtgtttgattctttacaaagctgtgcattcggtggtcccaagctattaaacatttccatccaaggttctacagaaagatttttttctaatgatttgggctcaaaatggtgcctggaacaaagccaattgagactgaaaagcgtcttgcaaagcttgaaattgggtgaattgatgagtgagcttaccaggaatagaatatcaatgaacggcaataggaagcctgggttcgatattacgaactcgtcttcactcttatcggaatatgtggaaactcaacctctatccgtagcacagttattttgcaagctattaattggcaaacacaatttcatcaattgcttattatcattatacgattcagaagcaggagtctattcagatttgacattggatttgagttcgaaaatagcagactctctgtgctcattgatatcaataattttgcaagtattgacgttgatattaagactgaatcctacgaacagtattgattttaattatagaccaccgaacccacccgctaataatccgacagtgcaagagggcccatctgctatgggctcgtctccagtcgctgggaaccttagcgctgcacctccatcggaggggaatccagatttttacaagaaattactaggcctgaaacaagacactggcactatcctttcagacctttgccgggggataatttccccctttgctattgctatcctgcacgaggtctacaacatcactgaactggtcaagcagatgcctacatcactcattagcattatgatgacggcaactacaacgcagaatactcaggacaccaagaagtcgcaggacctggtcatgaagctgtcaaactcgatgaatgaagtagttcaaatcaccagcgtgctgacaatgatcaagccattcaagatcttcgagcacgagcttaataagcccataatgtccctgacaggaggactttcgtccacgaccagaaacgacgtcatgtggccaaagtcgggccaaggcctccgcgagtcatcagtcatgaagacattgcttgatgaacgccgtacttctggtacacaaccgacaacggcgccagtagccgcagaggaacccaggcttgagaacgttgccctggaaaatttcgttagtatcggctggaagctgttggacgattccgagttaggctggtattga

SEQ ID NO: 90603 - protein, 1170 aa, SACCHAROMYCES CEREVISIAE
MNELNTVSTNSSDSTKNGGTSNSPDDMDSAAAASHAIKKRTKASRACDQCRKKKIKCDYKDEKGVCSNCQRNGDRCSFDRVPLKRGPSKGYTRSTSHPRTNEIQDHNNSRSYNTFDNSNNTLNNNTGNSGDNGINSNTVPSTPSRSNSVLLPPLTQYIPQAGGIPPSFQNPAIQSTMPAGNIGQQQFWKVPYHEFQHQRKGSIDSLQSDISVRTLNPNEQLSYNTVQQSPITNKHTNDSGNANGSVTGSGSASGSGGYWSFIRTSGLLAPTDDHNGEQTRRSSSIPSLLRNTSNSLLLGGQPQLPPPQQQSQPQAHQQKLQQGQNLYSYSQFSQQQPYNPSISSFGQFAANGFHSRQGSVASEAMSPSAPAMFTSTSTNPVNVAQQTQRPQGQQVPQFSSELDGNKRRQSAPVSVTLSTDRLNGNENNNGEINNNNGSNNSGSSKDTSQHSQESVTTPAALEASSPGSTPQRSTKKRRKSYVSKKTKPKRDSSISITSKDSAHPMTTSSTIAYGQISDVDLIDTYYEFIHVGFPIIPLNKTTLTSDLLLVNTQPISNIHEVNSYVILWFRNSLELLVRVALKQKPGGKFFDNIVGVALSPSNDNNKAGFTTATARDDAEKTRRDSHNEVQDTLEVQSVFIAALNECFQKIVDIHPKFRENNDQISPKIKVIYLSTFILLNYILAFVGYDNSFVLGMSVTIFNEFKLYKLLLFPEPDINDVKPPVDEEVSTGNGNTKTSEFEIGSESAGHMNPSNSPNSMDENISHYSVLFKRLYVLLSVFDSLQSCAFGGPKLLNISIQGSTERFFSNDLGSKWCLEQSQLRLKSVLQSLKLGELMSELTRNRISMNGNRKPGFDITNSSSLLSEYVETQPLSVAQLFCKLLIGKHNFINCLLSLYDSEAGVYSDLTLDLSSKIADSLCSLISIILQVLTLILRLNPTNSIDFNYRPPNPPANNPTVQEGPSAMGSSPVAGNLSAAPPSEGNPDFYKKLLGLKQDTGTILSDLCRGIISPFAIAILHEVYNITELVKQMPTSLISIMMTATTTQNTQDTKKSQDLVMKLSNSMNEVVQITSVLTMIKPFKIFEHELNKPIMSLTGGLSSTTRNDVMWPKSGQGLRESSVMKTLLDERRTSGTQPTTAPVAAEEPRLENVALENFVSIGWKLLDDSELGWY

SEQ ID NO: 90604 - DNA, 3864 bp, Candida glabrata CBS 138
  CDS (1)..(3864)
atgccacacaataatgataagaaaagaacaaatgtatccagggcatgcgatcaatgccgtaggaaaaagataaaatgtgataggaatcaagagagaaatatctgtacatcgtgccagcgcaatggagaaagatgcaagtttgaaagagtaccactgaaaagaggcccttcaaaaggcgcacataaggcctctgatccagaactaaaattgagctccaataagccttcgaaaagttcacttttcgaggattcaaactcaataataaggccgaaatctgttggagaagattctaacatggacccactctcaagacatggcagtaacacacccattttagataacaattcaaattctggtataaacgacaggaatatgggaggaattgatgatagattaggtggatcaactgatcctggcacaccatcgaggtctggatcgatacttctgccgcctttaggccagtatcctcagcaacaaaactatacaaacaacagcacttcagcctccaataatatgttgaattcgacaagcttgaatagtaccatattacaacaacaacagccgttttggaaagttccataccacgagtttcagaaccagcggcgaggttccatcgagtcacttcaaagtgatttatctgtacggacattcaatcctcaagatcagttagtatacaatacctttcaacagtcacccattgctatgaaacactcatcggatcctacaaactccatacctccaaatacaaaatcacaacacttaactactaccagtaatattggtagtgtagtaggagcaaacgacttattatctggaaatcccaattattggggctcagtaagagctggttctttcataccaaacggggatgaaaatgatgaccaaattccccagaatttacaaaggagatcaagctctatcccttcaatacttcggaatacatcgacatcaatattgcttagccaaccacaattaccacaccctacgaacggggctggaagcacttctaacaactttaataatacaaatgataacagcaatctcataaacaacaaaggaactggatctactgcaggactgggtaataatatagacaatgctgtgggctccgctagccctcaagctcaacgccagtctcaacaactttattcttattctcaattcctcaaccaatctaaaccatataataaccagaatttttcctcgtttggccaattctcaacgaatggcttccaatcgaggcatggttccatcaccagtgaagcaatgtcaccaagtactgctttagggtacaaccagaacaattcaaacaatttacctggtgccaataatccaaatataagcgatatttctttgctcccgaacaaggaatcagatcctagggtaaatgatagtcaaaaagtagtcaaaacagaagtttcgaacgacattttccagtttggcgaacaaaatcttgctaataccattgaaagtaatgctgacaagtctgaagataaagtgaaatcaggtggtaagaaaggaggaaaggtaccgagaaaaagaaaaaccaaacaggtaaaagaatccaataaaaagctgaaggtgaacaaaaaatcgaattttgattctgactctataaattcacctaaggttccaactcctgtgcaacaaataaagactggctttcaatatgggcaaattctggatgttgagttaattgatctttattatgaattcattcatgtgggattcccagttattccgttaaacaaacaaactctaacaaatgatatcttacttgtaaatacacacccatattctaatatccatgaggtgaactcatatgtaatattatggtttaggaattctttagaactccttgtacgtgttgctctaaaaaggaaaaatgattcaccattttttgatagtcacaatacacctggccctttgagatcagcgtctggtgacgaaaatatggctttcaatgacacgccgaaaaagaaggacatcactagttcacatgcagatagcataagctctggcgatgataacggaatggcagaggtccaaagtgctttcatttctgcattgaatgagtgctttcaaagagttgtagatattcaccccaaggtacgagaaaacaaagatcgcatctccccaaagatcaagattatctatttaaccacatttattttactaaactacattttagcactagtcggatacgacaactcatttgtgctcggcatgtctgtgacaatatttaatgagttcaaactatacaaattattggtgctgccttataaggctatttgtcaggatagcgagttctcatttaacgcaaagcagtctatcagtctggatgatgatttcattgagaataaaaatataggcaatggtaacggtaaccgcactaatggtagtactcctggtgaacctaataatgatgaaggtgaaaatgcccttactaactttaaccctagtaaggagcagcagaacagtcaaaagggaggaagcggtgaggggaatgaaaaccaaggaaatcaaattagatcgaaaataggcaaagctgtcaatatcgaagaggaaaccgaaacaaatgaaaattatactatcatgttcaaacgcctttatattttgcttacgatgtttgactcattacaaagctgtctctttggcggtcctaaattattaaatgtctgcataaccaatacaacagaaaagtttttcagtggaacaacaaattccaaatggaacatagaggatagtcttgtgagggaaaaaggtgcactgataagtttaaagctgggagaaaccttaagcgagatagcaagtaataggattataatgaaccattttgatattattactctcacaaataataaccaggcaaatgctactgatattgttttcaatctgaaaaaattatctaacaacagagattatgacaattttcttcaggaaaataaagggttggaattatttgaccaacaaccgctatgtatttctcagttgttccacaagatgttgataatgaaaagttcgtttacctatcaacttttgtctttaatggatgccaacaatggtaattttgtaaacatggacctcaagagactggaacaaattgttgaatcactttgttcattgatatcagtgatattgcaattgctaactctaataatgagactgaatcccacaaacagtatagatctaaactaccgacctgttactccaactcaaaggatggaggacatgttatcgaacaagaacactgatagcactgactctatctcaaatagcaataagaccaattctggtaacgatttttaccggaggttgttgggactggaacatagtaacgacattgtatattctgatatatcgcgtggtgtcatatcgccgttcgcgatggcaatccttcatgaaagtcacaatatccatgaactaatcaaaatgacgccaacgatattgatccgtgtagttatgacactaaacgttcaagatgacaccggcaatagtgtaaataacaatgccacacctggagatcacgaagaagatatgaaattgaaacgtgcgaacacatcccaggacttagtatacaagctgtcaaactccatgaacgatgttgtacagatagcgagcttgctaagcatgatcaagcctctgaagttgttcgatcacggattcaagacatttgaatcagaagacgtgctgcaaggaaatgacgaagatgctaagaagagacaaagacctgtgctaaaacgattgttctacgataccaccaacgttccaaaacctgaagctgtcgaccccttggtggtaagcttagtcaacaccggatggaacctgctggatgacatggaactagggtttttaccacaataa

SEQ ID NO: 90605 - protein, 1287 aa, Candida glabrata CBS 138
MPHNNDKKRTNVSRACDQCRRKKIKCDRNQERNICTSCQRNGERCKFERVPLKRGPSKGAHKASDPELKLSSNKPSKSSLFEDSNSIIRPKSVGEDSNMDPLSRHGSNTPILDNNSNSGINDRNMGGIDDRLGGSTDPGTPSRSGSILLPPLGQYPQQQNYTNNSTSASNNMLNSTSLNSTILQQQQPFWKVPYHEFQNQRRGSIESLQSDLSVRTFNPQDQLVYNTFQQSPIAMKHSSDPTNSIPPNTKSQHLTTTSNIGSVVGANDLLSGNPNYWGSVRAGSFIPNGDENDDQIPQNLQRRSSSIPSILRNTSTSILLSQPQLPHPTNGAGSTSNNFNNTNDNSNLINNKGTGSTAGLGNNIDNAVGSASPQAQRQSQQLYSYSQFLNQSKPYNNQNFSSFGQFSTNGFQSRHGSITSEAMSPSTALGYNQNNSNNLPGANNPNISDISLLPNKESDPRVNDSQKVVKTEVSNDIFQFGEQNLANTIESNADKSEDKVKSGGKKGGKVPRKRKTKQVKESNKKLKVNKKSNFDSDSINSPKVPTPVQQIKTGFQYGQILDVELIDLYYEFIHVGFPVIPLNKQTLTNDILLVNTHPYSNIHEVNSYVILWFRNSLELLVRVALKRKNDSPFFDSHNTPGPLRSASGDENMAFNDTPKKKDITSSHADSISSGDDNGMAEVQSAFISALNECFQRVVDIHPKVRENKDRISPKIKIIYLTTFILLNYILALVGYDNSFVLGMSVTIFNEFKLYKLLVLPYKAICQDSEFSFNAKQSISLDDDFIENKNIGNGNGNRTNGSTPGEPNNDEGENALTNFNPSKEQQNSQKGGSGEGNENQGNQIRSKIGKAVNIEEETETNENYTIMFKRLYILLTMFDSLQSCLFGGPKLLNVCITNTTEKFFSGTTNSKWNIEDSLVREKGALISLKLGETLSEIASNRIIMNHFDIITLTNNNQANATDIVFNLKKLSNNRDYDNFLQENKGLELFDQQPLCISQLFHKMLIMKSSFTYQLLSLMDANNGNFVNMDLKRLEQIVESLCSLISVILQLLTLIMRLNPTNSIDLNYRPVTPTQRMEDMLSNKNTDSTDSISNSNKTNSGNDFYRRLLGLEHSNDIVYSDISRGVISPFAMAILHESHNIHELIKMTPTILIRVVMTLNVQDDTGNSVNNNATPGDHEEDMKLKRANTSQDLVYKLSNSMNDVVQIASLLSMIKPLKLFDHGFKTFESEDVLQGNDEDAKKRQRPVLKRLFYDTTNVPKPEAVDPLVVSLVNTGWNLLDDMELGFLPQ

SEQ ID NO: 90606 - DNA, 24 bp, Artificial sequence
  primer
atgaacgagctgaacactgtttcg

SEQ ID NO: 90607 - DNA, 24 bp, Artificial sequence
  primer
tcaataccagcctaactcggaatc

SEQ ID NO: 90608 - protein, 1333 aa, Artificial sequence
  consensus sequence
  Variant (2)..(13): Xaa in position 2 to 13 is any amino acid
  Variant (18)..(19): Xaa in position 18 to 19 is any amino acid
  Variant (28)..(28): Xaa in position 28 is any amino acid
  Variant (35)..(37): Xaa in position 35 to 37 is any amino acid
  Variant (39)..(41): Xaa in position 39 to 41 is any amino acid
  Variant (43)..(44): Xaa in position 43 to 44 is any amino acid
  Variant (50)..(50): Xaa in position 50 is any amino acid
  Variant (53)..(53): Xaa in position 53 is any amino acid
  Variant (55)..(55): Xaa in position 55 is any amino acid
  Variant (67)..(69): Xaa in position 67 to 69 is any amino acid
  Variant (70)..(90): Xaa in position 70 to 90 is any or no amino acid
  Variant (92)..(92): Xaa in position 92 is any amino acid
  Variant (94)..(95): Xaa in position 94 to 95 is any amino acid
  Variant (97)..(104): Xaa in position 97 to 104 is any amino acid
  Variant (106)..(118): Xaa in position 106 to 118 is any amino acid
  Variant (120)..(120): Xaa in position 120 is any amino acid
  Variant (123)..(124): Xaa in position 123 to 124 is any amino acid
  Variant (125)..(130): Xaa in position 125 to 130 is any or no amino acid
  Variant (132)..(132): Xaa in position 132 is any amino acid
  Variant (134)..(135): Xaa in position 134 to 135 is any amino acid
  Variant (137)..(142): Xaa in position 137 to 142 is any amino acid
  Variant (144)..(144): Xaa in position 144 is any amino acid
  Variant (146)..(146): Xaa in position 146 is any amino acid
  Variant (152)..(152): Xaa in position 152 is any amino acid
  Variant (154)..(154): Xaa in position 154 is any amino acid
  Variant (160)..(160): Xaa in position 160 is any amino acid
  Variant (163)..(164): Xaa in position 163 to 164 is any amino acid
  Variant (166)..(171): Xaa in position 166 to 171 is any amino acid
  Variant (172)..(173): Xaa in position 172 to 173 is any or no amino acid
  Variant (175)..(176): Xaa in position 175 to 176 is any amino acid
  Variant (178)..(181): Xaa in position 178 to 181 is any amino acid
  Variant (184)..(188): Xaa in position 184 to 188 is any amino acid
  Variant (190)..(190): Xaa in position 190 is any amino acid
  Variant (194)..(195): Xaa in position 194 to 195 is any amino acid
  Variant (206)..(206): Xaa in position 206 is any amino acid
  Variant (209)..(209): Xaa in position 209 is any amino acid
  Variant (213)..(213): Xaa in position 213 is any amino acid
  Variant (219)..(219): Xaa in position 219 is any amino acid
  Variant (224)..(224): Xaa in position 224 is any amino acid
  Variant (227)..(228): Xaa in position 227 to 228 is any amino acid
  Variant (231)..(231): Xaa in position 231 is any amino acid
  Variant (235)..(235): Xaa in position 235 is any amino acid
  Variant (241)..(242): Xaa in position 241 to 242 is any amino acid
  Variant (245)..(246): Xaa in position 245 to 246 is any amino acid
  Variant (248)..(249): Xaa in position 248 to 249 is any amino acid
  Variant (251)..(252): Xaa in position 251 to 252 is any amino acid
  Variant (253)..(267): Xaa in position 253 to 267 is any or no amino acid
  Variant (271)..(271): Xaa in position 271 is any amino acid
  Variant (273)..(276): Xaa in position 273 to 276 is any amino acid
  Variant (277)..(277): Xaa in position 277 is any or no amino acid
  Variant (280)..(282): Xaa in position 280 to 282 is any amino acid
  Variant (285)..(287): Xaa in position 285 to 287 is any amino acid
  Variant (289)..(296): Xaa in position 289 to 296 is any amino acid
  Variant (298)..(304): Xaa in position 298 to 304 is any amino acid
  Variant (305)..(308): Xaa in position 305 to 308 is any or no amino acid
  Variant (317)..(317): Xaa in position 317 is any amino acid
  Variant (323)..(323): Xaa in position 323 is any amino acid
  Variant (325)..(325): Xaa in position 325 is any amino acid
  Variant (328)..(328): Xaa in position 328 is any amino acid
  Variant (329)..(329): Xaa in position 329 is any or no amino acid
  Variant (335)..(335): Xaa in position 335 is any amino acid
  Variant (337)..(343): Xaa in position 337 to 343 is any amino acid
  Variant (344)..(378): Xaa in position 344 to 378 is any or no amino acid
  Variant (380)..(381): Xaa in position 380 to 381 is any amino acid
  Variant (383)..(385): Xaa in position 383 to 385 is any amino acid
  Variant (387)..(387): Xaa in position 387 is any amino acid
  Variant (389)..(389): Xaa in position 389 is any amino acid
  Variant (397)..(398): Xaa in position 397 to 398 is any amino acid
  Variant (400)..(400): Xaa in position 400 is any amino acid
  Variant (401)..(401): Xaa in position 401 is any or no amino acid
  Variant (405)..(407): Xaa in position 405 to 407 is any amino acid
  Variant (408)..(408): Xaa in position 408 is any or no amino acid
  Variant (415)..(416): Xaa in position 415 to 416 is any amino acid
  Variant (420)..(420): Xaa in position 420 is any amino acid
  Variant (423)..(423): Xaa in position 423 is any amino acid
  Variant (426)..(427): Xaa in position 426 to 427 is any amino acid
  Variant (435)..(444): Xaa in position 435 to 444 is any amino acid
  Variant (446)..(449): Xaa in position 446 to 449 is any amino acid
  Variant (451)..(461): Xaa in position 451 to 461 is any amino acid
  Variant (463)..(465): Xaa in position 463 to 465 is any amino acid
  Variant (467)..(470): Xaa in position 467 to 470 is any amino acid
  Variant (472)..(476): Xaa in position 472 to 476 is any amino acid
  Variant (477)..(478): Xaa in position 477 to 478 is any or no amino acid
  Variant (480)..(483): Xaa in position 480 to 483 is any amino acid
  Variant (485)..(485): Xaa in position 485 is any amino acid
  Variant (487)..(491): Xaa in position 487 to 491 is any amino acid
  Variant (493)..(493): Xaa in position 493 is any amino acid
  Variant (495)..(496): Xaa in position 495 to 496 is any amino acid
  Variant (497)..(499): Xaa in position 497 to 499 is any or no amino acid
  Variant (501)..(503): Xaa in position 501 to 503 is any amino acid
  Variant (506)..(508): Xaa in position 506 to 508 is any amino acid
  Variant (509)..(516): Xaa in position 509 to 516 is any or no amino acid
  Variant (518)..(520): Xaa in position 518 to 520 is any amino acid
  Variant (522)..(531): Xaa in position 522 to 531 is any amino acid
  Variant (533)..(540): Xaa in position 533 to 540 is any amino acid
  Variant (542)..(544): Xaa in position 542 to 544 is any amino acid
  Variant (545)..(545): Xaa in position 545 is any or no amino acid
  Variant (547)..(548): Xaa in position 547 to 548 is any amino acid
  Variant (550)..(550): Xaa in position 550 is any amino acid
  Variant (553)..(557): Xaa in position 553 to 557 is any amino acid
  Variant (560)..(561): Xaa in position 560 to 561 is any amino acid
  Variant (563)..(573): Xaa in position 563 to 573 is any amino acid
  Variant (575)..(577): Xaa in position 575 to 577 is any amino acid
  Variant (578)..(579): Xaa in position 578 to 579 is any or no amino acid
  Variant (584)..(584): Xaa in position 584 is any amino acid
  Variant (587)..(587): Xaa in position 587 is any amino acid
  Variant (591)..(591): Xaa in position 591 is any amino acid
  Variant (602)..(602): Xaa in position 602 is any amino acid
  Variant (608)..(608): Xaa in position 608 is any amino acid
  Variant (612)..(612): Xaa in position 612 is any amino acid
  Variant (614)..(614): Xaa in position 614 is any amino acid
  Variant (620)..(620): Xaa in position 620 is any amino acid
  Variant (622)..(622): Xaa in position 622 is any amino acid
  Variant (650)..(650): Xaa in position 650 is any amino acid
  Variant (652)..(655): Xaa in position 652 to 655 is any amino acid
  Variant (659)..(660): Xaa in position 659 to 660 is any amino acid
  Variant (662)..(663): Xaa in position 662 to 663 is any amino acid
  Variant (665)..(667): Xaa in position 665 to 667 is any amino acid
  Variant (669)..(669): Xaa in position 669 is any amino acid
  Variant (671)..(671): Xaa in position 671 is any amino acid
  Variant (673)..(673): Xaa in position 673 is any amino acid
  Variant (675)..(675): Xaa in position 675 is any amino acid
  Variant (677)..(677): Xaa in position 677 is any amino acid
  Variant (679)..(685): Xaa in position 679 to 685 is any amino acid
  Variant (687)..(692): Xaa in position 687 to 692 is any amino acid
  Variant (695)..(699): Xaa in position 695 to 699 is any amino acid
  Variant (701)..(702): Xaa in position 701 to 702 is any amino acid
  Variant (703)..(704): Xaa in position 703 to 704 is any or no amino acid
  Variant (709)..(709): Xaa in position 709 is any amino acid
  Variant (712)..(712): Xaa in position 712 is any amino acid
  Variant (720)..(721): Xaa in position 720 to 721 is any amino acid
  Variant (728)..(728): Xaa in position 728 is any amino acid
  Variant (732)..(732): Xaa in position 732 is any amino acid
  Variant (734)..(734): Xaa in position 734 is any amino acid
  Variant (741)..(741): Xaa in position 741 is any amino acid
  Variant (745)..(745): Xaa in position 745 is any amino acid
  Variant (756)..(756): Xaa in position 756 is any amino acid
  Variant (782)..(783): Xaa in position 782 to 783 is any amino acid
  Variant (785)..(787): Xaa in position 785 to 787 is any amino acid
  Variant (789)..(791): Xaa in position 789 to 791 is any amino acid
  Variant (792)..(798): Xaa in position 792 to 798 is any or no amino acid
  Variant (800)..(808): Xaa in position 800 to 808 is any amino acid
  Variant (809)..(816): Xaa in position 809 to 816 is any or no amino acid
  Variant (821)..(828): Xaa in position 821 to 828 is any amino acid
  Variant (829)..(834): Xaa in position 829 to 834 is any or no amino acid
  Variant (836)..(842): Xaa in position 836 to 842 is any amino acid
  Variant (846)..(861): Xaa in position 846 to 861 is any amino acid
  Variant (863)..(864): Xaa in position 863 to 864 is any amino acid
  Variant (866)..(870): Xaa in position 866 to 870 is any amino acid
  Variant (872)..(873): Xaa in position 872 to 873 is any amino acid
  Variant (874)..(886): Xaa in position 874 to 886 is any or no amino acid
  Variant (888)..(890): Xaa in position 888 to 890 is any amino acid
  Variant (896)..(896): Xaa in position 896 is any amino acid
  Variant (899)..(900): Xaa in position 899 to 900 is any amino acid
  Variant (908)..(908): Xaa in position 908 is any amino acid
  Variant (917)..(918): Xaa in position 917 to 918 is any amino acid
  Variant (920)..(922): Xaa in position 920 to 922 is any amino acid
  Variant (925)..(925): Xaa in position 925 is any amino acid
  Variant (929)..(932): Xaa in position 929 to 932 is any amino acid
  Variant (936)..(937): Xaa in position 936 to 937 is any amino acid
  Variant (939)..(939): Xaa in position 939 is any amino acid
  Variant (941)..(942): Xaa in position 941 to 942 is any amino acid
  Variant (944)..(944): Xaa in position 944 is any amino acid
  Variant (946)..(947): Xaa in position 946 to 947 is any amino acid
  Variant (949)..(949): Xaa in position 949 is any amino acid
  Variant (956)..(957): Xaa in position 956 to 957 is any amino acid
  Variant (960)..(962): Xaa in position 960 to 962 is any amino acid
  Variant (966)..(966): Xaa in position 966 is any amino acid
  Variant (969)..(969): Xaa in position 969 is any amino acid
  Variant (970)..(978): Xaa in position 970 to 978 is any or no amino acid
  Variant (980)..(984): Xaa in position 980 to 984 is any amino acid
  Variant (987)..(992): Xaa in position 987 to 992 is any amino acid
  Variant (995)..(1009): Xaa in position 995 to 1009 is any amino acid
  Variant (1011)..(1014): Xaa in position 1011 to 1014 is any amino acid
  Variant (1018)..(1020): Xaa in position 1018 to 1020 is any amino acid
  Variant (1024)..(1024): Xaa in position 1024 is any amino acid
  Variant (1026)..(1026): Xaa in position 1026 is any amino acid
  Variant (1029)..(1029): Xaa in position 1029 is any amino acid
  Variant (1031)..(1032): Xaa in position 1031 to 1032 is any amino acid
  Variant (1034)..(1036): Xaa in position 1034 to 1036 is any amino acid
  Variant (1041)..(1041): Xaa in position 1041 is any amino acid
  Variant (1043)..(1045): Xaa in position 1043 to 1045 is any amino acid
  Variant (1047)..(1052): Xaa in position 1047 to 1052 is any amino acid
  Variant (1054)..(1058): Xaa in position 1054 to 1058 is any amino acid
  Variant (1060)..(1061): Xaa in position 1060 to 1061 is any amino acid
  Variant (1069)..(1069): Xaa in position 1069 is any amino acid
  Variant (1073)..(1073): Xaa in position 1073 is any amino acid
  Variant (1078)..(1078): Xaa in position 1078 is any amino acid
  Variant (1088)..(1088): Xaa in position 1088 is any amino acid
  Variant (1093)..(1094): Xaa in position 1093 to 1094 is any amino acid
  Variant (1096)..(1099): Xaa in position 1096 to 1099 is any amino acid
  Variant (1100)..(1103): Xaa in position 1100 to 1103 is any or no amino acid
  Variant (1105)..(1118): Xaa in position 1105 to 1118 is any amino acid
  Variant (1120)..(1128): Xaa in position 1120 to 1128 is any amino acid
  Variant (1132)..(1133): Xaa in position 1132 to 1133 is any amino acid
  Variant (1138)..(1145): Xaa in position 1138 to 1145 is any amino acid
  Variant (1148)..(1149): Xaa in position 1148 to 1149 is any amino acid
  Variant (1152)..(1152): Xaa in position 1152 is any amino acid
  Variant (1158)..(1158): Xaa in position 1158 is any amino acid
  Variant (1164)..(1165): Xaa in position 1164 to 1165 is any amino acid
  Variant (1168)..(1168): Xaa in position 1168 is any amino acid
  Variant (1171)..(1171): Xaa in position 1171 is any amino acid
  Variant (1173)..(1174): Xaa in position 1173 to 1174 is any amino acid
  Variant (1177)..(1177): Xaa in position 1177 is any amino acid
  Variant (1180)..(1182): Xaa in position 1180 to 1182 is any amino acid
  Variant (1185)..(1190): Xaa in position 1185 to 1190 is any amino acid
  Variant (1192)..(1196): Xaa in position 1192 to 1196 is any amino acid
  Variant (1197)..(1215): Xaa in position 1197 to 1215 is any or no amino acid
  Variant (1221)..(1221): Xaa in position 1221 is any amino acid
  Variant (1229)..(1229): Xaa in position 1229 is any amino acid
  Variant (1234)..(1234): Xaa in position 1234 is any amino acid
  Variant (1236)..(1236): Xaa in position 1236 is any amino acid
  Variant (1238)..(1238): Xaa in position 1238 is any amino acid
  Variant (1243)..(1243): Xaa in position 1243 is any amino acid
  Variant (1245)..(1245): Xaa in position 1245 is any amino acid
  Variant (1247)..(1247): Xaa in position 1247 is any amino acid
  Variant (1249)..(1259): Xaa in position 1249 to 1259 is any amino acid
  Variant (1261)..(1267): Xaa in position 1261 to 1267 is any amino acid
  Variant (1270)..(1278): Xaa in position 1270 to 1278 is any amino acid
  Variant (1279)..(1279): Xaa in position 1279 is any or no amino acid
  Variant (1281)..(1283): Xaa in position 1281 to 1283 is any amino acid
  Variant (1285)..(1285): Xaa in position 1285 is any amino acid
  Variant (1287)..(1287): Xaa in position 1287 is any amino acid
  Variant (1289)..(1302): Xaa in position 1289 to 1302 is any amino acid
  Variant (1304)..(1308): Xaa in position 1304 to 1308 is any amino acid
  Variant (1309)..(1319): Xaa in position 1309 to 1319 is any or no amino acid
  Variant (1321)..(1322): Xaa in position 1321 to 1322 is any amino acid
  Variant (1325)..(1325): Xaa in position 1325 is any amino acid
  Variant (1330)..(1330): Xaa in position 1330 is any amino acid
DXXXXXXXXXXXXKKRTXXSRACDQCRXKKIKCDXXXEXXXCXXCQRNGXRCXFXRVPLKRGPSKGXXXXXXXXXXXXXXXXXXXXXXXXSXSXXRXXXXXXXXNXXXXXXXXXXXXXLXNNXXXXXXXXNXGXXDXXXXXXTXPXTPSRSXSXLLPPLXQYXXQXXXXXXXXSXXNXXXXSTXXXXXIXQQQXXFWKVPYHEFQXQRXGSIXSLQSDXSVRTXNPXXQLXYNTXQQSPIXXKHXXDXXNXXXXXXXXXXXXXXXXXGSVXGXXXXXSGXXXYWXXXRXXXXXXXXDXXXXXXXXXXXRRSSSIPSXLRNTSXSXLLXXQPQLPXPXXXXXXXXXXXXXXXXXXXXXXXXXXXXXXXXXXXXXXXXXXAXXQXXXQXQXLYSYSQFXXQXXPYNXXXXSSFGQFXXNGFXSRXGSXXSEAMSPSXXXXXXXXXXNXXXXAXXXXXXXXXXXPXXXSXXXXNXXXXXXXVXXXXSXDXXXXXEXNXXXXXNXXXSNXXXXXXXXXXXSXXXVXXXXXXXXXXPXXXXXXXXKXXXXKXXVXKKXXXXXDSXXSXXXXXXXXXXXTXXXXXYGQIXDVXLIDXYYEFIHVGFPXIPLNKXTLTXDXLLVNTXPXSNIHEVNSYVILWFRNSLELLVRVALKXKXXXXFFDXXNXXGXXXSXSXDXNXAXFXXXXXXXDXXXXXXDSXXXXXDXXXXEVQSXFIXALNECFQXXVDIHPKXRENXDXISPKIKXIYLXTFILLNYILAXVGYDNSFVLGMSVTIFNEFKLYKLLXXPXXXIXXXXXXXXXXKXXXXXXXXXXXXXXXXXGNGNXXXXXXXXXXXXXXGXXXXXXXNPSXXXXXXXXXXXXXXXXNXXNXXXXXIXXXXXXXXXXXXXXXYXXXFKRLYXLLXXFDSLQSCXFGGPKLLNXXIXXXTEXFFSXXXXSKWXXEXSXXRXKXXLXSLKLGEXXSEXXXNRIXMNXXXXXXXXXXNXXXXXDIXXXXXXLSXXXXXXXXXXXXXXXEXXXXQPLXXXQLFXKXLIXKXXFXXXLLSLXDXXXGXXXXXXLXXXXXIXXSLCSLISXILQXLTLIXRLNPTNSIDXNYRPXXPXXXXXXXXEXXXXXXXXXXXXXXSXXXXXXXXXDFYXXLLGLXXXXXXXXSDXXRGXISPFAXAILHEXXNIXELXKXXPTXLIXXXMTXXXXXXTXXXXXXXXXXXXXXXXXXXXXXXXSQDLVXKLSNSMNXVVQIXSXLXMIKPXKXFXHXXXXXXXXXXXGXXXXXXXDVXXXXXXXXXXRXXXVXKXLXXXXXXXXXXXXXXPXXXXXXXXXXXXXXXXVXXGWXLLDDXELG

SEQ ID NO: 90609 - protein, 51 aa, Artificial sequence
  protein pattern
  Variant (3)..(3): Xaa in position 3 is any amino acid
  Variant (4)..(4): Xaa in position 4 is Ala or Val
  Variant (13)..(13): Xaa in position 13 is Lys or Arg
  Variant (20)..(21): Xaa in position 20 to 21 is any amino acid
  Variant (22)..(22): Xaa in position 22 is Asp or Gln
  Variant (24)..(24): Xaa in position 24 is Lys or Arg
  Variant (25)..(25): Xaa in position 25 is Gly or Asn
  Variant (26)..(26): Xaa in position 26 is Ile or Val
  Variant (28)..(28): Xaa in position 28 is Ser or Thr
  Variant (29)..(29): Xaa in position 29 is Asn or Ser
  Variant (35)..(35): Xaa in position 35 is Asp or Glu
  Variant (38)..(38): Xaa in position 38 is any amino acid
  Variant (40)..(40): Xaa in position 40 is Asp or Glu
RTXXSRACDQCRXKKIKCDXXXEXXXCXXCQRNGXRCXFXRVPLKRGPSKG

SEQ ID NO: 90610 - protein, 58 aa, Artificial sequence
  protein pattern
  Variant (3)..(3): Xaa in position 3 is Lys or Arg
  Variant (4)..(4): Xaa in position 4 is Ile or Val
  Variant (11)..(11): Xaa in position 11 is Phe or Val
  Variant (15)..(15): Xaa in position 15 is any amino acid
  Variant (17)..(17): Xaa in position 17 is Gln or Arg
  Variant (24)..(24): Xaa in position 24 is Ile or Val
  Variant (28)..(28): Xaa in position 28 is Ser or Thr
  Variant (39)..(39): Xaa in position 39 is Phe or Leu
FQXXVDIHPKXRENXDXISPKIKXIYLXTFILLNYILAXVGYDNSFVLGMSVTIFNEF

SEQ ID NO: 90611 - protein, 60 aa, Artificial sequence
  protein pattern
  Variant (11)..(11): Xaa in position 11 is Ile or Val
  Variant (17)..(17): Xaa in position 17 is Gln or Thr
  Variant (21)..(21): Xaa in position 21 is Asn or Ser
  Variant (23)..(23): Xaa in position 23 is Ile or Leu
  Variant (29)..(29): Xaa in position 29 is any amino acid
  Variant (31)..(31): Xaa in position 31 is any amino acid
  Variant (59)..(59): Xaa in position 59 is Gln or Arg
YYEFIHVGFPXIPLNKXTLTXDXLLVNTXPXSNIHEVNSYVILWFRNSLELLVRVALKXK

SEQ ID NO: 90612 - protein, 52 aa, Artificial sequence
  protein pattern
  Variant (2)..(3): Xaa in position 2 to 3 is any amino acid
  Variant (14)..(14): Xaa in position 14 is any amino acid
  Variant (17)..(17): Xaa in position 17 is Lys or Arg
  Variant (21)..(21): Xaa in position 21 is Asp or Glu
  Variant (27)..(27): Xaa in position 27 is Ile or Leu
  Variant (32)..(32): Xaa in position 32 is Phe or Leu
  Variant (35)..(35): Xaa in position 35 is Asn or Gln
  Variant (36)..(36): Xaa in position 36 is Asp or Glu
  Variant (39)..(39): Xaa in position 39 is Ser or Val
  Variant (43)..(43): Xaa in position 43 is Phe or Val
  Variant (49)..(49): Xaa in position 49 is Ala or Thr
  Variant (50)..(50): Xaa in position 50 is any amino acid
QXXFWKVPYHEFQXQRXGSIXSLQSDXSVRTXNPXXQLXYNTXQQSPIXXKH

SEQ ID NO: 90613 - protein, 56 aa, Artificial sequence
  protein pattern
  Variant (4)..(5): Xaa in position 4 to 5 is Lys or Arg
  Variant (10)..(10): Xaa in position 10 is Glu or Lys
  Variant (11)..(11): Xaa in position 11 is any amino acid
  Variant (12)..(12): Xaa in position 12 is Asp or Ser
  Variant (13)..(13): Xaa in position 13 is Asn or Thr
  Variant (14)..(14): Xaa in position 14 is Asp or Gly
  Variant (15)..(15): Xaa in position 15 is any amino acid
  Variant (16)..(16): Xaa in position 16 is Ile or Val
  Variant (17)..(17): Xaa in position 17 is any amino acid
  Variant (20)..(20): Xaa in position 20 is Ile or Leu
  Variant (21)..(21): Xaa in position 21 is Cys or Ser
  Variant (24)..(24): Xaa in position 24 is any or no amino acid
  Variant (26)..(26): Xaa in position 26 is any or no amino acid
  Variant (31)..(31): Xaa in position 31 is Ile or Met
  Variant (37)..(37): Xaa in position 37 is Ser or Val
  Variant (38)..(38): Xaa in position 38 is His or Tyr
  Variant (41)..(41): Xaa in position 41 is any amino acid
  Variant (44)..(44): Xaa in position 44 is Ile or Val
  Variant (46)..(46): Xaa in position 46 is any or no amino acid
  Variant (48)..(49): Xaa in position 48 to 49 is Pro or Thr
  Variant (50)..(50): Xaa in position 50 is Ser or Thr
  Variant (51)..(52): Xaa in position 51 to 52 is Ile or Leu
  Variant (53)..(54): Xaa in position 53 to 54 is any amino acid
  Variant (55)..(56): Xaa in position 55 to 56 is Met or Val
DFYXXLLGLXXXXXXXXSDXXRGXIXSPFAXAILHEXXNIXELXKXMXXXXXXXXX

SEQ ID NO: 90614 - protein, 48 aa, Artificial sequence
  protein pattern
  Variant (6)..(6): Xaa in position 6 is Ile or Val
  Variant (9)..(9): Xaa in position 9 is Ser or Thr
  Variant (10)..(10): Xaa in position 10 is Met or Val
  Variant (18)..(18): Xaa in position 18 is Ala or Leu
  Variant (27)..(27): Xaa in position 27 is Ile or Val
  Variant (28)..(28): Xaa in position 28 is Cys or Ser
  Variant (30)..(30): Xaa in position 30 is Gln or Thr
  Variant (31)..(31): Xaa in position 31 is Gly or Asn
  Variant (32)..(32): Xaa in position 32 is Ser or Thr
  Variant (35)..(35): Xaa in position 35 is Lys or Arg
  Variant (39)..(39): Xaa in position 39 is Gly or Asn
  Variant (40)..(40): Xaa in position 40 is Asp or Thr
  Variant (41)..(41): Xaa in position 41 is any amino acid
  Variant (42)..(42): Xaa in position 42 is Gly or Asn
  Variant (46)..(46): Xaa in position 46 is Cys or Asn
  Variant (47)..(47): Xaa in position 47 is Ile or Leu
FKRLYXLLXXFDSLQSCXFGGPKLLNXXIXXXTEXFFSXXXXSKWXXE

SEQ ID NO: 90615 - DNA, 1299 bp, Saccharomyces cerevisiae
  CDS (1)..(1299)
atgaacaaaagaacacaggaatacaagaacacaagagcgataatgtctgccactctgttcaataacatcgaattgctgccccctgatgccctttttggtattaagcaaaggtacgggcaagatcaacgtgctaccaaggtcgacttgggtatcggggcctacagagacgacaacggtaaaccatgggtcttgccaagtgttaaagccgccgaaaagctaattcataacgacagctcctacaaccatgaatacctcggtattaccggtctgccaagtttgacatctaacgccgccaagatcatcttcggtacgcaatccgatgcctttcaggaagacagagtaatctcagtacaatcactgtctggtacgggtgctcttcatatatctgcgaagtttttttcaaaattcttcccagataaactggtctatttgtctaagcctacttgggccaaccacatggccatttttgagaatcaaggcttgaaaacggcgacttacccttactgggccaacgaaactaagtctttggacctaaacggctttctaaatgctattcaaaaagctccagagggctccattttcgttctgcactcttgcgcccataacccaactggtctggaccctactagtgaacaatgggttcaaatcgttgatgctatcgcctcaaagaaccacatcgccttatttgacaccgcctaccaagggtttgccactggagatttggacaaggatgcctatgctgtgcgtctaggtgtggagaagctttcaacggtctctcccgtctttgtctgtcagtcctttgccaagaacgccggtatgtacggtgagcgtgtaggttgtttccatctagcacttacaaaacaagctcaaaacaaaactataaagcctgctgttacatctcaattggccaaaatcattcgtagtgaagtgtccaacccacccgcctacggcgctaagattgtcgctaaactgttggaaacgccagaattaacggaacagtggcacaaggatatggttaccatgtcctccagaattacgaaaatgaggcacgcattaagagaccatttagtcaagttgggcactcctggcaactgggatcatatagtaaatcaatgcgggatgttctcctttacaggattgactcctcaaatggttaaacgacttgaagaaacccacgcagtttacttggttgcctcaggtagagcttctattgctggattgaatcaaggaaacgtggaatacgtggctaaagccattgatgaagtggtgcgcttctatactattgaagctaaattgtaa

SEQ ID NO: 90616 - protein, 432 aa, Saccharomyces cerevisiae
MNKRTQEYKNTRAIMSATLFNNIELLPPDALFGIKQRYGQDQRATKVDLGIGAYRDDNGKPWVLPSVKAAEKLIHNDSSYNHEYLGITGLPSLTSNAAKIIFGTQSDAFQEDRVISVQSLSGTGALHISAKFFSKFFPDKLVYLSKPTWANHMAIFENQGLKTATYPYWANETKSLDLNGFLNAIQKAPEGSIFVLHSCAHNPTGLDPTSEQWVQIVDAIASKNHIALFDTAYQGFATGDLDKDAYAVRLGVEKLSTVSPVFVCQSFAKNAGMYGERVGCFHLALTKQAQNKTIKPAVTSQLAKIIRSEVSNPPAYGAKIVAKLLETPELTEQWHKDMVTMSSRITKMRHALRDHLVKLGTPGNWDHIVNQCGMFSFTGLTPQMVKRLEETHAVYLVASGRASIAGLNQGNVEYVAKAIDEVVRFYTIEAKL

SEQ ID NO: 90617 - DNA, 1387 bp, Oryza sativa
  CDS (43)..(1341)
atccttcttttgcatcgcgacttgatattgcgtgtgagaaccatgcttgctcctgccaccatccgaactgccgtgcgagcgtcgcaggcttcgcgcctcggcttcgtctcgctgcccgccgtgcgccagtacaagagcacctgggcgcacgtcaaggccggcccgcccgacgccattctcggtgtcaccgaggccttcaagcgcgaccaggatcctcgcaagatcaacctcggcgtcggcgcctaccgtgacgagaacggcaagccatacgtgcttccttcggtgcgtcaggccgaggagctcgtcatcacctccaagggcgacaaggagtacctgcccatcaccggtctcgccgacttcaccaagaacgccgccatcctcgcgtacggcaaggacagcgcacccgtcaaggagaaccgcatcgccatcacccagtccatctcgggtaccggtgcgctccgcatcggcggcgccttcctgcagcgccactaccccgaggccaagtcgatctacctgcccacgccgtcgtggggcaaccacacgcccatcttccgcgacagcggcctcgaggtcaagcagtaccgctactacgacaagaagaccgtcggtctcgacttcaagggcatgatcgacgacatcaaggcggcgcctgccggctcgatcgtgctgctgcacgcgtgcgcgcacaaccccaccggtgtcgaccccaccgttgagcagtggaaggagatcagcaacgtcgtcaaggagaagggccacttccccttcttcgacatggcctaccagggcttcgccagcggtgacaccgacaaggacgcctttgccgtgcgccactttgtcagcgagggccaccagatcgcgctctcgcagtcgtttgccaagaacatgggtctctacggcgagcgcgtgggtgcgttcagcgtcgtgtgcgccgaccccgacgagcgcgcgcgcgtggacagccagatcaagatcatcgtgcgcccgctctactcgaacccgcccatgcacggcgccaagatcgcagccaccatcctggctgaccagcagctgtaccagcagtggctgggcgaggtcaagggcatggcggaccgcatcaacggcatgcgctccacgctcaagaacctgctcgtcgaggacctcaactcgaagctcaactgggaccacatcaccaaccagatcggcatgtttgccttcctcggcatctcgccagagcaggtcgccaagctcgtcaacgagcaccacgtctacctgacgggcgacggccgtatctcggtcgccggcatcaccaaccacaacgtcaagcacctcgccgagtcgctccacaaggtcaccagctaagctagtcggctgtgctgaagccaagtcgcaaaatgtcttaccttag

SEQ ID NO: 90618 - protein, 432 aa, Oryza sativa
MLAPATIRTAVRASQASRLGFVSLPAVRQYKSTWAHVKAGPPDAILGVTEAFKRDQDPRKINLGVGAYRDENGKPYVLPSVRQAEELVITSKGDKEYLPITGLADFTKNAAILAYGKDSAPVKENRIAITQSISGTGALRIGGAFLQRHYPEAKSIYLPTPSWGNHTPIFRDSGLEVKQYRYYDKKTVGLDFKGMIDDIKAAPAGSIVLLHACAHNPTGVDPTVEQWKEISNVVKEKGHFPFFDMAYQGFASGDTDKDAFAVRHFVSEGHQIALSQSFAKNMGLYGERVGAFSVVCADPDERARVDSQIKIIVRPLYSNPPMHGAKIAATILADQQLYQQWLGEVKGMADRINGMRSTLKNLLVEDLNSKLNWDHITNQIGMFAFLGISPEQVAKLVNEHHVYLTGDGRISVAGITNHNVKHLAESLHKVTS

SEQ ID NO: 90619 - DNA, 1464 bp, Glycine max
  CDS (95)..(1381)
ctcgagccgctgtcatacccacttccccttcaagagcacacgcccagatcagcgttaacaacgtcttacaactgcgaaacaaaaccaatctgaaatgtccgaccaacaagagatttacgctgcgttccccaacgtccctcaggctcctcctgattccatcttccaattgaccgctcgttacgtcgccgacaagcatccgaacaagatcaacctgggtgtcggggcatacaggacggacgaggggaaaccttgggtcttgcccaccgtcaagaaggcttccaggcaactagaagagaaccccaatatcgaccatgaatacctccctatcacgggtcttcctcagttcaccaaggccgctcaggggttgatctttgggaaacagaacaaggctgttgacgagggaagggtcatcagcgtccagaccttgtcaggtaccggagccaaccacttggccgcgctgtttttcgccaagttttacgagttccctacggacaaggagatctacattagcaatcctacttgggccaaccacaacgccatcatatccaacgtcggggtcacgcccgtctcctacaggtattacaacaaggagaccatcgcgctcgatttcgatgggtacttggaggacttgcaaaaggccccagagagatcggtcatcttggttcatgggtgtgcccataaccctaccggagtcgacccgacggccgagcagtgggacaagatcctggacgtctttttgcaaaagaagcactacgcgttctttgactcggcttaccaagggttcgccacgggagatctcgatcgggatgccgggtccatgaggaagttcgccgagaagagggtcccgatgttggtctgccagtcgtttgccaagaacgccgggctgtacaacgaacgagtcggtgctctgcacgtcgtcgcggccgataccaaggaggccgagagggtcaagtcccagttgtccgtcttgcagcgaagcgagatctcgaaccctcccgcttacggagctcatatcgtctccatgatcctcaccaacccggaactcttcgattcgtggaagaacgacattaccaccatgtcgggtcgaatcattgagatgagggatgccctgtttgacttgctcaatgacaagttcaagacgcctcccccgcccggaaggaaggactggggtcatatcaaggagcagatcggcatgttctcgttcaccggtctcaaccctgatcagactaagaagctcgtcgaggagcattccgtctaccttaccgggaacggtcggatatcgatggccgggctaaacacccacaacgtcgagaccttcgccaaggccgtcgacgaggtcgtccgaagtacctctggtactgtccccggttctgccctctgaggggttagctagcgtcttgtccgtcatcgtggtcgtcttgtatatagcttgtcgtcggtatcgaaaatgaagagccaattgtc

SEQ ID NO: 90620 - protein, 428 aa, Glycine max
MSDQQEIYAAFPNVPQAPPDSIFQLTARYVADKHPNKINLGVGAYRTDEGKPWVLPTVKKASRQLEENPNIDHEYLPITGLPQFTKAAQGLIFGKQNKAVDEGRVISVQTLSGTGANHLAALFFAKFYEFPTDKEIYISNPTWANHNAIISNVGVTPVSYRYYNKETIALDFDGYLEDLQKAPERSVILVHGCAHNPTGVDPTAEQWDKILDVFLQKKHYAFFDSAYQGFATGDLDRDAGSMRKFAEKRVPMLVCQSFAKNAGLYNERVGALHVVAADTKEAERVKSQLSVLQRSEISNPPAYGAHIVSMILTNPELFDSWKNDITTMSGRIIEMRDALFDLLNDKFKTPPPPGRKDWGHIKEQIGMFSFTGLNPDQTKKLVEEHSVYLTGNGRISMAGLNTHNVETFAKAVDEVVRSTSGTVPGSAL

SEQ ID NO: 90621 - DNA, 1817 bp, Sorghum bicolor
  CDS (64)..(1443)
gcgcacgccgttccccacgccccccagctctcgcaccaggcacgctcacgcgccgcgcaccgaatggcccctgctaacgtgcgcgcggcgcaggcccctagcgccgaccgcaggttaagtacgctggtgcgtcacctgctgccttcctccccacgaagaacagcagcagaagcagcagccgacgcctccgccaccctcgaatcgttccccaccatggcgtcgcagggatcctccgtcttcgccgcactcgcgcaggccccggaggaccccatcctcggagtgaccgtcgcctacaacaaggatcccagccccgtgaaggtcaacctcggcgtcggcgcctaccggaccgaggaagggaagcccctcgtgctgaatgtggtcaggcgcgccgagcaaatgttgatcaataacccgtcacgtgtcaaggagtacctaccaatcaccggtttggctgaattcaataagctgagcgctaagcttatctttggtgctgacagtcctgctattcaggagaatagggttgctacagtgcagtgcctatcgggtactggttctttaagagttggaggtgaatttcttgcaaggcactatcatgagcgcactatctacatcccacaaccaacctggggaaatcacccaaaagtattcaccttatctggattgactgttaggagctaccgctactatgatcctgcgacccgcggtcttgacttcaaaggactcttggaagacctcagttctgctccttcaggttcaattgtactgctgcatgcctgtgcccacaaccctactggagtagatcctacccttgatcagtgggaacagattaggcagctgatgagatcaaaatcactgcttccgttctttgacagtgcctaccaaggctttgcgagtggaagtcttgacaaagatgctcagtcagtgcgaatgtttgttgctgatggtggtgaattgctcatggctcagagctacgccaagaacatgggattgtacggagagcgtgttggcgctttgagcattgtatgtggaagtgccgatgtagctgttagggttgaaagtcaactcaaacttgtgatcaggcctatgtattcaaacccccctcttcatggtgcctctatcgtggctaccatactcagggacagtgagatgtacaacgaatggactctagaactgaaggccatggctgatcggatcattagcatgaggcaacagctatttgatgcgctgaaatccagaggaacccctggagactggagccacatcattaagcaaattgggatgtttactttcactgggctgaatagcgagcaagtggcattcatgaggcaggaataccacatttatatgacatctgatgggaggatcagcatggctggtttgagcatgaggactgtgccccatcttgcagatgccatacacgctgcagttactcaactgaaatgaggacagtatgacagctttcatgaataaaatctgaatcacctagaacaatgttctaagaactcagccggcggtatttcctggttgacctactgtaatctgccttgagataggagtatgttttttactctgttgttggaacagttttgtactggcagattcaaattcaaatattatggtcatattgtgctttcggaactccaaataaatacgcgcatgcaattttgctccaccggtgctaaatgtttatcctacaacaacctgcagtagttttgaaggcttgactttcctattgtacggttcctctgctcaaaagttttctaattgttgtatgttgctacttgctcttcgtgacagccaagggtgaaatagatgcc

SEQ ID NO: 90622 - protein, 459 aa, Sorghum bicolor
MAPANVRAAQAPSADRRLSTLVRHLLPSSPRRTAAEAAADASATLESFPTMASQGSSVFAALAQAPEDPILGVTVAYNKDPSPVKVNLGVGAYRTEEGKPLVLNVVRRAEQMLINNPSRVKEYLPITGLAEFNKLSAKLIFGADSPAIQENRVATVQCLSGTGSLRVGGEFLARHYHERTIYIPQPTWGNHPKVFTLSGLTVRSYRYYDPATRGLDFKGLLEDLSSAPSGSIVLLHACAHNPTGVDPTLDQWEQIRQLMRSKSLLPFFDSAYQGFASGSLDKDAQSVRMFVADGGELLMAQSYAKNMGLYGERVGALSIVCGSADVAVRVESQLKLVIRPMYSNPPLHGASIVATILRDSEMYNEWTLELKAMADRIISMRQQLFDALKSRGTPGDWSHIIKQIGMFTFTGLNSEQVAFMRQEYHIYMTSDGRISMAGLSMRTVPHLADAIHAAVTQLK

SEQ ID NO: 90623 - DNA, 2152 bp, Zea mays
  CDS (108)..(1502)
cattgggtacctcgaggccggccggggcgcacgccgtttccacgtcccccggcccccgctctcgtttcccccgcccgcaccaggcacgctcacgcgctgcgcaccggatggcccctgctaacgtgcgcgcggcgcaggcgcaggcgcaggcccccagcgccgaccgcaggttaagtacgctagtggggcacctgctgccttcctccccacgaagagcagcagcagacacctccgccacctccaccctcgaatcgttccccaccatggcgtcgcagggatcctccgtcttcgccgcactcgagcaggccccggaggaccccatcctcggagtgaccgttgcctacaacaaggatcccagccccgtgaaggtcaacctcggggtcggcgcctaccggaccgaggaagggaagcccctagtgctgaacgtggtcaggcgcgccgagcaaatgttgatcaataatccgtcacgtgtcaaggagtacctaccaatcaccggtctggctgaattcaataagctgagcgctaagcttatctttggcgctgacagccctgctattcaggagaatagggttgctaccgtgcagtgcctatcgggtactggttctttaagagtcggaggtgaatttcttgcaaggcactatcacgagcgcactatctacatcccacaaccaacctggggaaatcacccaaaagtcttcactctatctggcttgaacgttaggagctaccgctattatgatcctgcaacatgcagccttcacttcgaaggactcctggaagacctcggttctgctccttcaggttcaattgtactgctgcatgcctgtgcccacaaccctactggagtagatcctaccatcgaacagtgggaacagattaggcagctgatgagatcaaaatcactgcttccgttctttgacagtgcctatcaaggctttgcaagtggaagtcttgacaaagatgctcagtcagtgcgtatgtttgttgctgatggtggtgaacttctcatggctcagagctacgctaagaacatgggattgtatggagagcgtgttggcgctttgagcattgtatgtaaaagtgccgatgtagctgttagggttgaaagtcaactcaaacttgtcatcaggcctatgtattcaaaccctcctcttcatggtgcctctatcgttgctaccatactcagggacaggatcattaacatgaggcaccatgaatggactctggaactgaaggccatggctgataggatcattaacatgaggcaacaactatttaatgcgctgaaatccagaggaacccctggtgattggagccatatcattaagcaaattgggatgtttactttcactgggctgaatagcgaacaagtggcattcatgaggcaggaataccacatttatatgacatctgatgggaggatcagcatggccggtttgagcatgaggactgtgccccatcttgcagatgccatacacgctgcagttactcaactgaaatgaggatagtatcgcagctttcgtgaataaaacctgaatcacccacaacaatgttcataagtactcagccagtggtatttactggttgacctactgtagtttgcgtcggaatagatatgtttttttttactctgttcgtggggcagttttgtactggtggattcataaggactctgattatggtgcgttcggaacttataataataagcacatgaaattttgcttcaggtgcagtgatgctgtctcattaagttattagttattaggttgctgtcttattaagttatcaggtcgcagctgggttgaagcggagcacctgtcttgatttatctcttctcttttctagagagcttctgtcattcgtgtgcccttttatatcattttgctctatcaatgattatcctacaatctgcagtagttttgattccgttttgttctttgcctgctgtactggctcagaagtacggtaatgctcgcaagctttgcggttgttgatttagggactgaaaggatctgtttagaaaggtgtcgatttggagactcaaaaggatcaagaccttccaaggaaggtgaattgagtttctctaaattttcttgtatgaattaaaaagttttgtatcataatttttaattctatactagcatgataattc

SEQ ID NO: 90624 - protein, 464 aa, Zea mays
MAPANVRAAQAQAQAPSADRRLSTLVGHLLPSSPRRAAADTSATSTLESFPTMASQGSSVFAALEQAPEDPILGVTVAYNKDPSPVKVNLGVGAYRTEEGKPLVLNVVRRAEQMLINNPSRVKEYLPITGLAEFNKLSAKLIFGADSPAIQENRVATVQCLSGTGSLRVGGEFLARHYHERTIYIPQPTWGNHPKVFTLSGLNVRSYRYYDPATCSLHFEGLLEDLGSAPSGSIVLLHACAHNPTGVDPTIEQWEQIRQLMRSKSLLPFFDSAYQGFASGSLDKDAQSVRMFVADGGELLMAQSYAKNMGLYGERVGALSIVCKSADVAVRVESQLKLVIRPMYSNPPLHGASIVATILRDRIINMRHHEWTLELKAMADRIINMRQQLFNALKSRGTPGDWSHIIKQIGMFTFTGLNSEQVAFMRQEYHIYMTSDGRISMAGLSMRTVPHLADAIHAAVTQLK

SEQ ID NO: 90625 - DNA, 1855 bp, Zea mays
  CDS (192)..(1484)
cctcgaggccggccggactttattttcgggtccctcgaggctggccgggagcctgcagcgcagaaaaaccagcggcgcagtgacaaaagcccacagcttcttctccctactcctccagtcctccgtcatccgtttcgctctctgccgccgccaccgcacaagaagctagctcctgcctgtaccgccccgtcatggcgatgctatcccgcgcagcctcctccgcggcccggcgcccgctgctgccgccgcctaggcttctggcggtgagggcgatggcgtcgtcgctcttcggccacgtcgagccggcgcccaaggaccccatcctcggcgtcaccgaggctttcctcgccgacccctcgtccgacaaagtgaacgtcggcgtcggcgcctaccgggacgacaacggccagcccgtcgtgctcagctgcgtgcgcgaggccgagcgccggatcgcgggcaacctcaacatggagtaccttccgatgggaggcagcgtcaagatgattgaagagtcactgaagctggcgtacggagaagattctgacttcatcaaagataagaggatagcagcggtgcaggcgctttcaggcactggtgcctgccggctctttgctgatttccaaaagcgttttttgccggattcgcagatctacataccaacaccaacgtggtccaaccatcacaatatttggagggatgctcaagtgccacagaagacattcacatactaccatccagagtcaagagggcttgatttctcaggattgatgaatgaaatcaagaatgctccagatggttcattctttttgcttcatgcatgtgctcataatcccaccggtgtagatcctacggaggaacaatggagagaaatatcccatcagttcaaggtgaaaaaacattttccattctttgacatggcataccaagggtttgccagtggtgatccagagagagatgccaaggcaatccgaattttccttgaagatggacaccaaattggatgtgctcagtcatacgcaaagaacatgggactttatggacaaagagcaggatgcctgagtattttgtgtgaggatgagatgcaagcagttgctgtcaagagccaactgcaacagatcgcaagaccaatgtacagcaacccacctgttcatggtgcactggttgtttctataatcctcagtgatccagaattgaagagtttgtggttaaaagaagtcaagggtatggctgatcgtatcattggaatgcggaaggcacttaaggaaaatcttgaaaagctaggttcacctttgtcatgggatcatatcactaatcagattggaatgttctgctacagtgggatgacacctgaacaagttgaccgtttaacaaatgaataccacatttacatgacccgcaatgggaggataagcatggctggtgtaacgacaggaaatgttggttacctagcaaatgcaattcatgaggttaccaaaccaaattgagttagggtgctaccttctttggtcgatggaagctgatggaatgagactgtgaagcggcgtttccccccctctgttcctgacagaaataagtttagcctgctgctcccatatacatggacacagactcacatgtagacactcaagttttgagagctgtgatcctgtttcatttaatcaaaaacaattttgtttttttttccatcttgtcatggcaaatgttacaccagctgcaaaataattacaataattgatcttgatccaaaaaaaaaaaaaaaaaaaaaactagcagcgttgcacgtcaaatgtttggtgttaataaggacaggctatgtatcctctgccagattgttgtacatatacattgtggtgat

SEQ ID NO: 90626 - protein, 430 aa, Zea mays; identical to SEQ ID NO: 66686

SEQ ID NO: 90627 - DNA, 1260 bp, Eremothecium gossypii
  CDS (1)..(1260)
atgtctttgactgcgtttaaccagctagaaatccttcctccggacgcactgttcgatgtcaagaagcggctaacccaagacacgcggtcgtttaaagttgacctcgggctcggggcataccgggacgaaaacgggaagccgtgggtgctaccgtgtgtgcgcgaagcggagaaacagttgatggcggaccccggatacaaccacgagtacctggggattgccgggctggaggagttccgcgcggccgcggcgcgtgtgctactcggcgaagacagcgaggcgctggccgagggccgggtggtgtcggtgcagtcgatttccggcaccggggcgctgcacgtggcggcgaagctacttgcgaagacggtgccagatgcgacggtgtacatgtcggaccccacgtggggcaaccactttgccgtgttcgagacacagggtctgcgcacggcgacgtacccatactgggatgcggcgacccgctcactggacatggagggcgttctgggcgcgctgggcgcggcgccgcgcgggtcggtcttcgtgctgcacgcttgtgcgcacaatccaacggggcttgaccccaacgaggagcaatgggtgcagatcctggacgcggtagccgcgcgcgagcacaccgtgctgttcgatagcgcctaccaggggtttgcgtcgggcagcctggctcgcgacgcgtacgcgctgcgcgccgggctgcggcgcctggccgaggtcacgccggtgcttgtgtgtcagtcctttgccaagaacattggcatgtacggtgagcgtgtgggcgctctgcatgttgtcctgccccgccagcctgccgagtcgctggcgcacgtcaaggctgccgtgctgtcgcagctgagccacatcacgcgctcggagctgtcgaacccgcccgcctacggcgccaagatcgtgaccaaggtcctcaccacccccgaactcgccgctcagtggaagaaggacatgatcaccatgtcgagccgcattgcgcgcatgcgccgcgtgctccgcgaccgtctggtcgagctcggtacacctggcaactgggaccacatcgtccaacagtgcggcatgttctcatacaccggtttgacgaaggagatggtcgcccgcatggaaaaggacttcgccatctacatggtctcctcgggccgcatttcgatagccggccttaacgacagcaatgtcggccacgttgccaacgcaattgacaatgctgttcgccacttctctacacccaagctgtga

SEQ ID NO: 90628 - protein, 419 aa, Eremothecium gossypii
MSLTAFNQLEILPPDALFDVKKRLTQDTRSFKVDLGLGAYRDENGKPWVLPCVREAEKQLMADPGYNHEYLGIAGLEEFRAAAARVLLGEDSEALAEGRVVSVQSISGTGALHVAAKLLAKTVPDATVYMSDPTWGNHFAVFETQGLRTATYPYWDAATRSLDMEGVLGALGAAPRGSVFVLHACAHNPTGLDPNEEQWVQILDAVAAREHTVLFDSAYQGFASGSLARDAYALRAGLRRLAEVTPVLVCQSFAKNIGMYGERVGALHVVLPRQPAESLAHVKAAVLSQLSHITRSELSNPPAYGAKIVTKVLTTPELAAQWKKDMITMSSRIARMRRVLRDRLVELGTPGNWDHIVQQCGMFSYTGLTKEMVARMEKDFAIYMVSSGRISIAGLNDSNVGHVANAIDNAVRHFSTPKL

SEQ ID NO: 90629 - DNA, 1257 bp, Saccharomyces cerevisiae; identical to SEQ ID NO: 66639
  CDS (1)..(1257)

SEQ ID NO: 90630 - protein, 418 aa, Saccharomyces cerevisiae; identical to SEQ ID NO: 66640

SEQ ID NO: 90631 - DNA, 1389 bp, Arabidopsis thaliana; identical to SEQ ID NO: 66421
  CDS (1)..(1389)

SEQ ID NO: 90632 - protein, 462 aa, Arabidopsis thaliana; identical to SEQ ID NO: 66422

SEQ ID NO: 90633 - DNA, 1296 bp, Bombyx mori; identical to SEQ ID NO: 66423
  CDS (1)..(1296)

SEQ ID NO: 90634 - protein, 431 aa, Bombyx mori; identical to SEQ ID NO: 66424

SEQ ID NO: 90635 - DNA, 1299 bp, Oryza sativa (japonica cultivar-group); identical to SEQ ID NO: 66427
  CDS (1)..(1299)

SEQ ID NO: 90636 - protein, 432 aa, Oryza sativa (japonica cultivar-group); identical to SEQ ID NO: 66428

SEQ ID NO: 90637 - DNA, 1377 bp, Oryza sativa (japonica cultivar-group); identical to SEQ ID NO: 66429
  CDS (1)..(1377)

SEQ ID NO: 90638 - protein, 458 aa, Oryza sativa (japonica cultivar-group); identical to SEQ ID NO: 66430

SEQ ID NO: 90639 - DNA, 1392 bp, Oryza sativa (japonica cultivar-group); identical to SEQ ID NO: 66431
  CDS (1)..(1392)

SEQ ID NO: 90640 - protein, 463 aa, Oryza sativa (japonica cultivar-group); identical to SEQ ID NO: 66432

SEQ ID NO: 90641 - DNA, 1185 bp, Mesorhizobium loti MAFF303099
  CDS (1)..(1185): transl_table=11
atgttcgaagacctgcagccagctcccgccgacaagatcctggccctcatcggcctctatcgcgccgatccgcgtcccaacaaggtcgacctcggcgtcggcgtctacaaggatcgcgacggcaagaccccagtgatgcgcgccgtgcgtgaggctgaaaagcggctgctgaacagccaggacaccaagacctatctcgggctcgccggcgacaccggcttcaacgcggtgatggccaagctcgccttcggcccgggcgcggacatgacgcgcattcgggcggcccaggcgcctggcggctccggtgcgcttcgcctggtggcggagctgctcaagcggacccgttcggacgccacgatctggctgtcggacccaacctggccgaaccatatgccggtgatgcgcgctgccggcctgcagatccgcgaatatccctatttcgacgcggcctccggtgctgttcgcttcgacgacatgctggcggcgttgcggacggccaagagcggcgacgtggtgctgctgcacggctgctgccacaatccaaccggcgccaatctggatgcggcgcagtggcaggccgtcaccgatctgatggtcgagcgcggcctgctgccattcgtcgacatcgcctatcagggctttggcgacggcctcgaggccgacgctcttggcctgcgcctgctggcggcgaaagttccggaaatggttgttgcctcgagctgctcgaagaatttcgccgtctaccgcgaccgtgtcggcgcagcgatggttttggccagggacagcgcgcaggctgacgtggcgatgagccagatgctgtcggcggcgcgcgccatgtattcgatgccgccggaccatggtgccgcggcggtgcgcatcgtgctcgaagacgcaagcctgcgcgccgactgggaagccgaattggaagagatgcgcctgcgcatgctgaggcttcgcgtggctttcgccgaggcgctgcgccggcagtccaactccgaccgcttcgacttcgtcgccagccaccgcggcatgttctcacggcttggcctgacggaagcgcaggtcgagcggctgcgcgccgagcacggcgtgtacatggtcggcgatagccgcatcaacgtcgctggactgccggaggatggcatggacgcgctcgccaaggcgatcgtctccgtgctcgactga

SEQ ID NO: 90642 - protein, 394 aa, Mesorhizobium loti MAFF303099
MFEDLQPAPADKILALIGLYRADPRPNKVDLGVGVYKDRDGKTPVMRAVREAEKRLLNSQDTKTYLGLAGDTGFNAVMAKLAFGPGADMTRIRAAQAPGGSGALRLVAELLKRTRSDATIWLSDPTWPNHMPVMRAAGLQIREYPYFDAASGAVRFDDMLAALRTAKSGDVVLLHGCCHNPTGANLDAAQWQAVTDLMVERGLLPFVDIAYQGFGDGLEADALGLRLLAAKVPEMVVASSCSKNFAVYRDRVGAAMVLARDSAQADVAMSQMLSAARAMYSMPPDHGAAAVRIVLEDASLRADWEAELEEMRLRMLRLRVAFAEALRRQSNSDRFDFVASHRGMFSRLGLTEAQVERLRAEHGVYMVGDSRINVAGLPEDGMDALAKAIVSVLD

SEQ ID NO: 90643 - DNA, 1242 bp, Vibrio cholerae O1 biovar eltor str. N16961
  CDS (1)..(1242): transl_table=11
ttgatgagttcaatcatcccttcccaccctaacttgacatggatgtgctttatgttcgaaaaagtcgttgccgctcccgctgaccctatcctaggtttaactgaagagttcaaaaaagaccctcgtaccgacaaaattaacctcggtgtaggtatttataagaatgaagcaggtgaaaccccggttctcgctactgtaaagaaagcagaagccgcactgcttgagtcagagaaaaccaaatcttatctcacgatcgaagggacagctgagtacggtttagcagtacaaaaactgctgttcggcgcgaattcggacatagtgacacaaaaactggcaaaaacagcgcaagcccctggtggcactggtgcgctgcgtgtggcgggtgaatttattaagcgtcaactgggcgatgtgaaagtctggatcagtaacccaacttgggctaaccatcacggtgtgttcaatgccgctggcttggaaactacgcaatacgcttattatgatgccaaagccaaagacaaagattttgccgctatgctggcagatttagagcaggcagagaaaggcgatgtggttttactgcatggctgctgccacaatccaacgggtattgacccaacagagcaagagtgggaagtactggcgaaattggtggctgacaaaggcttactgcctctgtttgactttgcttaccaaggctttgcttcaggtgtggaagaagacgcggctggcctacgtatttttgcgaaatacaactctgagattctggttgccagctctttctcaaagaactttggcttgtacaacgaacgtgtcggtgccttcacgctggttgcaccttcaacaaccgttgcagaaacggcgttctcacaagttaaagcgattatccgctctatctactcaaacccaccagctcacggtgctgccgttgtcacttatattctgaacaacccagaattacgcgcagaatgggaagccgaagtcgcggaaatgcgtgaacgtattcaagagatgcgcgtacttttcgttaacacattgaaagaagtgggtgtagacgctgactttagctttatcgagcgtcaaaacggcatgttctctttctctggcctaagcaaagagcaagttgcacgcctcaaatcagagttgggtatctatatcgtcggctctggccgcatcagcgtagcggggatgaccaaatcaaacatgctacccttgtgccaaggcattgctgcggtgatgtaa

SEQ ID NO: 90644 - protein, 413 aa, Vibrio cholerae O1 biovar eltor str. N16961
MMSSIIPSHPNLTWMCFMFEKVVAAPADPILGLTEEFKKDPRTDKINLGVGIYKNEAGETPVLATVKKAEAALLESEKTKSYLTIEGTAEYGLAVQKLLFGANSDIVTQKLAKTAQAPGGTGALRVAGEFIKRQLGDVKVWISNPTWANHHGVFNAAGLETTQYAYYDAKAKDKDFAAMLADLEQAEKGDVVLLHGCCHNPTGIDPTEQEWEVLAKLVADKGLLPLFDFAYQGFASGVEEDAAGLRIFAKYNSEILVASSFSKNFGLYNERVGAFTLVAPSTTVAETAFSQVKAIIRSIYSNPPAHGAAVVTYILNNPELRAEWEAEVAEMRERIQEMRVLFVNTLKEVGVDADFSFIERQNGMFSFSGLSKEQVARLKSELGIYIVGSGRISVAGMTKSNMLPLCQGIAAVM

SEQ ID NO: 90645 - DNA, 1194 bp, Neisseria meningitidis MC58; identical to SEQ ID NO: 66433
  CDS (1)..(1194): transl_table=11

SEQ ID NO: 90646 - protein, 397 aa, Neisseria meningitidis MC58; identical to SEQ ID NO: 66434

SEQ ID NO: 90647 - DNA, 1194 bp, Neisseria meningitidis Z2491; identical to SEQ ID NO: 66435
  CDS (1)..(1194): transl_table=11

SEQ ID NO: 90648 - protein, 397 aa, Neisseria meningitidis Z2491; identical to SEQ ID NO: 66436

SEQ ID NO: 90649 - DNA, 1191 bp, Escherichia coli O157:H7 EDL933
  CDS (1)..(1191): transl_table=11
atgtttgagaacattaccgccgctcctgccgacccgattctgggcctggccgatctgtttcgtgccgatgaacgtcccggcaaaattaacctcgggattggtgtctataaagatgagacgggcaaaaccccggtactgaccagcgtgaaaaaggctgaacagtatctgctcgaaaatgaaaccaccaaaaattacctcggcattgacggcatccctgaatttggtcgctgcactcaggaactgctgtttggtaaaggtagcgccctgatcaatgacaaacgtgctcgcacggcacagactccgggtggcactggcgcactacgcatagctgccgatttcctggcaaaaaataccagcgttaagcgagtgtgggtgagcaacccaagctggccgaaccataagagcgtctttaactctgcagatctggaagttcgtgaatacgcttattatgatgcggaaaaccacacccttgacttcgatgcactgattaacagcctgaacgaagctcaggctggcgacgtagtgctgttccatggctgctgccacaacccaaccggtatcgaccctacgctggaacaatggcagacactggcacaactctccgttgagaaaggctggttaccgctgtttgacttcgcttaccagggttttgcccgtggtctggaagaagatgctgaaggactgcgcgctttcgcggctatgcataaagagctgattgttgccagttcctactctaaaaactttggcctgtacaacgagcgtgttggcgcttgtactctggttgctgccgacagtgaaaccgttgatcgcgcattcagccaaatgaaagcggcgattcgcgctaactactctaacccaccagcacacggcgcttctgttgttgccaccatcctgagcaacgatgcgttacgtgcgatttgggaacaagagctgactgatatgcgccagcgtattcagcgtatgcgtcagttgttcgtcaatacgctgcaggaaaaaggcgcaaaccgcgacttcagctttatcatcaaacagaacggcatgttctccttcagtggcctgacaaaagaacaagtgctgcgtctgcgcgaagagtttggcgtgtatgctgttgcttctggtcgcgtaaacgtggccgggatgacaccagataacatggctccgctgtgcgaagcgattgtggcagtgctgtaa

SEQ ID NO: 90650 - protein, 396 aa, Escherichia coli O157:H7 EDL933
MFENITAAPADPILGLADLFRADERPGKINLGIGVYKDETGKTPVLTSVKKAEQYLLENETTKNYLGIDGIPEFGRCTQELLFGKGSALINDKRARTAQTPGGTGALRIAADFLAKNTSVKRVWVSNPSWPNHKSVFNSADLEVREYAYYDAENHTLDFDALINSLNEAQAGDVVLFHGCCHNPTGIDPTLEQWQTLAQLSVEKGWLPLFDFAYQGFARGLEEDAEGLRAFAAMHKELIVASSYSKNFGLYNERVGACTLVAADSETVDRAFSQMKAAIRANYSNPPAHGASVVATILSNDALRAIWEQELTDMRQRIQRMRQLFVNTLQEKGANRDFSFIIKQNGMFSFSGLTKEQVLRLREEFGVYAVASGRVNVAGMTPDNMAPLCEAIVAVL

SEQ ID NO: 90651 - DNA, 1194 bp, Escherichia coli O157:H7 EDL933
  CDS (1)..(1194): transl_table=11
  misc_feature (1149)..(1149): s is g or c
gtgtttcaaaaagttgacgcctacgctggcgacccgattcttacgcttatggagcgttttaaagaagaccctcgcagcgacaaagtgaatttaagtatcggtctgtactacaacgaagacggaattattccacaattgaaagccgtggcggaggcggaagcgcgcctgaatgcggtgcctcatggcgcttcgctttatttaccgatggaagggcttaacagctatcgccatgccattgcgccgctgctgtttggtgccgaccatccggtactgcaacaacagcgcgtagcaaccattcaaacccttggcggctcaggggcattgaaagtgggcgcggatttcctgaaacgctacttcccggaatcaggcgtctgggtcagcgatcctacctgggaaaaccacgtagcaatattcgccggggctggattcgaagtaagcacttacccctggtatgacgaagcgactaacggcgtgcgctttaatgacctgttggcgatgctgaaaacattacctgcccgcagtattgtgttgctgcatccatgttgccacaacccaacgggtgccgatctcactaatgaccagtgggatgcggtgattgaaattctcaaagcccgcgagcttatcccattccttgatattgcctatcaaggatttggtgccggtatggaagaggatgcctacgccattcgcgccattgccagcgctggattacccgctctggtgagcaattcgttctcgaaaattttctccctttacggcgagcgcgtcggcggactttctgttctgtgtgaagatgccgaagctgcaggccgcgtactggggcaattgaaagcaacagttcgccgcaactactccagcccgccgaattttggtgcgcaggtggtggctgcagtgctgaatgacgaggcattgaaagccagctggctggcggaagtagaagagatgcgtactcgcattctggcaatgcgtcaggaactggtgaaggtattaagcacagagatgccagaacgcaatttcgattatctgcttaatcagcgcggcatgttcagttataccggtttaagtgccgctcaggttgaccgactacgtgaagaatttggtgtctatctcatcgccagcggtcgcatgtgtgtcgccgggttaaatacsgcaaatgtgcaacgtgtggcaaaggcgtttgctgcggtgatgtaa

SEQ ID NO: 90652 - protein, 397 aa, Escherichia coli O157:H7 EDL933
MFQKVDAYAGDPILTLMERFKEDPRSDKVNLSIGLYYNEDGIIPQLKAVAEAEARLNAVPHGASLYLPMEGLNSYRHAIAPLLFGADHPVLQQQRVATIQTLGGSGALKVGADFLKRYFPESGVWVSDPTWENHVAIFAGAGFEVSTYPWYDEATNGVRFNDLLAMLKTLPARSIVLLHPCCHNPTGADLTNDQWDAVIEILKARELIPFLDIAYQGFGAGMEEDAYAIRAIASAGLPALVSNSFSKIFSLYGERVGGLSVLCEDAEAAGRVLGQLKATVRRNYSSPPNFGAQVVAAVLNDEALKASWLAEVEEMRTRILAMRQELVKVLSTEMPERNFDYLLNQRGMFSYTGLSAAQVDRLREEFGVYLIASGRMCVAGLNTANVQRVAKAFAAVM

SEQ ID NO: 90653 - DNA, 1203 bp, Chlamydia muridarum Nigg
  CDS (1)..(1203): transl_table=11
gtgagtctttttgaacagttaccttctttctctccggattctattcttggtttagcacaagcttttcaagaagatcctcgtgaggataaaattaatttattactgggtacttacgagcgagaaaaaagccgatacggaggattctcaagcgtcagaaaggctcaaacagtgttttttggtgatgagaaagataaaaactatcttcccatcagaggatcctcagtttttttagaccagatggctgctctatgttttggcgagattgatgctaatcgatggactggagtgcaagctgttggtgggactggagccttacatttgggcgccttagtgtatgctaaatcttctcttgcaggtaaagtctatatcccagctcaaacttgggggaaccactctagaattttttctcgtctaggattgtccctagaacattatccctactatgatcaagaaaaaaaagatctcgatttgcaaggattaaaagcatctcttcgggatgctcctgaggcttctttaattcttttacattgttgttgtcataaccctacagggaaggatattcccctttctgaatggcctgaaattattgctattataaaggacagaggcctcattcctttctttgatatggcttatttaggttttgctaacggaatagtagaggatcgccgacctgttcggctttgcatagaggctggagttgctacttttgttgcaggaagttgtagtaaaaacttctcattatatggttctcgggtaggattttttggggttgttcaccaagataaaacggatttgagcaggatactttctttcttggaagagcagatccgtggggaatactcttctcctgctagagaaggtgttgcaatcgttacctctatattagagaatccctacttgcgacaagagtgggggcttgaactgaatggtattcgccagtctttggaagaaattcgagcgaattttgttattgcaatgagagaagtagcgggacattcttttgatttcatcgcgtctcagaaaggattttttgggtatccaggtttttcaaaagagcaggttgtgttccttagagaagagcttggtatttatacaacagctggtggaagattcaatttaaatggcattacagataaaaatataaatcgtgttatccacggttttgctaaggcctatgaatactctcggtccgtatcataa

SEQ ID NO: 90654 - protein, 400 aa, Chlamydia muridarum Nigg
MSLFEQLPSFSPDSILGLAQAFQEDPREDKINLLLGTYEREKSRYGGFSSVRKAQTVFFGDEKDKNYLPIRGSSVFLDQMAALCFGEIDANRWTGVQAVGGTGALHLGALVYAKSSLAGKVYIPAQTWGNHSRIFSRLGLSLEHYPYYDQEKKDLDLQGLKASLRDAPEASLILLHCCCHNPTGKDIPLSEWPEIIAIIKDRGLIPFFDMAYLGFANGIVEDRRPVRLCIEAGVATFVAGSCSKNFSLYGSRVGFFGVVHQDKTDLSRILSFLEEQIRGEYSSPAREGVAIVTSILENPYLRQEWGLELNGIRQSLEEIRANFVIAMREVAGHSFDFIASQKGFFGYPGFSKEQVVFLREELGIYTTAGGRFNLNGITDKNINRVIHGFAKAYEYSRSVS

SEQ ID NO: 90655 - DNA, 1203 bp, Xylella fastidiosa 9a5c
  CDS (1)..(1203): transl_table=11
gtgcccttatttacagatgtggaattggttccaggtgatcccattctgagcctcaacgatacttataacgccgatacacgtaccaacaaggtcaatttgggtattggcatttattgtgacgagagcggttgtatcccgctgttgcgggctgtccagcaggttgaagagcaacttgcgaagcatccgaaaccgcgcggttatctgccgattgatggtttgccagcctatatcaaagccacacaacaattgttgtttggagtcgactcccccttgttgacggctggccgtgtggcgacctcacagactattggaggttctggggcattgcgggtgactgctgaggtactgaagcaggtgctaccacatgccactgtggccattagccgtccaagctgggagaaccaccgtgctttgttcaccgctgctggcttcaagattgaggactatacctatttcgatacgctcggccacgcggtggactttactggaatggtggcggacttggcgaagctgcaaccaaagaccgtggtattacttcatggttgctgtcataacccaacgggtgccgatctcagcagggatcagtggaagcagcttgttgccttgttccaggaacgtcaattgctgccatgtattgatctggcttaccaaggattcaatcagggcattgatgcggatgcttatgccatacgtttgcttgccgaagaaggtattagtaactatgtagttgccaactcgtactccaaatcgttctcgttgtatggcgagcgtgttggggggctgtcgatcgttgcttccaatacggagcaagcccaagcaatccagtcacaagtaaagcgtattatccgtacgatttattccagtccgtcggcacacggcgcctacttggtcgcaggtgtgctcaacagtcatgagctgcggacgctgtgggagcaggagttaacccagatgcgtgaacgtatccacgggttgcgtgcgggtttggttgctcgattgacggcgctgggtgcgccggagtttgatttcatacaacgtcaagcaggcatgttttcgtattcggggctgagcaagatccaggtggatcgtttgcgcgacgagttcgggatttatgcggtcagtagtggacgtatctgtgtggctgcgttgagtcagcacaaattggaatacgtggcgcaggctgtggtgaaggtgcatcaaggctga

SEQ ID NO: 90656 - protein, 400 aa, Xylella fastidiosa 9a5c
MPLFTDVELVPGDPILSLNDTYNADTRTNKVNLGIGIYCDESGCIPLLRAVQQVEEQLAKHPKPRGYLPIDGLPAYIKATQQLLFGVDSPLLTAGRVATSQTIGGSGALRVTAEVLKQVLPHATVAISRPSWENHRALFTAAGFKIEDYTYFDTLGHAVDFTGMVADLAKLQPKTVVLLHGCCHNPTGADLSRDQWKQLVALFQERQLLPCIDLAYQGFNQGIDADAYAIRLLAEEGISNYVVANSYSKSFSLYGERVGGLSIVASNTEQAQAIQSQVKRIIRTIYSSPSAHGAYLVAGVLNSHELRTLWEQELTQMRERIHGLRAGLVARLTALGAPEFDFIQRQAGMFSYSGLSKIQVDRLRDEFGIYAVSSGRICVAALSQHKLEYVAQAVVKVHQG

SEQ ID NO: 90657 - DNA, 1191 bp, Yersinia pestis CO92
  CDS (1)..(1191): transl_table=11
atgtttgaaaaaattactgctgcacctgcggatcctattttaggtttgaccgatatcttccgcgcggatgaccgcgctcataaaatcaatctggggatcggtgtctacaaagacgaaaccggtaaaaccccagtgctgaccagcgtgaagaaagctgagcagtatttactggaaaatgaagctaccaaaaattatctgggtattgacggcctgcctgtttttgccagttgcacccaagaactgctgttcggtgctaatagtgcaattattgcggataaacgtgctcgtaccgctcaaacgccaggtggtaccggtggtttgcgcattgccgctgattttatcgcccatcagaccagcgctaaacgtgtctgggtcagtaacccaagctggccaaaccataaaaacgtcttcgaagccgcagggctggaagtggtggagtacgcttattatgatgctgctaaccatgcattggacttcgatggcttgttaaatagcctgtcagaagctcaggcgggtgatgtggtgttgttccacggctgctgccataacccaacgggtatcgacccaacagaaactcagtggagccaactggcggagttatcggttgctaaaggctggttgccactgtttgatttcgcttatcaaggctttgccaacggtttggaagaagatgctcagggcctgcgtattttcgcggcaacacatcaagagttgatcgtttgcagctcttattcgaaaaactttggtttgtacaatgaacgtgttggggcttgtacccttgtcgccgccgacagtaacgttgccgataccgcattcagccaagttaaagcggttatccgagccaactactctaacccaccggcacatggtgcatcagtcgttgccactattctgagtaatgccgcactacgggcgatttgggaacaagaactgaccgatatgcgtcagcgcatccaacgtatgcgtcagttgtttgttaataccttgcaggaaaaaggcgctcaacaagattttagctttatcattaaccagaatgggatgttctcgttcagtggtctgaccaaagaacaagtgctgcgcctgcgtgatgagttcgccgtctatgcggtaaattctggccgggttaacgtggcggggatgacaccagacaatatggcgccgttatgtgaagctatcgttgcggtgctctaa

SEQ ID NO: 90658 - protein, 396 aa, Yersinia pestis CO92
MFEKITAAPADPILGLTDIFRADDRAHKINLGIGVYKDETGKTPVLTSVKKAEQYLLENEATKNYLGIDGLPVFASCTQELLFGANSAIIADKRARTAQTPGGTGGLRIAADFIAHQTSAKRVWVSNPSWPNHKNVFEAAGLEVVEYAYYDAANHALDFDGLLNSLSEAQAGDVVLFHGCCHNPTGIDPTETQWSQLAELSVAKGWLPLFDFAYQGFANGLEEDAQGLRIFAATHQELIVCSSYSKNFGLYNERVGACTLVAADSNVADTAFSQVKAVIRANYSNPPAHGASVVATILSNAALRAIWEQELTDMRQRIQRMRQLFVNTLQEKGAQQDFSFIINQNGMFSFSGLTKEQVLRLRDEFAVYAVNSGRVNVAGMTPDNMAPLCEAIVAVL

SEQ ID NO: 90659 - DNA, 1194 bp, Salmonella enterica subsp. enterica serovar Typhi str. CT18; identical to SEQ ID NO: 66437
  CDS (1)..(1194): transl_table=11

SEQ ID NO: 90660 - protein, 397 aa, Salmonella enterica subsp. enterica serovar Typhi str. CT18; identical to SEQ ID NO: 66438

SEQ ID NO: 90661 - DNA, 1197 bp, Ralstonia solanacearum GMI1000
  CDS (1)..(1197): transl_table=11
atgtcgcttttttccgccgtcgagctggccccgcgcgaccccatcctggggctgaatgaagctttcaacgccgatgcccgcagcaccaaagtcaacctgggcgtgggcgtgtacttcaccgacgaaggaaaaatcccggtactgcgcgccgtgcaggaagccgagaaggcccgcctggccatggccgcgccgcgcggctacctgccgatcgaaggcatcgccgcctacgaccaggccgtgcagaagctgctgttcggcgccgattcgccgctgctggccgaaggccgcgtggtgacggcccaggcactgggcggcaccggcgcactgaagatcggcgccgatttcctcaaacgcctgtacccggacgccaaggtcgccatctccgacccgagctgggaaaaccaccgcgcgctgttcgaggccgccggcttcccggtcgtgaactatccgtactacgacgccccgacgcacggcctgaacttcgccgccatgctcgaagcgctcaacggctacgcgcccaacaccatcgtcgtgctgcacgcctgctgccacaacccgaccggcgtggacctgaccaccgagcagtggaagcaggtggtcgaagtcatcaaggccaagcagctgatcccgttcctcgacatggcctaccagggcttcgccgacggcatcgcccaggacggcctggccgtgagcctgttcgccgaatcgggcctgcagttcttcgtgtcgagctcgttctccaagtcgttctcgctgtacggcgagcgcgtcggcgctctgtcgatcgtcaccaccagcaaggacgaggcagcccgcgtgatgtcgcaggtcaagcgcgtgatccgcaccaactactccaacccgccgacgcacggcggcacggtggtcgccagcgtgctgaccagccccgagctgcgcgcgatgtgggagcaggaactgggcgagatgcgcgaccgcatcaagtcgatgcgccacgcgctggtcgacaagcttgccgccaagggcgtgaagaccgacttctcgttcgtgaaggcgcagcgcggcatgttctcgtattcgggcctgtccgccgcccaggtggaccgcctgcgcaacgagcacggcatctacgcggtgtcgaccggccgcatctgcgtggccgcgctgaactcgcacaacatcgacgccgtggtcaacgccatcgccgaagtgctctga

SEQ ID NO: 90662 - protein, 398 aa, Ralstonia solanacearum GMI1000
MSLFSAVELAPRDPILGLNEAFNADARSTKVNLGVGVYFTDEGKIPVLRAVQEAEKARLAMAAPRGYLPIEGIAAYDQAVQKLLFGADSPLLAEGRVVTAQALGGTGALKIGADFLKRLYPDAKVAISDPSWENHRALFEAAGFPVVNYPYYDAPTHGLNFAAMLEALNGYAPNTIVVLHACCHNPTGVDLTTEQWKQVVEVIKAKQLIPFLDMAYQGFADGIAQDGLAVSLFAESGLQFFVSSSFSKSFSLYGERVGALSIVTTSKDEAARVMSQVKRVIRTNYSNPPTHGGTVVASVLTSPELRAMWEQELGEMRDRIKSMRHALVDKLAAKGVKTDFSFVKAQRGMFSYSGLSAAQVDRLRNEHGIYAVSTGRICVAALNSHNIDAVVNAIAEVL

SEQ ID NO: 90663 - DNA, 1230 bp, Schizosaccharomyces pombe 972h-; identical to SEQ ID NO: 66439
  CDS (1)..(1230)

SEQ ID NO: 90664 - protein, 409 aa, Schizosaccharomyces pombe 972h-; identical to SEQ ID NO: 66440

SEQ ID NO: 90665 - DNA, 1314 bp, Schizosaccharomyces pombe 972h-; identical to SEQ ID NO: 66441
  CDS (1)..(1314)

SEQ ID NO: 90666 - protein, 437 aa, Schizosaccharomyces pombe 972h-; identical to SEQ ID NO: 66442

SEQ ID NO: 90667 - DNA, 1182 bp, Drosophila melanogaster; identical to SEQ ID NO: 66443
  CDS (1)..(1182)

SEQ ID NO: 90668 - protein, 393 aa, Drosophila melanogaster; identical to SEQ ID NO: 66444

SEQ ID NO: 90669 - DNA, 1251 bp, Drosophila melanogaster; identical to SEQ ID NO: 66445
  CDS (1)..(1251)

SEQ ID NO: 90670 - protein, 416 aa, Drosophila melanogaster; identical to SEQ ID NO: 66446

SEQ ID NO: 90671 - DNA, 1203 bp, Xanthomonas campestris pv. campestris str. ATCC 33913
  CDS (1)..(1203): transl_table=11
gtgtccttctttgcaaatgtagaacaggttccaggcgaccccatcctgggcctgaccgaggcctacaacgccgacagccgccccaacaaggtcaatctgggtgttggcatctattacgacgaaaacgggcgcatcccgctgttgcgtgccgtgcagaagatcgagcagcagctcgcgctggatgccaaaccgcgcggctacctgcccatcgacggcctggccgcctacgacaaggccacccaggagctgctgttcggcgccgagtcggcgctggtggcctccggccgcgtggcgacctcgcagaccgttggcggcagcggtgcgctgcgcgtgggcgcggacctgctcaagaagctgctgcccacctccaccatcgccatcagcaaccccagctgggaaaaccaccgcgcggtgttcggcgcggccggcttcgaggtggtggattacacctatttcgatgccgccagccacgggctgaacttcgacggcatgctggccgacctggccaagctggagccgggcacggtggtgctgctgcatgcctgctgccacaaccccaccggtgccgacctcagccgcgagcagtggaagcagctggccggcctgttgaaagaacgcaacctgttcccgttcgtggacatcgcctaccagggcttcgacaagggcatcgaggccgatgcgtacgcggtgcgcctgctggcggccgaaggcatcgacacctacgtggtggcgagctcgtactccaagtcgttctcgctgtatggcgagcgcgtgggcgcgctgtcggtggtctcggccacggccgccgaagccaaggcggtgcagtcgcaggtcaagcgcatcatccgcacgatctactccagcccgtccacgcacggcgccgccctggtggccggcgtgctgaccagcccggagctgcgcgatgtgtgggagcaggaactcaccgaaatgcgcgagcgcatccacgcgttgcgtgccggcctggtcgccaagctggccgcgctgggcgcaccggagttcgagttcatccagcgccaggccggcatgttttcgtactcgggcctgaccaagtcgcaggtggaccgcctgcgtgacgagttcgcgatctatgcggtcggcaccggccgcatctgcgtggccgcgctgagccagcgcaatctggactacgtggcccaggccgtggccacggtcagccgcggctga

SEQ ID NO: 90672 - protein, 400 aa, Xanthomonas campestris pv. campestris str. ATCC 33913
MSFFANVEQVPGDPILGLTEAYNADSRPNKVNLGVGIYYDENGRIPLLRAVQKIEQQLALDAKPRGYLPIDGLAAYDKATQELLFGAESALVASGRVATSQTVGGSGALRVGADLLKKLLPTSTIAISNPSWENHRAVFGAAGFEVVDYTYFDAASHGLNFDGMLADLAKLEPGTVVLLHACCHNPTGADLSREQWKQLAGLLKERNLFPFVDIAYQGFDKGIEADAYAVRLLAAEGIDTYVVASSYSKSFSLYGERVGALSVVSATAAEAKAVQSQVKRIIRTIYSSPSTHGAALVAGVLTSPELRDVWEQELTEMRERIHALRAGLVAKLAALGAPEFEFIQRQAGMFSYSGLTKSQVDRLRDEFAIYAVGTGRICVAALSQRNLDYVAQAVATVSRG

SEQ ID NO: 90673 - DNA, 1203 bp, Xanthomonas axonopodis pv. citri str. 306
  CDS (1)..(1203): transl_table=11
gtgtccttctttgcaaacgtggaacaggttccaggcgaccccatcctgggcctgaccgaggcctacaacgccgacagccgccccaacaaggtcaacctgggcgtgggcatctattacgacgaaaacgggcgcatcccgctgttgcgcgccgtgcacaagatcgagcagcagctcgcgcaggacgccaaaccgcggggttatctgcccatcgacggcctggccgcgtacgacaaggccacccaggagctgctgtttggcgccgactctgcgctggtgacctccggccgcgtggcgacctcgcagaccgtcggcggcagcggcgcattgcgcgtgggcgcggacctgctcaagaagctgctgcccaccgccaccatcgccatcagcaaccccagctgggaaaaccatcgcgcggtgttcggcgcggccggcttcgaggttgtcgattacacctacttcgatgccgccatccatggcctgaacttcgacggcatgctcgccgacctggccaagctcgaaccgggcaccgtggtgctgctgcacgcctgctgccacaaccccaccggcgccgacctgagcaaggaacagtggaagcaggtggccggcctgttgaaggaacgcaacctgttcccgttcgtcgacatcgcctaccagggcttcgacaagggcatcgaggccgatgcctatgcggtgcgcctgctggctgccgaaggcatcgacagctacgtggtcgccagttcctattccaagtcgttctcgctgtatggcgagcgcgtgggcgcgctgtcggtggtctcggccaccgccgccgaagccaaggcggtgcagtcgcaggtcaagcgcatcatccgcacgatctactccagcccgtccacgcacggcgccgccctggtggccggcgtgctgaccagcccggagctgcgcgatctgtgggagcaggaactgaccgagatgcgcgagcgcatccattccctgcgcgccgggctggtggaaaaactcgccacgctgggtgcgccggagttcgacttcatccagcgccaggccggcatgttctcgtactcgggcctgaccaagacccaggtggaccgcctgcgcgacgagttcgcgatctacgcggtcggcaccggccgcatctgcgtggcagcactgagccagcgtaacctggactacgtggcccaggccgtggccactgtcagccgggtgtag

SEQ ID NO: 90674 - protein, 400 aa, Xanthomonas axonopodis pv. citri str. 306
MSFFANVEQVPGDPILGLTEAYNADSRPNKVNLGVGIYYDENGRIPLLRAVHKIEQQLAQDAKPRGYLPIDGLAAYDKATQELLFGADSALVTSGRVATSQTVGGSGALRVGADLLKKLLPTATIAISNPSWENHRAVFGAAGFEVVDYTYFDAAIHGLNFDGMLADLAKLEPGTVVLLHACCHNPTGADLSKEQWKQVAGLLKERNLFPFVDIAYQGFDKGIEADAYAVRLLAAEGIDSYVVASSYSKSFSLYGERVGALSVVSATAAEAKAVQSQVKRIIRTIYSSPSTHGAALVAGVLTSPELRDLWEQELTEMRERIHSLRAGLVEKLATLGAPEFDFIQRQAGMFSYSGLTKTQVDRLRDEFAIYAVGTGRICVAALSQRNLDYVAQAVATVSRV

SEQ ID NO: 90675 - DNA, 1194 bp, Yersinia pestis KIM
  CDS (1)..(1194): transl_table=11
gtgttccagaatgttgacgcctacgcaggtgaccccatcctttcactgatggaaagttttaaagccgataaccgggcacataaggtgaatctgagtattgggctttattacaatgaacaaggtgaaatcccgcaaatgcaggctgtggatgctgccgaagcgcaattgagtactcaacctcatgggacaccggtttatttaccgatggaaggtctgcaatcttaccgtactgctatccagcaattattatttggtcacgaccatccaatgctggttcagcaacgggtggcgacaatacagacggtgggcggttctggtgcgttgaaagtcggggctgatttccttaatcactatttccctgattcacaggtgtgggtcagcgatcctacctgggaaaaccacgtggctatttttagcggcgcaggttttaaagtgaacacctatccgtatttcgacaatgataagctggcggtgaagtttgacccgatgctggcaaccttgcagcaattgcccgccagaagcatcgtgttgttacatccttgctgccacaatccaaccggttctgatctgaccaatgcccaatgggatcgcctcattgatgtggtaaaagagcgtgaactgatcccgttcctggatatagcgtaccaaggctttggggcagggctgaatgaagatgcttatgctatccgcgctatggccgcagttggattgccatgcctcatcagcaactccttctcaaaaatcttctcgctctataacgagcgggtcggtggtttatctgtggtgtgtgaaagtgacgaggccgcagggcgtgtattgggccaattgaaagcgacagtgcgccgtaactattccagcccgccaaactttggtgcgcaggtcgtttcgaaagtcctaaatgatacggtattgcgcgcgcaatggcaggcagaggtggaacagatgcgcctacggatccttgatatgcgccacacgctggtggaagccttaaaagcctcgttaccagagcgcaattttgattatctgttgcaacaacgcggcatgttcagctacaccggctttagtgaggcacaggtagagagcttacgtgaagagtttggtgtgtatctgattgcgagcggaagaatgtgtatggcgggagtcaatcaccagaatgttgagcaggttgcggtcgcttttgcggcggtacagtaa

SEQ ID NO: 90676 - protein, 397 aa, Yersinia pestis KIM
MFQNVDAYAGDPILSLMESFKADNRAHKVNLSIGLYYNEQGEIPQMQAVDAAEAQLSTQPHGTPVYLPMEGLQSYRTAIQQLLFGHDHPMLVQQRVATIQTVGGSGALKVGADFLNHYFPDSQVWVSDPTWENHVAIFSGAGFKVNTYPYFDNDKLAVKFDPMLATLQQLPARSIVLLHPCCHNPTGSDLTNAQWDRLIDVVKERELIPFLDIAYQGFGAGLNEDAYAIRAMAAVGLPCLISNSFSKIFSLYNERVGGLSVVCESDEAAGRVLGQLKATVRRNYSSPPNFGAQVVSKVLNDTVLRAQWQAEVEQMRLRILDMRHTLVEALKASLPERNFDYLLQQRGMFSYTGFSEAQVESLREEFGVYLIASGRMCMAGVNHQNVEQVAVAFAAVQ

SEQ ID NO: 90677 - DNA, 1206 bp, Yersinia pestis KIM
  CDS (1)..(1206): transl_table=11
atggaagcctctgacatgtttgaaaaaattactgctgcacctgcggatcctattttaggtttgaccgatatcttccgcgcggatgaccgcgctcataaaatcaatctggggatcggtgtctacaaagacgaaaccggtaaaaccccagtgctgaccagcgtgaagaaagctgagcagtatttactggaaaatgaagctaccaaaaattatctgggtattgacggcctgcctgtttttgccagttgcacccaagaactgctgttcggtgctaatagtgcaattattgcggataaacgtgctcgtaccgctcaaacgccaggtggtaccggtggtttgcgcattgccgctgattttatcgcccatcagaccagcgctaaacgtgtctgggtcagtaacccaagctggccaaaccataaaaacgtcttcgaagccgcagggctggaagtggtggagtacgcttattatgatgctgctaaccatgcattggacttcgatggcttgttaaatagcctgtcagaagctcaggcgggtgatgtggtgttgttccacggctgctgccataacccaacgggtatcgacccaacagaaactcagtggagccaactggcggagttatcggttgctaaaggctggttgccactgtttgatttcgcttatcaaggctttgccaacggtttggaagaagatgctcagggcctgcgtattttcgcggcaacacatcaagagttgatcgtttgcagctcttattcgaaaaactttggtttgtacaatgaacgtgttggggcttgtacccttgtcgccgccgacagtaacgttgccgataccgcattcagccaagttaaagcggttatccgagccaactactctaacccaccggcacatggtgcatcagtcgttgccactattctgagtaatgccgcactacgggcgatttgggaacaagaactgaccgatatgcgtcagcgcatccaacgtatgcgtcagttgtttgttaataccttgcaggaaaaaggcgctcaacaagattttagctttatcattaaccagaatgggatgttctcgttcagtggtctgaccaaagaacaagtgctgcgcctgcgtgatgagttcgccgtctatgcggtaaattctggccgggttaacgtggcggggatgacaccagacaatatggcgccgttatgtgaagctatcgttgcggtgctctaa

SEQ ID NO: 90678 - protein, 401 aa, Yersinia pestis KIM
MEASDMFEKITAAPADPILGLTDIFRADDRAHKINLGIGVYKDETGKTPVLTSVKKAEQYLLENEATKNYLGIDGLPVFASCTQELLFGANSAIIADKRARTAQTPGGTGGLRIAADFIAHQTSAKRVWVSNPSWPNHKNVFEAAGLEVVEYAYYDAANHALDFDGLLNSLSEAQAGDVVLFHGCCHNPTGIDPTETQWSQLAELSVAKGWLPLFDFAYQGFANGLEEDAQGLRIFAATHQELIVCSSYSKNFGLYNERVGACTLVAADSNVADTAFSQVKAVIRANYSNPPAHGASVVATILSNAALRAIWEQELTDMRQRIQRMRQLFVNTLQEKGAQQDFSFIINQNGMFSFSGLTKEQVLRLRDEFAVYAVNSGRVNVAGMTPDNMAPLCEAIVAVL

SEQ ID NO: 90679 - DNA, 1191 bp, Shigella flexneri 2a str. 301
  CDS (1)..(1191): transl_table=11
atgtttgagaacattaccgccgctcctgccgacccgattctgggcctggccgatctgtttcgtgccgatgaacgtcccggcaaaattaacctcgggattggtgtctataaagatgagacgggcaaaaccccggtactgaccagcgtgaaaaaggctgaacagtatctgctcgaaaatgaaaccaccaaaaattacctcggcattgacggcatccttgaatttggtcgctgcactcaggaactgctgtttggtaaaggtagcgccctgatcaatgacaaacgtgctcgcacggcacagactccgggtggcactggcgcactacgcgtggctgccgacttcctggcaaaaaataccagcgttaagcgtgtgtgggtgagcaacccaagctggccgaaccataagagcgtctttaactctgcaggtctggaagttcgtgaatacgcttattatgatgcggaaaatcacacccttgacttcgatgcactgattaacagtctgaacgaagctcaggctggcgacgtagtgctgttccatggctgctgccataacccaaccggtatcgaccctacgctggaacaatggcagacactggcacaactctccgttgagaaaggctggttaccgctgtttgacttcgcttaccagggttttgcccgtggtctggaagaagatgctgaaggactgcgcgctttcgcggctatgcataaagagctgattgttgccagttcctactctaaaaactttggcctgtacaacgagcgtgttggcgcttgtactctggttgctgccgacagtgaaatcgttgatcgcgcattcagccaaatgaaagcggcgattcgcgctaactactctaaccctccagcacacggcgcttctgttgttgccaccatcctgagcaacgatgcattacgtgcgatttgggaacaagagctgactgatatgcgccagcgtattcagcgtatgcgtcagttgttcgtcaatacgctgcaggaaaaaggtgcaaaccgcgacttcagctttatcatcaaacagaacggcatgttctccttcagtggtctgacaaaagaacaagtgctgcgtctgcgcgaagagtttggcgtatatgctgttgcttctggtcgcgtaaatgtggccgggatgacaccagataacatggctccgctgtgcgaatcgattgtggcagtgctgtaa

SEQ ID NO: 90680 - protein, 396 aa, Shigella flexneri 2a str. 301
MFENITAAPADPILGLADLFRADERPGKINLGIGVYKDETGKTPVLTSVKKAEQYLLENETTKNYLGIDGILEFGRCTQELLFGKGSALINDKRARTAQTPGGTGALRVAADFLAKNTSVKRVWVSNPSWPNHKSVFNSAGLEVREYAYYDAENHTLDFDALINSLNEAQAGDVVLFHGCCHNPTGIDPTLEQWQTLAQLSVEKGWLPLFDFAYQGFARGLEEDAEGLRAFAAMHKELIVASSYSKNFGLYNERVGACTLVAADSEIVDRAFSQMKAAIRANYSNPPAHGASVVATILSNDALRAIWEQELTDMRQRIQRMRQLFVNTLQEKGANRDFSFIIKQNGMFSFSGLTKEQVLRLREEFGVYAVASGRVNVAGMTPDNMAPLCESIVAVL

SEQ ID NO: 90681 - DNA, 1194 bp, Shewanella oneidensis MR-1; identical to SEQ ID NO: 66447
  CDS (1)..(1194): transl_table=11

SEQ ID NO: 90682 - protein, 397 aa, Shewanella oneidensis MR-1; identical to SEQ ID NO: 66448

SEQ ID NO: 90683 - DNA, 1191 bp, Shewanella oneidensis MR-1
  CDS (1)..(1191): transl_table=11
atgtttaactcactcatcgcaatgcctgcggatccgatccttggcttgttgacccagtaccgcgaagacacacatccacagaaagtagacttaggtgtcggcgtttataaagatcccgcgggaaacacccccattctcaattgtgtaaaaaaagccgagaaatttcgtttagaaaccgagacgacaaaggtctatatcggtccaactggttcgcctcagtttaataccctgatgacagagttagcctttggcagtgatcatagcgcgattatcgctaaccgtattcgtactgtttccacacctggcggtacgggcgctctgcgtgttgcgggtgactttattaagcgttgcaatcctaatgcggtgttgtgggtaagcgatcccacatgggctaatcatacaggtttattcgaagctgctgggatcacagttaaaacttatccctattatgactacgatagtaaatcgttgaaatttgacgagatgcttgctgcattatcgcaagtgagtcctgatgacgtagtgttattacacgcctgctgccataacccaagtgggatggatttgaccactgatcaatgggataaagtcgtcaccctcaccaaagagcaaggttttaccccgcttatcgacatggcttaccaaggttttggtgacggtgtcgatatcgatgcctacggcgtgcgtaaaatggctgcagcggtcgataatatgatcctgtgtagctcttgctcgaagaacttcggtctgtaccgtgagcgtatcggttcctgctctgtggttgcaaaggatgcgaacacggcaaacattgcgcaatctgtactgctttatgtggttcgctgcctctactctatgccacctgcccatggcgcggcgattgttgagacgattttaggatcaaaagaattaacccaagaatggcttgatgagctcaaagtgatgcgcgaccgtatcaatggtaaccgcgcgattttagttgaaaaactcaaagccaatggtgttgctcgcgactttagctttattgctcgccaaaaaggcatgttctctttccttggtgtaaatcctgagcaagtggcgcgtctgcaaaaagaatttagcatctacatggtgggttcaagccggatcagtatcgcggggatcagtgaagataacgtcgattatctcgcccaatcgatcgccaaagtgctttga

SEQ ID NO: 90684 - protein, 396 aa, Shewanella oneidensis MR-1
MFNSLIAMPADPILGLLTQYREDTHPQKVDLGVGVYKDPAGNTPILNCVKKAEKFRLETETTKVYIGPTGSPQFNTLMTELAFGSDHSAIIANRIRTVSTPGGTGALRVAGDFIKRCNPNAVLWVSDPTWANHTGLFEAAGITVKTYPYYDYDSKSLKFDEMLAALSQVSPDDVVLLHACCHNPSGMDLTTDQWDKVVTLTKEQGFTPLIDMAYQGFGDGVDIDAYGVRKMAAAVDNMILCSSCSKNFGLYRERIGSCSVVAKDANTANIAQSVLLYVVRCLYSMPPAHGAAIVETILGSKELTQEWLDELKVMRDRINGNRAILVEKLKANGVARDFSFIARQKGMFSFLGVNPEQVARLQKEFSIYMVGSSRISIAGISEDNVDYLAQSIAKVL

SEQ ID NO: 90685 - DNA, 1275 bp, Drosophila melanogaster; identical to SEQ ID NO: 66449
  CDS (1)..(1275)

SEQ ID NO: 90686 - protein, 424 aa, Drosophila melanogaster; identical to SEQ ID NO: 66450

SEQ ID NO: 90687 - DNA, 1296 bp, Drosophila melanogaster; identical to SEQ ID NO: 66451
  CDS (1)..(1296)

SEQ ID NO: 90688 - protein, 431 aa, Drosophila melanogaster; identical to SEQ ID NO: 66452

SEQ ID NO: 90689 - DNA, 1314 bp, Drosophila melanogaster; identical to SEQ ID NO: 66453
  CDS (1)..(1314)

SEQ ID NO: 90690 - protein, 437 aa, Drosophila melanogaster; identical to SEQ ID NO: 66454

SEQ ID NO: 90691 - DNA, 1197 bp, Pseudomonas putida KT2440
  CDS (1)..(1197): transl_table=11
atgagcctgttttccgctgtcgagctggcaccccgcgaccctattctgggcctcaacgaagcattcaacgccgacccacgtaccgacaaggtcaacctgggcgtaggcgtgtattgcaatgaggaaggccgcattccgctgctgcgcgccgtgatcgaagccgaaacccagcgtgccgcccagcacgcttcgcgcggctacctgccgatcgacggcatcgccacctacgaccaggctgtgcagaagctgctgttcggcgccgagtcgccactgctggccgccggccgcgtggtcaccgtgcaggccgtcggtggtaccggcgcgctgaagatcggtgccgacttcctcaagcgcctctcgcccaatgccgtggttgccatcagcgaccctagctgggaaaaccaccgtgcgctgttcgaatcggccggcttcccggtgcagacctaccgctactacgatgcgccgaccaacgacgtcaaccgcgctggcatgctcgaagacctcaacgccctgccatccggttcgatcgtggtgctgcacgcctgctgccacaacccgaccggtgtcgacctgaacctggacgactggaagaacgtcctggaagtggtcaaggccaagggccacgtgccgttcctcgacatggcctaccagggctttggtgacggtatcgccgaagacgccttcgccgtgcgcctgttcgccgagtcgggcctggagttcttcgtttccagctcgttctccaaatcgttctcgctgtacggcgagcgcgtcggcgcactgtcgatcgtcaccgcctccaaggacgagagcacccgcgtgctgtcgcaggtcaagcgcgtgatccgcaccacctactccaacccgccaacccacggcgcaaccattgttgccaccgtgctgaacagcgcagaactgcgccagatgtgggaaaccgaactggccgaaatgcgcgagcgcatccacggcatgcgcaagcagatggtatcgctgctggccgaatacggtgcaaaccgcgacttcagcttcgttggccgccaggtcggcatgttctcctactcgggcctgaccgttgaacaggtcacccgcctgaagaacgacttcggcatctatgccctggacaccggccgtatcgcggtggccgcgctgaaccagagcaacatccacgtggtgaccaaagcgatcgtggaagtgctgtaa

SEQ ID NO: 90692 - protein, 398 aa, Pseudomonas putida KT2440
MSLFSAVELAPRDPILGLNEAFNADPRTDKVNLGVGVYCNEEGRIPLLRAVIEAETQRAAQHASRGYLPIDGIATYDQAVQKLLFGAESPLLAAGRVVTVQAVGGTGALKIGADFLKRLSPNAVVAISDPSWENHRALFESAGFPVQTYRYYDAPTNDVNRAGMLEDLNALPSGSIVVLHACCHNPTGVDLNLDDWKNVLEVVKAKGHVPFLDMAYQGFGDGIAEDAFAVRLFAESGLEFFVSSSFSKSFSLYGERVGALSIVTASKDESTRVLSQVKRVIRTTYSNPPTHGATIVATVLNSAELRQMWETELAEMRERIHGMRKQMVSLLAEYGANRDFSFVGRQVGMFSYSGLTVEQVTRLKNDFGIYALDTGRIAVAALNQSNIHVVTKAIVEVL

SEQ ID NO: 90693 - DNA, 1197 bp, Pseudomonas putida KT2440; identical to SEQ ID NO: 66455
  CDS (1)..(1197): transl_table=11

SEQ ID NO: 90694 - protein, 398 aa, Pseudomonas putida KT2440; identical to SEQ ID NO: 66456

SEQ ID NO: 90695 - DNA, 1191 bp, Escherichia coli CFT073; identical to SEQ ID NO: 66457
  CDS (1)..(1191): transl_table=11

SEQ ID NO: 90696 - protein, 396 aa, Escherichia coli CFT073; identical to SEQ ID NO: 66458

SEQ ID NO: 90697 - DNA, 1236 bp, Escherichia coli CFT073
  CDS (1)..(1236): transl_table=11
ttgtgttttaaccaccagcccgtaaacctggagaaccatcgcgtgtttcaaaaagttgacgcctacgctggcgacccgattcttacgcttatggagcgttttaaagaagaccctcgcagcgacaaagtgaatttaagtatcggtctgtactacaacgaagacggaattattccacaactgaaagccgtggcggatgcggaagcgcgcctgaatgcgcagcctcatggtgcttcgctttatttaccgatggaagggcttaacagctatcgccatgccattgcgccgctgctgtttggtgcggaccatccggtactgcaacaacagcgcgtagcaaccattcaaacccttggcggctcaggggcattgaaagtgggtgcagatttcctgaaacgctacttcccggaatcaggcgtctgggtcagcgatcctacctgggaaaaccacgtagcaatattcgccggggctggattcgaagtgagcacttacccctggtatgacgaagcgactaacggcgtgcgctttaatgacctgttggcgacgctgaaaacattacctgcccgcagtattgtgttgctgcatccatgttgccacaacccaacgggtgccgatctcactaatgaccagtgggattccgtgattgaaattctcaaagcccgcgagcttattccattcctcgatattgcctatcaaggatttggtgccggtatggaagaggatgcctacgccattcgcgccattgccagcgctggattacccgctctggtgagcaattcgttctcgaaaattttctccctttacggcgagcgcgtcggcggactttctgttctgtgtgaagatgccgaagccgcaggccgcgtactggggcaattgaaagcaaccgttcgccgcaactactccagcccgccgaattttggtgcgaaggtggtggctgcggtgctgaatgacgaggcattgaaagccagctggctggcggaagtagaagagatgcgaactcgcattctggcaatgcgtcaggaactggtgaaggtattgagcacagagatgccagagcgcaatttcgattatctgcttaatcagcgcggcatgttcagttataccggtttaagaaccgctcaggttgaccgactacgtgaagaatttggtgtctatctcatcgccagcggtcgcatgtgtgtcgccgggcttaacgcgcaaaatgtgcatcgcgtggcaaaggcgtttgctgcggtgatgtga

SEQ ID NO: 90698 - protein, 411 aa, Escherichia coli CFT073
MCFNHQPVNLENHRVFQKVDAYAGDPILTLMERFKEDPRSDKVNLSIGLYYNEDGIIPQLKAVADAEARLNAQPHGASLYLPMEGLNSYRHAIAPLLFGADHPVLQQQRVATIQTLGGSGALKVGADFLKRYFPESGVWVSDPTWENHVAIFAGAGFEVSTYPWYDEATNGVRFNDLLATLKTLPARSIVLLHPCCHNPTGADLTNDQWDSVIEILKARELIPFLDIAYQGFGAGMEEDAYAIRAIASAGLPALVSNSFSKIFSLYGERVGGLSVLCEDAEAAGRVLGQLKATVRRNYSSPPNFGAKVVAAVLNDEALKASWLAEVEEMRTRILAMRQELVKVLSTEMPERNFDYLLNQRGMFSYTGLRTAQVDRLREEFGVYLIASGRMCVAGLNAQNVHRVAKAFAAVM

SEQ ID NO: 90699 - DNA, 1200 bp, Vibrio vulnificus CMCP6
  CDS (1)..(1200): transl_table=11
atgaagattatgtttgaaaaagtagttgccgctcccgcggacccgattcttggcctaactgaagaattcaaaaaagaccctcgcgcagaaaaaattaaccttggcgtgggtatctacaaaacagaacaaggtgaaactcctgttcttgctacggtaaagaaagcggaagcagcgcttgttgaaaccgagaaaaccaaatcttacctaaccatcgaaggaacagcagaatacgcattagcggttcaaaaactactgtttggtgcggatgctgagctaatcaatgcgcaacgtgcaaaaacagcacaagcacctggcggtactggcgcactgcgcgttgcaggcgaattcatcaaacgccaactcggcgatgtaaaaatctggatcagcaacccaacttgggctaaccaccatggtgtgttccgcgcagcaggcctagaaacggttgagtacgcttactacaacccagaaaccaaagacaaagactttgccgctatgctggccgaccttgaaaaagcgtccgctggtgatgtggtactgctgcacggatgttgccataacccaacaggcatcgacccaacggcacaagagtgggaagcgcttgctaaactggttgccgacaagggcctacttccactatttgactttgcctaccaaggtttcgcgaaaggtgttgaagaagatgcgcaaggcctacgtaccttcgctaaattcaacaaagagatcctcgtagcaagttcattctcgaaaaactttggtctgtacaacgagcgtgtaggcgcattcacgttagtggctgaaagccaagagatcgcagaaacggcattctcacaagtgaaagcgatcattcgctctatctactcaaacccaccagcgcacggcagtgcggtagtgactcacatccttaacgatgccgcgcttcgtgcagagtgggaagcggaagtggcagagatgcgcgatcgcatccaagagatgcgcgaactttttgttacgacactgaaagaagaaggcgttgcggctgactttagctttatccaacgtcaaaacggcatgttctctttctctggcttgaacaaagatcaagtggctcgcctaaaagaagagtttgcgatctacatcgtcggttctggtcgcatcagcgttgcgggcatgaccaaatccaacatgggtccgctttgtaaagccatcgctgcggtactgtaa

SEQ ID NO: 90700 - protein, 399 aa, Vibrio vulnificus CMCP6
MKIMFEKVVAAPADPILGLTEEFKKDPRAEKINLGVGIYKTEQGETPVLATVKKAEAALVETEKTKSYLTIEGTAEYALAVQKLLFGADAELINAQRAKTAQAPGGTGALRVAGEFIKRQLGDVKIWISNPTWANHHGVFRAAGLETVEYAYYNPETKDKDFAAMLADLEKASAGDVVLLHGCCHNPTGIDPTAQEWEALAKLVADKGLLPLFDFAYQGFAKGVEEDAQGLRTFAKFNKEILVASSFSKNFGLYNERVGAFTLVAESQEIAETAFSQVKAIIRSIYSNPPAHGSAVVTHILNDAALRAEWEAEVAEMRDRIQEMRELFVTTLKEEGVAADFSFIQRQNGMFSFSGLNKDQVARLKEEFAIYIVGSGRISVAGMTKSNMGPLCKAIAAVL

SEQ ID NO: 90701 - DNA, 1188 bp, Vibrio vulnificus CMCP6
  CDS (1)..(1188): transl_table=11
atgttctctcaattaccaacaccagctttagatcctattctttctctaaccgttgcttttcgtaacgatccgcgtgaccaaaaagtagaccttggcattggcgtatacaaaaacaacaaaggcgaaacgccaatcatgcgtgcggtgtcccaagcgcaaaaaatcgttgctgatacacagacaaccaagtcgtacgtcggcctagcgggatgcgaagagtttaaccaatcgatggtgaatttattgcttgcgggtacttccgtacttgaccgagtgagtgcgattcaaacaccgggagccagtggcgcactgcgtatgctcggagatttgatgaaagtggcacagccagacaccaccgtttggatctctaaccctagttatgtgaaccataagccagtgatggaagctgccgggttgaaagtgcgttattaccgctacttcagcccagaaacaaagcaagtcgacatcggccagatgttagatgatcttgctactgcaggtccaaaggatgtcgtactgcttcatggttgttgtcacaacccaacgggagcagacattgattttgctgcttggcaagccatcaccgatttggcagtaaagaacggtttcacaccctttgttgatattgcctaccaaggctttggtgatggccttgaagaagacgcaaaagggctgcagttcatggctgaccgtgttgaagaaatgctgattaccacttcatgttcgaagaattttggtctttaccgtgaacgtactggcgcggccattgtgattggcaaaaacgcaaaagaatcatcaaacgcgaaaggtaagttgctgacactcgcacgttcaacttacaccatgccgcctgatcacggtgctgcattggtcaaaacaatcctacaaaatgtcgaacttacaaccacttggaagcaagaattgtgtgaaatgcagcaacgtttgttaaacctgcgtcaaactttatgtaatgaattgagaaatcaacacaatacgtcacaattcgacttcattgaaagccacaagggtatgtttactgtgctaggctttacacctgagcaaatgggaacgctacgagatgaatatggaatttatggtgtaggtgacgggcgaattaacatcgctggccttacagaagctcacattccatacgtggcagacgcgatagtcaaagtctcacaacgttaa

SEQ ID NO: 90702 - protein, 395 aa, Vibrio vulnificus CMCP6
MFSQLPTPALDPILSLTVAFRNDPRDQKVDLGIGVYKNNKGETPIMRAVSQAQKIVADTQTTKSYVGLAGCEEFNQSMVNLLLAGTSVLDRVSAIQTPGASGALRMLGDLMKVAQPDTTVWISNPSYVNHKPVMEAAGLKVRYYRYFSPETKQVDIGQMLDDLATAGPKDVVLLHGCCHNPTGADIDFAAWQAITDLAVKNGFTPFVDIAYQGFGDGLEEDAKGLQFMADRVEEMLITTSCSKNFGLYRERTGAAIVIGKNAKESSNAKGKLLTLARSTYTMPPDHGAALVKTILQNVELTTTWKQELCEMQQRLLNLRQTLCNELRNQHNTSQFDFIESHKGMFTVLGFTPEQMGTLRDEYGIYGVGDGRINIAGLTEAHIPYVADAIVKVSQR

SEQ ID NO: 90703 - DNA, 1197 bp, Pseudomonas syringae pv. tomato str. DC3000
  CDS (1)..(1197): transl_table=11
atgagcctgttctccgctgtcgaaatggcaccccgcgatccgatcctgggtatcaacgaagccttcaacgccgacacccgtaccaccaaggtcaaccttggcgtgggcgtctactgtgatgaagacgggcgcattcctctgctgcgtgccgtggctgaagctgaaaagattcgtgtcgcccagcacgcgccgcgcggctacctgccgatcgacggcattgccgcctacgaccaggccgtgcaaaaactgttgctgggtgccgattcaccgctgatcgcctcgggccgggtgctaaccactcaatcggtgggcggcacgggtgctttgaagatcggtgccgacttcctcaagcaactgctgcccaatgcggtggtggccatcagcgacccaagctgggaaaaccatcgcgcgctgttcgaaaccgccggtttcccggtgcagaactatcgttactacgacgccgccacgcatgacgtgaaccgcgccggcatgctcgaagacctgcacaacctgccgaacaactcggtggtggtgctgcacgcctgctgccacaacccgactggcgtcgatctgagcctggacgactggaaaaaagtgctggaagtggtcaaggccaagggccacgtaccgtttctggacatggcttaccagggctttggccaaggcattcaggaagacgcgctggcggtgcgcctgttcgccgagtcgggcctgaccttcttcgcttccagctcgttctccaaatcgctgtcgctgtatggcgagcgcgtcggtgcgctgtcgatcatcacagaatccaaggaagaaaccgcccgcgttctgtcgcaggtcaagcgtgtgatccgcaccaactactccaacccgccgacccacggcgcgatcatttccgccgccgtcctcaacgacccggccctgcgcgcgatgtgggaagaagaactcggcgagatgcgcgtgcgcattcagggcatgcgcaaggcgatggtcgagcgtctggccgacaacccggccggccaggatttcagcttcgtcggccgtcagtgcggcatgttctcctactccggcctgaccgccgcccaggcccagcgcctacgcagtgaattcggcatctacgcgctggacaccggccgtatctgcgtggccgcgctgaatcagaaaaatatcgatgcggtgtgtgaggcgatcaagaaggttctttaa

SEQ ID NO: 90704 - protein, 398 aa, Pseudomonas syringae pv. tomato str. DC3000
MSLFSAVEMAPRDPILGINEAFNADTRTTKVNLGVGVYCDEDGRIPLLRAVAEAEKIRVAQHAPRGYLPIDGIAAYDQAVQKLLLGADSPLIASGRVLTTQSVGGTGALKIGADFLKQLLPNAVVAISDPSWENHRALFETAGFPVQNYRYYDAATHDVNRAGMLEDLHNLPNNSVVVLHACCHNPTGVDLSLDDWKKVLEVVKAKGHVPFLDMAYQGFGQGIQEDALAVRLFAESGLTFFASSSFSKSLSLYGERVGALSIITESKEETARVLSQVKRVIRTNYSNPPTHGAIISAAVLNDPALRAMWEEELGEMRVRIQGMRKAMVERLADNPAGQDFSFVGRQCGMFSYSGLTAAQAQRLRSEFGIYALDTGRICVAALNQKNIDAVCEAIKKVL

SEQ ID NO: 90705 - DNA, 1245 bp, Vibrio parahaemolyticus RIMD 2210633; identical to SEQ ID NO: 66459
  CDS (1)..(1245): transl_table=11

SEQ ID NO: 90706 - protein, 414 aa, Vibrio parahaemolyticus RIMD 2210633; identical to SEQ ID NO: 66460

SEQ ID NO: 90707 - DNA, 1197 bp, Vibrio parahaemolyticus RIMD 2210633
  CDS (1)..(1197): transl_table=11
atgactttcatgttttctaatctaccaactcccgtattagatccaattttatctttatccgttgcataccgtaacgatgaacgtccaaacaaggttgaccttggtattggcgtatacaaaaacagcgcaggcgaaacgccgatcatgaaagccattcaaatggctcaagatgtcgttgttgaaactcaaaaaaccaaatcttacgttggtcttgctggttgtgaagagttcaaccaaagcatgattgatcttctactgacgggaacgtcagcgatggatcgtgttgctgcaattcaaacgccaggagcaagtggtgcactgcgtatgctgggtgacctaatgaaggtcgcacaaccagatacaacggtttggatttcgaatccaagctatgtgaaccacaagccagtaatggaagctgctgggcttaaagttaagttctaccattatttctcgccagaaacgaaacaagtcgacaccgcaaaaatgctggatgatcttgctaaagcagggccgacagatgtggttctactgcatggttgttgtcacaacccaacaggcgcagacatcgacttttccgcatggcaagctattacagaactttctcaaaagaacggttttacgccatttgttgatatcgcgtatcaaggttttggtgacggcttagaagctgacgcaaaaggtcttcgttacatggcggataatgtcgaagagatgttgattacaacttcttgttctaaaaactttggcttgtaccgcgaacgtactggtgcagctattgttgtgggtaagaacacgcaagacatcactaacgcgaaaggcaaattgttaacgttagcgcgctctacgtacacgatgccacccgatcatggtgctgctttagtgaaaaccattctgcaagatgcgaacctgacttctgtctggaagcaagagttgagcgaaatgcaacaacgtttggtcagccttcgtcaaagtttgtgtaacgaattgagaaacaaccataatacagatcaatttgacttcattgagagtcacaaaggcatgtttactgtgctaggctttagtgaaaaccaaatggcgcaactgcgtgaagattatggcatttatggtgttggcgatggtcgaattaacatcgctggcttaaccgaaactcatattccatacgtagctgacgcaattaagaaaatatctcaaccttaa

SEQ ID NO: 90708 - protein, 398 aa, Vibrio parahaemolyticus RIMD 2210633
MTFMFSNLPTPVLDPILSLSVAYRNDERPNKVDLGIGVYKNSAGETPIMKAIQMAQDVVVETQKTKSYVGLAGCEEFNQSMIDLLLTGTSAMDRVAAIQTPGASGALRMLGDLMKVAQPDTTVWISNPSYVNHKPVMEAAGLKVKFYHYFSPETKQVDTAKMLDDLAKAGPTDVVLLHGCCHNPTGADIDFSAWQAITELSQKNGFTPFVDIAYQGFGDGLEADAKGLRYMADNVEEMLITTSCSKNFGLYRERTGAAIVVGKNTQDITNAKGKLLTLARSTYTMPPDHGAALVKTILQDANLTSVWKQELSEMQQRLVSLRQSLCNELRNNHNTDQFDFIESHKGMFTVLGFSENQMAQLREDYGIYGVGDGRINIAGLTETHIPYVADAIKKISQP

SEQ ID NO: 90709 - DNA, 1191 bp, Chlamydophila caviae GPIC
  CDS (1)..(1191): transl_table=11
atgagttttttcaatcaattacccacgttctcacctgattctattttaggtttgcaaaaactatttttagaagatgagcgagaggaaaaggtgaatcttgttataggtgtctatgaagatcctagcaaggcatatggtggtttttctagcgtccgtaaggcgcaatttctttttttagaagatgagatgaataaggggtatttacccatcagtggcttatcttcttttaatcaagaaatggaaaagctggtttttggtgatgtaaattctagttttgttgttggtgctcaggcgctagggggaactggagctttgcatttaggggctaagattttttctatggcctatacctcaggcaaagtatacattcccgagcaaacttggggaaaccacgtaagaatatttgctcaacaaggtttagaggttcttaaatacccttattatagctcagaaagcaaaagtttgctttttgatgagatgctttctgtattgaaagccgctccaaaaaattctttggtgcttttgcagtgttgttgtcataatcctacgggaatggatcttaatgaagatatgtggacacgtcttgctgaagttatgaaagaacatcagcttcttccattttttgataccgcttatttaggttttgggcgaggcatcaaagaagataggcgtcctatagagattttcatagaagttggtaatcccgtatttgtagcagcatgcgcaagtaaaaatttttctctttatggagagagggtaggctacttcgcagttcatagcaaaattactgaggatttagataagatttctagctgtctcgaagagaaagcccgtggagaatattcttcacctcctagacatggagctaaaattgtttcaacgattttatccgacgcttctttgaagaaagaatggttgtcagaattagatacgattcgtagttctttagggaaaactcgcgcaagacttgttcaagctatgcgaaatcacgtcggtcattcgtttgactttatcttgtctcagaagggattttttggttatcccggattttctgtagaacaggtgctctttttaagatcagagaagggtatctatacgacgagtggagcaagatttaacttaaacggaattactgataaaaatatcgaccacgtctctcagagttttgctgaggcgtatcagttgtcttag

SEQ ID NO: 90710 - protein, 396 aa, Chlamydophila caviae GPIC
MSFFNQLPTFSPDSILGLQKLFLEDEREEKVNLVIGVYEDPSKAYGGFSSVRKAQFLFLEDEMNKGYLPISGLSSFNQEMEKLVFGDVNSSFVVGAQALGGTGALHLGAKIFSMAYTSGKVYIPEQTWGNHVRIFAQQGLEVLKYPYYSSESKSLLFDEMLSVLKAAPKNSLVLLQCCCHNPTGMDLNEDMWTRLAEVMKEHQLLPFFDTAYLGFGRGIKEDRRPIEIFIEVGNPVFVAACASKNFSLYGERVGYFAVHSKITEDLDKISSCLEEKARGEYSSPPRHGAKIVSTILSDASLKKEWLSELDTIRSSLGKTRARLVQAMRNHVGHSFDFILSQKGFFGYPGFSVEQVLFLRSEKGIYTTSGARFNLNGITDKNIDHVSQSFAEAYQLS

SEQ ID NO: 90711 - DNA, 1218 bp, Arabidopsis thaliana; identical to SEQ ID NO: 66461
  CDS (1)..(1218)

SEQ ID NO: 90712 - protein, 405 aa, Arabidopsis thaliana; identical to SEQ ID NO: 66462

SEQ ID NO: 90713 - DNA, 1194 bp, Rhodopirellula baltica SH 1; identical to SEQ ID NO: 66463
  CDS (1)..(1194): transl_table=11

SEQ ID NO: 90714 - protein, 397 aa, Rhodopirellula baltica SH 1; identical to SEQ ID NO: 66464

SEQ ID NO: 90715 - DNA, 1197 bp, Wigglesworthia glossinidia endosymbiont of Glossina brevipalpis
  CDS (1)..(1197): transl_table=11
atgtttgaattaacagagctttctcctttagatccagtattaggaatgatcgatattattaaaaatgataaaagagatggtttaataaatttaggaattggagtttataaagatataaaaggtaacactcctatattagatagtgtaaaaaaagcagaaaatattttaatagaatcagaaaaaacaaaaaattatttaaatattgaaggactagaatcatttatacaacattcaaaaagtttaatttttggcaaagaaaatttatctgagttaaatgattttattgcttcagtacaatgcccaggaggaacttctgctttaaaaattgctgcagagtttttaattagacatacaaaaatacgtaaaatttggatcagtgatccaagttggcctaatcatgaaaagttattttcatttgccggatttaaagtacataaatatccttattttaataaggaaaaaaatcaattagatttttataatatgaaaaaatgcttagaaaatattaaagatgactctgctgttatttttcacagctcttgtcataatccaacaggaatagatcctagttttgaacaatggttagaattagctaaaatttctagaaataaaaaatggattccaatatttgattctgcatatcaaggtttttccaatggattaaaagatgatgtatttggtataaaaatttttttaaaatatattaatgaatttgtagtttgcaattcattttctaaaaattttagtttgtataatgaaagagttgggacatgcaattttataacaaaaaacaaaaaacatgccagtaatgttttcagtcaattaagatctattatacgtgtaaattactctaatcctccagctcatggagcaaatattataaatgtaattttctctaaaaaagatttatttaatttatggaaatctgaattaaatgaaatgagaaatagaattaaacaaataagatctttatttgcagatacattatttaaaataaataataaaaaaaatttcaattttattaaaaatcagcatggaatgttttcttttattggattaaatagaaaaaatgtaatggatcttagaaataattttagaatatatgttattgattctggaagattaaatttcgcagcaataacaaataaaaatatttatgaggtgtgtagatcaattaattgtgttttaaataattga

SEQ ID NO: 90716 - protein, 398 aa, Wigglesworthia glossinidia endosymbiont of Glossina brevipalpis
MFELTELSPLDPVLGMIDIIKNDKRDGLINLGIGVYKDIKGNTPILDSVKKAENILIESEKTKNYLNIEGLESFIQHSKSLIFGKENLSELNDFIASVQCPGGTSALKIAAEFLIRHTKIRKIWISDPSWPNHEKLFSFAGFKVHKYPYFNKEKNQLDFYNMKKCLENIKDDSAVIFHSSCHNPTGIDPSFEQWLELAKISRNKKWIPIFDSAYQGFSNGLKDDVFGIKIFLKYINEFVVCNSFSKNFSLYNERVGTCNFITKNKKHASNVFSQLRSIIRVNYSNPPAHGANIINVIFSKKDLFNLWKSELNEMRNRIKQIRSLFADTLFKINNKKNFNFIKNQHGMFSFIGLNRKNVMDLRNNFRIYVIDSGRLNFAAITNKNIYEVCRSINCVLNN

SEQ ID NO: 90717 - DNA, 1191 bp, Haemophilus ducreyi 35000HP
  CDS (1)..(1191): transl_table=11
atgttcaatcatatcgaggccgctctaaccgatccaattttaggtttaaatgatgccttccgagcagatattcgaaaaacaaaaactaatttgggcattggtgtgtatatgaatgccgaaggtcagacaccgattatgaatgccgtaaaattagcagaaacgcgtttacttgctgaagaatcacaaaagaattatcttcagattgatggtatcgcacactttaatagttatacgcaaaccttattatttgggcaagatgccgatgttattcaaacggggcgagtaaaaacagcacaaagtttaggtggcacaggcgcattacgtatagcaatggagtttattaagcgccaaactgacgcaaagactatttggatatcaaacccaacttggcctaatcataatgcaattgctgaagcggttggcttaacgataaaaaactaccgctattataatcccgaaactaacggcttagattgggataatctgttggctgacttgcaacaagctgaacgtggcgatgtagtgttattacacggttgttgccataacccgaccggtatcgatccaacagcagaacagtgggataaactcgctatactttcagctgaaaaaggctggttacctttatttgatttcgcttatcaaggattagccaatggcttagatgaagatgcttacggtttacgtgcatttgctaaaaaccataaagaattattaatcgcgagttcttattcaaaaaattttggtttatataatgaacgcgtgggcgcttttactttagtggcagaaaatgcagaaatagcaaataatgcatttactcaaattaaatcgattattcgagtgctctattctaatccagcggcacacggtgctcataccgtaaccaccgtattggctgatgatcaattacgcgcaaattggatcgctgaattaagtgagatgcgtgatcggattaaaacgatgcgaactaaaatggttcaattactagctgaaaaaggcgcgaaaaaagatttctcatttatttctgatcagaatggtatgttttcattcagcggtttaaccgctacacaagtcgaccgtttacgtgatgaatttgcaatttatgcggttcgttctgggcgaataaatgtagccggacttactgatgataatatcgaagcgttttgcgatgctgtagtaaaagtactttag

SEQ ID NO: 90718 - protein, 396 aa, Haemophilus ducreyi 35000HP
MFNHIEAALTDPILGLNDAFRADIRKTKTNLGIGVYMNAEGQTPIMNAVKLAETRLLAEESQKNYLQIDGIAHFNSYTQTLLFGQDADVIQTGRVKTAQSLGGTGALRIAMEFIKRQTDAKTIWISNPTWPNHNAIAEAVGLTIKNYRYYNPETNGLDWDNLLADLQQAERGDVVLLHGCCHNPTGIDPTAEQWDKLAILSAEKGWLPLFDFAYQGLANGLDEDAYGLRAFAKNHKELLIASSYSKNFGLYNERVGAFTLVAENAEIANNAFTQIKSIIRVLYSNPAAHGAHTVTTVLADDQLRANWIAELSEMRDRIKTMRTKMVQLLAEKGAKKDFSFISDQNGMFSFSGLTATQVDRLRDEFAIYAVRSGRINVAGLTDDNIEAFCDAVVKVL

SEQ ID NO: 90719 - DNA, 1188 bp, Chlamydophila pneumoniae TW-183
  CDS (1)..(1188): transl_table=11
atgagtttttttaatcacataccaacattttctccggatgctattttaggtttgcagaacgttttctttgcagataagcgtcccgaaaaggttaaccttgtgattggtgtttatgagcatccgcaaaagcgttacggcggcttgtcttgtatacgtaaggcacaaactgtcattttggaagaagaacaaaataagagttatcttcctatttcagggttgcaaatatttttagatgagatgcgtgagctggtttttggtgctgtagatccgagtgctatagtcgggtttcagtctttaggaggtacaggagcgctacacttgggagcccggcttctttccgtggcaaaaggatctggtaaggtttatgttcccgagcagacttggagcaatcatatacgcattttctctcaagagggtcttgaggtaatccgatatccttattatagcaaagaacaaaaacagctgttatttgaacccctgatcgcatttttgaaggaagtagaaaagaattccgttatcttattgcatggttgttgtcacaaccctacaggtgtagattttactgaagatatgtggaaagaactcgccatcttaatgaaagaaagagagttaattccattttttgataccgcataccaaggttttgctcacggcatagagttggatagaaaacctatagaaatttttatatcagagggaaatacggttcttgtcgctgcttcatcaagcaaaaactttgctctttatggtgagcgtgtaggatattttgctgttcacagtacttttactgatgagttggttaaaattcacagtttcttagaagaaaaaattcgaggggaatactcttcaccacaacgttggggtgtagaaattgtttctacaattttgagtaatccatatttgaaagaagaatggcaatcagaactcaattttataagagagtctttgggtaaaatgagaacaagatttgttcaagctttgcgtaaggttgccggtcatacatttgactttttattgtcccaacatggattctttgcataccctgggttttccgataaacaggtgctctttttaagagaacaacacgctgtttatacaacagcgggaggaagaatgaatttaaatggaattacggaaaaaaatatagatcatgtagtgcaaagttttattcaagcttatgagctatag

SEQ ID NO: 90720 - protein, 395 aa, Chlamydophila pneumoniae TW-183
MSFFNHIPTFSPDAILGLQNVFFADKRPEKVNLVIGVYEHPQKRYGGLSCIRKAQTVILEEEQNKSYLPISGLQIFLDEMRELVFGAVDPSAIVGFQSLGGTGALHLGARLLSVAKGSGKVYVPEQTWSNHIRIFSQEGLEVIRYPYYSKEQKQLLFEPLIAFLKEVEKNSVILLHGCCHNPTGVDFTEDMWKELAILMKERELIPFFDTAYQGFAHGIELDRKPIEIFISEGNTVLVAASSSKNFALYGERVGYFAVHSTFTDELVKIHSFLEEKIRGEYSSPQRWGVEIVSTILSNPYLKEEWQSELNFIRESLGKMRTRFVQALRKVAGHTFDFLLSQHGFFAYPGFSDKQVLFLREQHAVYTTAGGRMNLNGITEKNIDHVVQSFIQAYEL

SEQ ID NO: 90721 - DNA, 1221 bp, Candidatus Blochmannia floridanus; identical to SEQ ID NO: 66465
  CDS (1)..(1221): transl_table=11

SEQ ID NO: 90722 - protein, 406 aa, Candidatus Blochmannia floridanus; identical to SEQ ID NO: 66466

SEQ ID NO: 90723 - DNA, 1203 bp, Bordetella pertussis Tohama I
  CDS (1)..(1203): transl_table=11
atgagcactcttttcgcttccgtcgaactcgcgccgcgcgaccccattcttggcctgaacgaacagtacaacgccgatacccgtcccggcaaagtgaacctgggcgtgggcgtgtactacgacgacgaaggccgcatcccgctgcttcaggccgtgcgcaaggccgaggtggcccgcatcgaagccgccgccgcccgcggctatctgccgatcgaaggcatcgcggggtacaacaagggtgcgcaggcgctgctgctgggcgccgactcgccgctggccgccgaaggccgcgtgctgaccgcgcaggccctgggcggcaccggcgcgctgaagatcggcgccgacttcctgcgccagctgctgccgcagtccaaggtcctcatcagcgaccccagctgggaaaaccaccgcgccctgttcgagcgcgccggcttcccggtcgagacctacgcttattacgatgccgccacccatggcctgaacttcgaagccatgctggccgccctgcaggccgcgcccgaacagaccatcgtggtgctgcacgcctgctgccacaacccgaccggcgtcgatcccacgccgcaacagtgggaacagatcgccgccgtggtcaaggcgcgcaacctggtgccgttcctcgacatcgcctaccagggcttcggcgaaggcctggagcaggacgccgccgtggtgcgcatgttcgccgcgctcgacctgaccatgttcatcagctcgtcgttctccaagtccttctcgctgtatggcgagcgggtcggggccctgaccgtggtggccggcagcaaggacgaggccgcccgcgtgctcagccagctcaagcgcgtgatccgcaccaactactccaacccgcccacccacggcggcaccgtggtgtccacggtcctgaacacacccgagctgttcgcgctctgggaaaatgaactggccggcatgcgcgaccgcatccgcctgatgcgcaaggagctggtcgagaagatcaagacccagggcgtggcgcaggacttcagcttcgtgctggcgcagcgcggcatgttctcgtactcgggcctgaccgccgcccaggtcgatcgcctgcgcgaagagcacggcatctacgcggtctccagcggccgcatctgcgtggccgcgctcaacagccgcaacatcgacgcggtcgcggccggcatcgccgcggtgctgaagtag

SEQ ID NO: 90724 - protein, 400 aa, Bordetella pertussis Tohama I
MSTLFASVELAPRDPILGLNEQYNADTRPGKVNLGVGVYYDDEGRIPLLQAVRKAEVARIEAAAARGYLPIEGIAGYNKGAQALLLGADSPLAAEGRVLTAQALGGTGALKIGADFLRQLLPQSKVLISDPSWENHRALFERAGFPVETYAYYDAATHGLNFEAMLAALQAAPEQTIVVLHACCHNPTGVDPTPQQWEQIAAVVKARNLVPFLDIAYQGFGEGLEQDAAVVRMFAALDLTMFISSSFSKSFSLYGERVGALTVVAGSKDEAARVLSQLKRVIRTNYSNPPTHGGTVVSTVLNTPELFALWENELAGMRDRIRLMRKELVEKIKTQGVAQDFSFVLAQRGMFSYSGLTAAQVDRLREEHGIYAVSSGRICVAALNSRNIDAVAAGIAAVLK

SEQ ID NO: 90725 - DNA, 1200 bp, Bordetella pertussis Tohama I
  CDS (1)..(1200): transl_table=11
atgttcgagcacgtccaagcctatccgggcgaccccatcctcagcctgaacgaggatttccagaaagatccccgtgtcggcaaggtcaacctgaccatcggcatctatttcgacgaagccggccgcatccccgtcatggccgccgcccgcgaggccgaggccgcgctgctggccgacatcgggccgcgcccctacctgccgatggccggcctgccggcctatcgcgacctggtgcaggaactggtgttcggcgccggcagcgccgcgcgccgcgccggccgcatcgccaccgtgcagacgctgggcgggtcgggcgcgctgaaagtgggcgccgatttcctcaagcgctattttcccaagtcggaagtctgggtcagcgacccgagctgggaaaaccatcgcaccattttcgagggcgccggcttcgcggtgcacacatatccctattacgacgacgccagcggcggcctgcgctttgacgagatgctggccacggtgggcggcctgccggccggcagcgtcgtgctgctgcacgcctgctgccacaacccgaccggcgtggacctcgatcgcgcccagtgggacgcgctgattccggtgctgcgcgagcgcggcctgatcgccttcgtcgacatggcctaccagggcttcggcgatggcctggacgacgacgcctatgctgtgcgggccctggccgaggcgggcgtgacctgtgtggtggccaactcgttctcgaagaatttctcgctgtacggcgagcgctgcggcgggctgagcgtggtctgcgaaaccgccgagcaggccggctgcgtgctgggccagctgaccagcaccatccgcgccatctacagcaacccgcctacccatggcgcgcgcatcgtcgcccaggtgctgggcacgccggcgctgcggcaatcgtgggaggccgagctgggcgccatgcgcgagcgcatccaggcgatgcggcgcgccatccacgacggcctggccggccgcgtcgagccgcgcatgctgcagcgctacctgtcgcagcgcggcatgttcacctacaccggcctgggcgcggagcaggtcgagaccttgcggcgcgaccagggcgtgtatctgctgcgctcgggccgcatgtgcgtggcgggcctgaaccgcgacaacgtggcggtggccgctgacgccatcgccagcgtgctggcgcgcggctag

SEQ ID NO: 90726 - protein, 399 aa, Bordetella pertussis Tohama I
MFEHVQAYPGDPILSLNEDFQKDPRVGKVNLTIGIYFDEAGRIPVMAAAREAEAALLADIGPRPYLPMAGLPAYRDLVQELVFGAGSAARRAGRIATVQTLGGSGALKVGADFLKRYFPKSEVWVSDPSWENHRTIFEGAGFAVHTYPYYDDASGGLRFDEMLATVGGLPAGSVVLLHACCHNPTGVDLDRAQWDALIPVLRERGLIAFVDMAYQGFGDGLDDDAYAVRALAEAGVTCVVANSFSKNFSLYGERCGGLSVVCETAEQAGCVLGQLTSTIRAIYSNPPTHGARIVAQVLGTPALRQSWEAELGAMRERIQAMRRAIHDGLAGRVEPRMLQRYLSQRGMFTYTGLGAEQVETLRRDQGVYLLRSGRMCVAGLNRDNVAVAADAIASVLARG

SEQ ID NO: 90727 - DNA, 1200 bp, Bordetella bronchiseptica RB50
  CDS (1)..(1200): transl_table=11
atgttcgagcacgttcaagcctatccgggcgaccccatcctcagcctgaacgaggatttccagaaagatccccgggccggcaaggtcaacctgaccatcggcatctatttcgacgaagccggccgcatccccgtcatggccgccgcccgcgaggccgaggccgcgctgctggccgacatcgggccgcgcccctacctgccgatggccggcctgccggcctatcgcgacctggtgcaggagctggtgttcggcgccggcagcgccgcgcgccgcgccggccgtatcgccacggtgcagacgctgggcgggtcgggcgcgctgaaagtgggcgccgacttcctcaagcgctattttcccaagtcggaagtctgggtcagcgacccgagctgggaaaaccatcgcaccattttcgagggcgccggcttcgcggtgcacacctatccctattacgacgacgccagcggcggcctgcgctttgacgaaatgctggccacggtgggcggcctgccggccggcagcgtcgtgctgctgcacgcctgctgccacaacccgaccggcgtggacctcgatcgcgcccagtgggacgcgctgattccggtgctgcgcgagcgcggcctgatcgccttcgtcgacatggcctaccagggcttcggcgatggcctggacgacgacgcctatgccgtgcgggccatcgccgaggcgggcgtgacctgtgtggtggccaactcgttctcgaagaatttctcgctgtacggcgagcgctgcggcgggctgagcgtggtgtgcgaaaccgccgagcaggctggctgcgtgctgggccagctgaccagcaccatccgcgccatctacagcaacccgcctacccatggcgcgcgcatcgtcgcccaggtgctgggcacgccggcgctgcggcaatcgtgggaggccgagctgggcgccatgcgcgagcgtatccaggcgatgcggcgcgccatccatgacggcctggccggccgcgtcgagccgcgcatgctgcagcgctacctgtcgcagcgcggcatgttcacctacaccggcctgggcgccgagcaggtcgagaccttgcggcgcgaccagggcgtgtatctgctgcgctcgggccgcatgtgcgtggcgggcctgaaccgcgacaacgtggcggtggccgccgacgccatcgccagcgtgctggcgcgcggctag

SEQ ID NO: 90728 - protein, 399 aa, Bordetella bronchiseptica RB50
MFEHVQAYPGDPILSLNEDFQKDPRAGKVNLTIGIYFDEAGRIPVMAAAREAEAALLADIGPRPYLPMAGLPAYRDLVQELVFGAGSAARRAGRIATVQTLGGSGALKVGADFLKRYFPKSEVWVSDPSWENHRTIFEGAGFAVHTYPYYDDASGGLRFDEMLATVGGLPAGSVVLLHACCHNPTGVDLDRAQWDALIPVLRERGLIAFVDMAYQGFGDGLDDDAYAVRAIAEAGVTCVVANSFSKNFSLYGERCGGLSVVCETAEQAGCVLGQLTSTIRAIYSNPPTHGARIVAQVLGTPALRQSWEAELGAMRERIQAMRRAIHDGLAGRVEPRMLQRYLSQRGMFTYTGLGAEQVETLRRDQGVYLLRSGRMCVAGLNRDNVAVAADAIASVLARG

SEQ ID NO: 90729 - DNA, 1194 bp, Chromobacterium violaceum ATCC 12472
  CDS (1)..(1194): transl_table=11
gtgttccaacatgtagacgcctacgccggcgatcccatcctgtcgctggtggaagctttcggcaaagacccgcgcgagcagaaggtcaacctcagcatcggcctgtattacgacgaggcaggccgcatcccgcggctgaaggcggtggagcaggccgaggcgctgctggccagccagccgcagccgccgtgcacctatctgccgatggacggcatgccggcttaccgcagcgccatccagacgctactattcggcgccgagcatccggcggtgaaagacggccgcatcgccacgctgcagacgctgggcggctccggcgcgctgaaagtgggcgccgacttcctcaagcgctatttcccggcatccggcgtctgggtcagcgacccgacctgggacaaccacgtcgccatcttcgaaggcgcgggcctggccgtggagcgctacccgtatttcgacccggccacccgcggcgtggatttcccggccatgctggccaagctgcagacgctgccggccaagagcatcgtgctgctgcacccgtgttgccacaaccccaccggcgcggacctcaccgacgcgcagtgggaccaggtggtggaagtggccaaggcgcgccagctgattcccttcctggacattgcctaccagggcttcggcgccggtctggaggaagacgcctacgccatccgcgcgatggcagacgccggcatcgccttcctggtcagcaactccttctccaagatcttctcgttgtacggcgaacgctgcggcggcctgtccgtggtgtgcgaaaccgccgccgaggcggcgctggtgtccggccagctcaaggccaccgtgcgccgcaactactccagcccgccgacgcacggcgccagggtgatcgccaccgtgctgaacgatccggagctgaaggcgctgtgggtgtccgaggtgaacgagatgcgcgagcgcatccaggcgatgcgcggcgtgctggtgcaagtgctgaaggaagcgctgcccgagcgcgacttcggctacctggtgaaccagcgcggcatgttcagctacaccggcttcagccaggcgcaggtggacaagctgcgcgagcagttcgccgtctacctggtgggcagcggccgcatgtgcgtggccggcctcaacgccgccaacgcgccctacgtggcccaggccttcgcccaggtgcagtaa

SEQ ID NO: 90730 - protein, 397 aa, Chromobacterium violaceum ATCC 12472
MFQHVDAYAGDPILSLVEAFGKDPREQKVNLSIGLYYDEAGRIPRLKAVEQAEALLASQPQPPCTYLPMDGMPAYRSAIQTLLFGAEHPAVKDGRIATLQTLGGSGALKVGADFLKRYFPASGVWVSDPTWDNHVAIFEGAGLAVERYPYFDPATRGVDFPAMLAKLQTLPAKSIVLLHPCCHNPTGADLTDAQWDQVVEVAKARQLIPFLDIAYQGFGAGLEEDAYAIRAMADAGIAFLVSNSFSKIFSLYGERCGGLSVVCETAAEAALVSGQLKATVRRNYSSPPTHGARVIATVLNDPELKALWVSEVNEMRERIQAMRGVLVQVLKEALPERDFGYLVNQRGMFSYTGFSQAQVDKLREQFAVYLVGSGRMCVAGLNAANAPYVAQAFAQVQ

SEQ ID NO: 90731 - DNA, 1209 bp, Chromobacterium violaceum ATCC 12472; identical to SEQ ID NO: 66467
  CDS (1)..(1209): transl_table=11

SEQ ID NO: 90732 - protein, 402 aa, Chromobacterium violaceum ATCC 12472; identical to SEQ ID NO: 66468

SEQ ID NO: 90733 - DNA, 1191 bp, Photorhabdus luminescens subsp. laumondii TTO1
  CDS (1)..(1191): transl_table=11
atgtttgagaaaatcaccgcagcgcctgccgaccctattcttggcttagccgatagtttccgttctgatcctcgtacaaataaaatcaaccttggtatcggtgtctataaagacgaaacaggaaaaaccccggttctgaccagtgttaaaaaagctgaacaatatttactggaaaacgaaacaacaaagaattatctgccgattagcggcttagccgaatttggccgcgtaactcaagaattactgtttggcaaagatcacccagttgtcacagataaacgcgcccgcacagcacaaagcccaggcggtaccggtgctttacgtattgctgcggatttcattgccaaacagactaatgctaaacgagtttggatcagcaacccaacctggccaaaccataaaaacgttttttccgccgctggtctggaagtctgtgaatataaatactatgacgctgaaaaacacgcgctgaatttcgaagacatgctggcaagcctgtccgaagctcaggctggtgatgttgttctgttccacggctgctgccacaatccgacaggcatcgatccaaccccggcacaatgggctaaactggcagaaatgtctgcggagaaaggctggttgcctatttttgatttcgcttaccaaggatttgccaagggcctaaacgaagatgcagagggcctacgtatttttgcgaaaaatcataatgaactgattgttgccagctcttactccaaaaactttggcctgtacaatgaacgtgtcggtgcctgtactattgttgctagtgacagtgatacagcagaaaaagcgttcagccaagctaaagcgattatccgtgctaactattccaacccacccgctcatggtgcatctattgtcactaccattttgtcaaatgaagacctgaaagcagcttgggaacaggaactgaccaccatgcgcgaacgtatccagcgtatgcgtcaactgtttgtcaataccttgcaggaaaaaggggcaaaacaggatttcagctttattattagccaaaatggtatgttctcattcagtggcctgacaaaagaacaagtagaacgtctgcgtgatgagtttggtatatacgctgtcagttccggtcgtattaacgtcgctggcttgacgttagaaaacatggctccactatgtgaagccattgttgcagtactctaa

SEQ ID NO: 90734 - protein, 396 aa, Photorhabdus luminescens subsp. laumondii TTO1
MFEKITAAPADPILGLADSFRSDPRTNKINLGIGVYKDETGKTPVLTSVKKAEQYLLENETTKNYLPISGLAEFGRVTQELLFGKDHPVVTDKRARTAQSPGGTGALRIAADFIAKQTNAKRVWISNPTWPNHKNVFSAAGLEVCEYKYYDAEKHALNFEDMLASLSEAQAGDVVLFHGCCHNPTGIDPTPAQWAKLAEMSAEKGWLPIFDFAYQGFAKGLNEDAEGLRIFAKNHNELIVASSYSKNFGLYNERVGACTIVASDSDTAEKAFSQAKAIIRANYSNPPAHGASIVTTILSNEDLKAAWEQELTTMRERIQRMRQLFVNTLQEKGAKQDFSFIISQNGMFSFSGLTKEQVERLRDEFGIYAVSSGRINVAGLTLENMAPLCEAIVAVL

SEQ ID NO: 90735 - DNA, 1272 bp, Strongylocentrotus purpuratus; identical to SEQ ID NO: 66471
  CDS (1)..(1272)

SEQ ID NO: 90736 - protein, 423 aa, Strongylocentrotus purpuratus; identical to SEQ ID NO: 66472

SEQ ID NO: 90737 - DNA, 1290 bp, Strongylocentrotus purpuratus; identical to SEQ ID NO: 66473
  CDS (1)..(1290)

SEQ ID NO: 90738 - protein, 429 aa, Strongylocentrotus purpuratus; identical to SEQ ID NO: 66474

SEQ ID NO: 90739 - DNA, 1299 bp, Strongylocentrotus purpuratus; identical to SEQ ID NO: 66475
  CDS (1)..(1299)

SEQ ID NO: 90740 - protein, 432 aa, Strongylocentrotus purpuratus; identical to SEQ ID NO: 66476

SEQ ID NO: 90741 - DNA, 1221 bp, Nasonia vitripennis; identical to SEQ ID NO: 66477
  CDS (1)..(1221)

SEQ ID NO: 90742 - protein, 406 aa, Nasonia vitripennis; identical to SEQ ID NO: 66478

SEQ ID NO: 90743 - DNA, 1293 bp, Anopheles gambiae str. PEST; identical to SEQ ID NO: 66481
  CDS (1)..(1293)

SEQ ID NO: 90744 - protein, 430 aa, Anopheles gambiae str. PEST; identical to SEQ ID NO: 66482

SEQ ID NO: 90745 - DNA, 1374 bp, Magnaporthe grisea 70-15; identical to SEQ ID NO: 66485
  CDS (1)..(1374)

SEQ ID NO: 90746 - protein, 457 aa, Magnaporthe grisea 70-15; identical to SEQ ID NO: 66486

SEQ ID NO: 90747 - DNA, 1272 bp, Magnaporthe grisea 70-15
  CDS (1)..(1272)
atgctttcaaccatgagaattgcctcgcggcaggtcgccggtaggcggatggctgtccgccctcttgctgctttgcgcccagcttcaacttgggccaacgtccagatgggccctccagtacgtatcactgaagctttcaaggccgacagcaacaacaagaagatcaacctcggtgttggcgcctaccgcgatgacgctggcaagccctacgtgctgccgtcagtcaggcaagccgaggagaaggttattgcagctcgcatgaacaaggagtacgccggaatcactggtgtgcctgaattcacttcaggagctcttaccctggcctacggcaaggactcgaccgccctcgaccgcactgccatcacccagtccatttctggcactggtgctctgcgcatcggcgccgagttcctttccaagttctaccctggcgcgaagaacatctacatccccaccccgtcatgggccaaccacggcgccgtcttcacacaggccggcctgaaggttgagaagtaccgctactacaacaaggacaccatcggcctcgactttgagggtctggtcgccgacgtcaaggccgcacccaagggctccatcttcctcttccacgcctgcgcccacaaccccaccggtgtcgaccctactcctgagcagtggcgcgagattgagactgtcgtcaagtcggccggtcactacgccttcttcgacatggcttaccagggattcgcttcaggtgacatccacaaggacgcttttgcgctgcgccacttcgtcgcccagggtcacaacgtctgcttggcccagtccttcgccaagaacatgggtctgtacggcgagcgcgtcggtgctttctccatcgtgtgcgactcggccgaggagaagaagcgcgttgactcgcagctcaagatcctcgtgcgccccatgtactcgaaccccccaatccacggtgccaggatcgccgcccagatcctcaacaccccggccctctacgaccagtggctggctgaggtcaagggcatggctgaccgcatcattaccatgagggctctgcttaaggagaaccttgagaagctcggcagcaagcacgactggtcccacatcaccagccagattggcatgttcgcctacaccggtctgacccccgagcagatggagcagctcgccaagagccactcggtctacgccaccaaggacggccgtatctcggtcgctggtatcaccagcgagaacgttggccgtcttgctgaggctatcttcaagatcaagggttag

SEQ ID NO: 90748 - protein, 423 aa, Magnaporthe grisea 70-15
MLSTMRIASRQVAGRRMAVRPLAALRPASTWANVQMGPPVRITEAFKADSNNKKINLGVGAYRDDAGKPYVLPSVRQAEEKVIAARMNKEYAGITGVPEFTSGALTLAYGKDSTALDRTAITQSISGTGALRIGAEFLSKFYPGAKNIYIPTPSWANHGAVFTQAGLKVEKYRYYNKDTIGLDFEGLVADVKAAPKGSIFLFHACAHNPTGVDPTPEQWREIETVVKSAGHYAFFDMAYQGFASGDIHKDAFALRHFVAQGHNVCLAQSFAKNMGLYGERVGAFSIVCDSAEEKKRVDSQLKILVRPMYSNPPIHGARIAAQILNTPALYDQWLAEVKGMADRIITMRALLKENLEKLGSKHDWSHITSQIGMFAYTGLTPEQMEQLAKSHSVYATKDGRISVAGITSENVGRLAEAIFKIKG

SEQ ID NO: 90749 - DNA, 1245 bp, Gibberella zeae PH-1; identical to SEQ ID NO: 66491
  CDS (1)..(1245)

SEQ ID NO: 90750 - protein, 414 aa, Gibberella zeae PH-1; identical to SEQ ID NO: 66492

SEQ ID NO: 90751 - DNA, 1275 bp, Gibberella zeae PH-1; identical to SEQ ID NO: 66493
  CDS (1)..(1275)

SEQ ID NO: 90752 - protein, 424 aa, Gibberella zeae PH-1; identical to SEQ ID NO: 66494

SEQ ID NO: 90753 - DNA, 1272 bp, Gibberella zeae PH-1; identical to SEQ ID NO: 66495
  CDS (1)..(1272)

SEQ ID NO: 90754 - protein, 423 aa, Gibberella zeae PH-1; identical to SEQ ID NO: 66496

SEQ ID NO: 90755 - DNA, 1290 bp, Apis mellifera; identical to SEQ ID NO: 66497
  CDS (1)..(1290)

SEQ ID NO: 90756 - protein, 429 aa, Apis mellifera; identical to SEQ ID NO: 66498

SEQ ID NO: 90757 - DNA, 1257 bp, Candida glabrata CBS 138; identical to SEQ ID NO: 66499
  CDS (1)..(1257)

SEQ ID NO: 90758 - protein, 418 aa, Candida glabrata CBS 138; identical to SEQ ID NO: 66500

SEQ ID NO: 90759 - DNA, 1260 bp, Candida glabrata CBS 138; identical to SEQ ID NO: 66501
  CDS (1)..(1260)

SEQ ID NO: 90760 - protein, 419 aa, Candida glabrata CBS 138; identical to SEQ ID NO: 66502

SEQ ID NO: 90761 - DNA, 1362 bp, Candida glabrata CBS 138; identical to SEQ ID NO: 66503
  CDS (1)..(1362)

SEQ ID NO: 90762 - protein, 453 aa, Candida glabrata CBS 138; identical to SEQ ID NO: 66504

SEQ ID NO: 90763 - DNA, 1257 bp, Kluyveromyces lactis NRRL Y-1140; identical to SEQ ID NO: 66505
  CDS (1)..(1257)

SEQ ID NO: 90764 - protein, 418 aa, Kluyveromyces lactis NRRL Y-1140; identical to SEQ ID NO: 66506

SEQ ID NO: 90765 - DNA, 1266 bp, Kluyveromyces lactis NRRL Y-1140; identical to SEQ ID NO: 66507
  CDS (1)..(1266)

SEQ ID NO: 90766 - protein, 421 aa, Kluyveromyces lactis NRRL Y-1140; identical to SEQ ID NO: 66508

SEQ ID NO: 90767 - DNA, 1212 bp, Debaryomyces hansenii CBS767
  CDS (1)..(1212)
atggtacaatacgaatttttcggagatttaactctagctcccaaagatgaaatgaatgatcttaagataaaacttgaaaattgtcaatccagtaaggttgatgtttccgcaggagtatatagaggggagaatggtgagtcgtatacattatcatcagtaaaagcagctaaaggagtattacatgcaaatgatcccgggcatgactataattttaccctaggtatcaaaaacttcaacctgatggctgctgatatcatatttgggaaagatatttctactggtggatatattgctacatgtcaaacaatatctggaaccggtgcttgcagtatagctattaaatttctagtggactgctgcaaacttaccaatttctatattggaacaccaacttggcccaattacgctccaatgattaaagcagccaatgctgaagtcgtggaatatgttcattacaatccgttgacaagaagtcttgattttgaaagcgttttagaagccatttctaaagctaagatgcattcagtattcatcctacaattatgttgtcataatcccaccggtactgatttttcaatagatcagtggaaaattttggctgataaaatgcaagaaaaaaaaatcatgccagtgtttgattctgcctatcaagggtttggttcaggtgacattgcggtggacgcaaaacctattagattatactatgctaaaggattgcaatttttggtctgtcaatcattctccaaaaacttggggttatatagcgaaagggttggtgcacttcacgtcgtagtatgtgaaaaaaaattagctgaaattgtctctgatcaattaagaagtatattcagaagagagtgttcaagtgcgccagcttatggggctaggttggctgtcattatagcaaacgacccaaaattaactgaacaatggagaaacgatttaagaacaatctataagagactagttgataaaagaattgagcttcatgatttattgataaagtatcaaactccaggcagcttcgatcatttgttaaatcagaatggtttattttggttcagtggtttgtctaaggtccaatgtaaattattggttgaagaatatcatatctttattccttcgaatggtcgcgttaatatagccggtttaaataatagtaatattcattactttgcgaaatcattttccgaagtaatcaagatctcagtatag

SEQ ID NO: 90768 - protein, 403 aa, Debaryomyces hansenii CBS767
MVQYEFFGDLTLAPKDEMNDLKIKLENCQSSKVDVSAGVYRGENGESYTLSSVKAAKGVLHANDPGHDYNFTLGIKNFNLMAADIIFGKDISTGGYIATCQTISGTGACSIAIKFLVDCCKLTNFYIGTPTWPNYAPMIKAANAEVVEYVHYNPLTRSLDFESVLEAISKAKMHSVFILQLCCHNPTGTDFSIDQWKILADKMQEKKIMPVFDSAYQGFGSGDIAVDAKPIRLYYAKGLQFLVCQSFSKNLGLYSERVGALHVVVCEKKLAEIVSDQLRSIFRRECSSAPAYGARLAVIIANDPKLTEQWRNDLRTIYKRLVDKRIELHDLLIKYQTPGSFDHLLNQNGLFWFSGLSKVQCKLLVEEYHIFIPSNGRVNIAGLNNSNIHYFAKSFSEVIKISV

SEQ ID NO: 90769 - DNA, 1221 bp, Debaryomyces hansenii CBS767; identical to SEQ ID NO: 66509
  CDS (1)..(1221)

SEQ ID NO: 90770 - protein, 406 aa, Debaryomyces hansenii CBS767; identical to SEQ ID NO: 66510

SEQ ID NO: 90771 - DNA, 1296 bp, Debaryomyces hansenii CBS767; identical to SEQ ID NO: 66511
  CDS (1)..(1296)

SEQ ID NO: 90772 - protein, 431 aa, Debaryomyces hansenii CBS767; identical to SEQ ID NO: 66512

SEQ ID NO: 90773 - DNA, 1263 bp, Debaryomyces hansenii CBS767; identical to SEQ ID NO: 66513
  CDS (1)..(1263)

SEQ ID NO: 90774 - protein, 420 aa, Debaryomyces hansenii CBS767; identical to SEQ ID NO: 66514

SEQ ID NO: 90775 - DNA, 1302 bp, Yarrowia lipolytica CLIB122; identical to SEQ ID NO: 66515
  CDS (1)..(1302)

SEQ ID NO: 90776 - protein, 433 aa, Yarrowia lipolytica CLIB122; identical to SEQ ID NO: 66516

SEQ ID NO: 90777 - DNA, 1290 bp, Aspergillus nidulans FGSC A4; identical to SEQ ID NO: 66517
  CDS (1)..(1290)

SEQ ID NO: 90778 - protein, 429 aa, Aspergillus nidulans FGSC A4; identical to SEQ ID NO: 66518

SEQ ID NO: 90779 - DNA, 1338 bp, Aspergillus nidulans FGSC A4; identical to SEQ ID NO: 66519
  CDS (1)..(1338)

SEQ ID NO: 90780 - protein, 445 aa, Aspergillus nidulans FGSC A4; identical to SEQ ID NO: 66520

SEQ ID NO: 90781 - DNA, 1251 bp, Aspergillus nidulans FGSC A4; identical to SEQ ID NO: 66521
  CDS (1)..(1251)

SEQ ID NO: 90782 - protein, 416 aa, Aspergillus nidulans FGSC A4; identical to SEQ ID NO: 66522

SEQ ID NO: 90783 - DNA, 1251 bp, Candida albicans SC5314; identical to SEQ ID NO: 66523
  CDS (1)..(1251): transl_table=12

SEQ ID NO: 90784 - protein, 416 aa, Candida albicans SC5314; identical to SEQ ID NO: 66524

SEQ ID NO: 90785 - DNA, 1314 bp, Candida albicans SC5314; identical to SEQ ID NO: 66525
  CDS (1)..(1314): transl_table=12

SEQ ID NO: 90786 - protein, 437 aa, Candida albicans SC5314; identical to SEQ ID NO: 66526

SEQ ID NO: 90787 - DNA, 1314 bp, Candida albicans SC5314; identical to SEQ ID NO: 66527
  CDS (1)..(1314): transl_table=12

SEQ ID NO: 90788 - protein, 437 aa, Candida albicans SC5314; identical to SEQ ID NO: 66528

SEQ ID NO: 90789 - DNA, 1302 bp, Ustilago maydis 521; identical to SEQ ID NO: 66529
  CDS (1)..(1302)

SEQ ID NO: 90790 - protein, 433 aa, Ustilago maydis 521; identical to SEQ ID NO: 66530

SEQ ID NO: 90791 - DNA, 1269 bp, Ustilago maydis 521; identical to SEQ ID NO: 66531
  CDS (1)..(1269)

SEQ ID NO: 90792 - protein, 422 aa, Ustilago maydis 521; identical to SEQ ID NO: 66532

SEQ ID NO: 90793 - DNA, 1362 bp, Cryptococcus neoformans var. neoformans B-3501A
  CDS (1)..(1362)
atgttaccccgactaggtgcgatacaatcaactactcatcccttcttcttcacaaccacaaaaatgcttgttcactcctcgaaatatctccttgcccggtccgctgccatctccaaggttctccccgccgtcgctgccagacgagccggctctacttggactaacgtccctgctggtcctcctgaccctatccttggtgttactgaaaagttcaaggccgacaagtctcccaagaagatcaatcttggtgtcggtgcttaccgagatggttcgggcaagccttacgtccttcctaccgtaaggaaagccgagaagatcctcgccgaagctatgcaggacaaggaataccttcccatcaccggtctctctgactttactaagctcgctgccgagctcgcgtatggcaaggactctaagccgctcgtcgagaatcgacttgcaatcacccagtctatctccggtactggtgctctccgaatcggtactgccttccttgccaggtggttccccggcgcaaagtccatatatcttcccactcctacttggggtaatcatattcccattgctaaggactctggtttggaggtcaagcagtacaaatactttgacaaaaaaaccgtcggccttgactttgaaggtatgaaggccgacattaaggccgctcctgagggctccatcgtccttctccacgcttgtgcacacaaccccactggtatcgaccctaccgaggctcagtggaaggagctttctgatattgtcaaggagaagaagcatttccccttctttgacatggcctaccaaggctttgcctctggtgacacactcaaggacgctttcgccgtccgatatttcgtcgagcagggtcaccagctcttgctttgtcaatcttttgccaagaacatgggtctatatggtgaaagagctggggccatctctttcgtctgtgaaagccccgaggagaaggccagggtcgattctcagttgaagattatcattcgacctatgtactccaaccctcccgttcacggcgcgcgtctcgtctctactattcttggctcccccgagctcaccaaggaatggctcgtcgaagtcaagggcatggccgaccgtatcatcgagatgcgtgagcgtctttacaacaagctcgtcgagcttgatacccctggagagtggggccacatcaagtctcagattggcatgttctcattcaccggtctcaagcccgagcaagtcgataagcttgcggagaaggcgtctatctacttgaccagggacggacgtatttccatggcaggattaaactctaacaacgttgattacttcgccgagagcgttagcaaggctgttaagggtacactttaa

SEQ ID NO: 90794 - protein, 453 aa, Cryptococcus neoformans var. neoformans B-3501A
MLPRLGAIQSTTHPFFFTTTKMLVHSSKYLLARSAAISKVLPAVAARRAGSTWTNVPAGPPDPILGVTEKFKADKSPKKINLGVGAYRDGSGKPYVLPTVRKAEKILAEAMQDKEYLPITGLSDFTKLAAELAYGKDSKPLVENRLAITQSISGTGALRIGTAFLARWFPGAKSIYLPTPTWGNHIPIAKDSGLEVKQYKYFDKKTVGLDFEGMKADIKAAPEGSIVLLHACAHNPTGIDPTEAQWKELSDIVKEKKHFPFFDMAYQGFASGDTLKDAFAVRYFVEQGHQLLLCQSFAKNMGLYGERAGAISFVCESPEEKARVDSQLKIIIRPMYSNPPVHGARLVSTILGSPELTKEWLVEVKGMADRIIEMRERLYNKLVELDTPGEWGHIKSQIGMFSFTGLKPEQVDKLAEKASIYLTRDGRISMAGLNSNNVDYFAESVSKAVKGTL

SEQ ID NO: 90795 - DNA, 1251 bp, Cryptococcus neoformans var. neoformans B-3501A; identical to SEQ ID NO: 66611
  CDS (1)..(1251)

SEQ ID NO: 90796 - protein, 416 aa, Cryptococcus neoformans var. neoformans B-3501A; identical to SEQ ID NO: 66612

SEQ ID NO: 90797 - DNA, 1272 bp, Tribolium castaneum; identical to SEQ ID NO: 66533
  CDS (1)..(1272)

SEQ ID NO: 90798 - protein, 423 aa, Tribolium castaneum; identical to SEQ ID NO: 66534

SEQ ID NO: 90799 - DNA, 1218 bp, Tribolium castaneum; identical to SEQ ID NO: 66535
  CDS (1)..(1218)

SEQ ID NO: 90800 - protein, 405 aa, Tribolium castaneum; identical to SEQ ID NO: 66536

SEQ ID NO: 90801 - DNA, 1215 bp, Herminiimonas arsenicoxydans
  CDS (1)..(1215): transl_table=11
atgaacgcacctattcctgcttcgctcctcaacgccatcgaaatggcgccccgtgacccgattcttggcattaccgaggcgtttaacgccgacaagaatccaaataagatcaatctaggtgtcggcgtttacaacgacgacaacggtaaattgccgctgctggaatgcgtacgcaaagccgaagcgcaattgatggaaaaactgtcgccacgcggctacctgcctatcgacggtctggctgcttacgataaagcagtgcaggaactcgtatttggtgccgatagttcagtagtcaaggacaaacgtgcagtgaccgcgcaggcaatcggcggcacaggcgcattgaagctcggcgctgacttcctgaaacgctttgcacctaacgcgcaagtctggatcagcgatccaagttgggaaaaccaccgcgcgctgtttgaatcggccggtttcgtagtcaacaactacccgtactacgacgcagcaacccgcggcgtgaacttcgccggcatgctggacacactcaaatcgattcctagcggctcgatcgttctgttgcacgcttgctgccacaatccaaccggcgccgatctgaacgacgcacaatggctggaagtgttgaatgttgtcacgacacgcggcttgattccattcctcgacatggcttaccagggttttggcgacggcatcgaagccgacggcaaagtcgtacgccagttcgctgaagcaggcggcccggtattcgtatcgaactccttctccaaatcgttctcgctgtacggcgaacgcgttggcgcattgagcatcgtttccagcaacgcagaagaagcatcgcgcgtcctgtcgcaattgaaacgcgtcatccgcaccaactactccaacccgcctatgcacggcggtcaagtcgtcgcaaccgctctggcatcgccagaattgcgcgcactgtgggaagaagagctggccggcatgcgcgtacgcattcgcgaaatgcgtcaagcgtttgtacagaagcttaaagaacaggcccctgcgcacaacttcgatttcgtcaccaaacaacgcggcatgttctcgtactccggcctgaccaaaccgcaagtggatcgtctgcgcgatgagttctcgatttacgctgtcgacaccggccgcatctgcgttgcagcgctgaatacaaaaaacatcgattacgtcattgcggcaatcgcgaaagttctttaa

SEQ ID NO: 90802 - protein, 404 aa, Herminiimonas arsenicoxydans
MNAPIPASLLNAIEMAPRDPILGITEAFNADKNPNKINLGVGVYNDDNGKLPLLECVRKAEAQLMEKLSPRGYLPIDGLAAYDKAVQELVFGADSSVVKDKRAVTAQAIGGTGALKLGADFLKRFAPNAQVWISDPSWENHRALFESAGFVVNNYPYYDAATRGVNFAGMLDTLKSIPSGSIVLLHACCHNPTGADLNDAQWLEVLNVVTTRGLIPFLDMAYQGFGDGIEADGKVVRQFAEAGGPVFVSNSFSKSFSLYGERVGALSIVSSNAEEASRVLSQLKRVIRTNYSNPPMHGGQVVATALASPELRALWEEELAGMRVRIREMRQAFVQKLKEQAPAHNFDFVTKQRGMFSYSGLTKPQVDRLRDEFSIYAVDTGRICVAALNTKNIDYVIAAIAKVL

SEQ ID NO: 90803 - DNA, 1167 bp, Bradyrhizobium sp. ORS278
  CDS (1)..(1167): transl_table=11
atgttcgaacgcctgagccgccagcccgacgatcccctgctcgctttgatcggcatcttcaaagccgatccgcggaccgacaaggtcgatctgggcgtcggggtctaccgcgacgaggccggccactcgccgatctttcgcgcggtgaaggccgccgagcagcggatctgggcgagccaggacagcaaggcctatgtcgctccggaaggcgaccagggcttcctggacctgctgtggacgatggtcggcggcaaggcctcgccggtgcatgccgctggcgtgcagacccccggcggctccggcgcgctgcggctggccgccgacctgatccgccaggcgggcaccggccggatctggctgggcttgccgagctggcccaaccacgccggcatttttgccgcggccgggctcgcgatcgagacctatccctatttcgacgttccgtcgcagaccctgctgctcgacggcatgctcgaggccttgcagcgtgcccagccgggcgatgccgtgctgctgcatgcgtcctgccacaatccgaccggcgccccattgggcgccgcggactgggcgcgcatcaccgacgtgatcgccacgcgtgggctggtgccgctgatcgactccgcctatcagggttttggcgccggatttgagggcgacgtcgccgggctgcgggcgctggtcgcggcgatccccgaggcgctcgtcgcggtgtcctgctcgaagtccttcggcctttatcgcgagcgcaccggcgcgctgtttgccgttgcgggtacgacggccgcagtggagacggcgcgctccaatctcgtcgccatcgcccgcaccagctactcgatgccgccggaccatggctcggcgatcgtcaagaccatcctcggcacacctgagctctacgacgactggcgcgccgagctcgagtcgatgcgccagcgcctcgccagcttgcgccgctcgttcgccgaggcgctcggcggccgctggtcgaactccctggcgatcggcaagcaggaaggcatgttctcgctgctgccgctgacgccggccgaggtgatgaccttgcgagagaagcacggcgtgtacatgccgacctcgggccgcatcaacgtcgccggactgaaactgtcggacgtcacccgcgtcgccggcctgttcaaggcgatctga

SEQ ID NO: 90804 - protein, 388 aa, Bradyrhizobium sp. ORS278
MFERLSRQPDDPLLALIGIFKADPRTDKVDLGVGVYRDEAGHSPIFRAVKAAEQRIWASQDSKAYVAPEGDQGFLDLLWTMVGGKASPVHAAGVQTPGGSGALRLAADLIRQAGTGRIWLGLPSWPNHAGIFAAAGLAIETYPYFDVPSQTLLLDGMLEALQRAQPGDAVLLHASCHNPTGAPLGAADWARITDVIATRGLVPLIDSAYQGFGAGFEGDVAGLRALVAAIPEALVAVSCSKSFGLYRERTGALFAVAGTTAAVETARSNLVAIARTSYSMPPDHGSAIVKTILGTPELYDDWRAELESMRQRLASLRRSFAEALGGRWSNSLAIGKQEGMFSLLPLTPAEVMTLREKHGVYMPTSGRINVAGLKLSDVTRVAGLFKAI

SEQ ID NO: 90805 - DNA, 1221 bp, Candidatus Protochlamydia amoebophila UWE25
  CDS (1)..(1221): transl_table=11
atgtcatttgagataagggatcccatgcctttttttaataatatttctcttttgccaccagacccaattttaaatctttctatagacttctctcttgatcaaaatcctcaaaaaattaatttgagtgcaggaacttataaaactgcagatgggcattcgctagttttcaccagtgtccgaaaagcagaaattgatctgcttcaaaaacatctcaataaagattatcaaccgatagagggaaatagtgttttcctaaaaaattctttagagctgttatttggttcagaccacgctttgtttaccaataaaaaattttttgctgttcaaaccgttggaggaacaagcgctttaagattaggaggagagtttttaaataagcttacttgccaaaaaatttttatttctcaaccatcgtggccaaaccacaaacaggtttttgaaaaaacaggtttaaaaattgattcctatccttacttcgattttaatgcatacaaattaaatttttcagggatgtgccaagccatccgccaaatgccaactggaagcgttatccttctgcatggttgctgtcacaatccatcaggggtcgatccaacttttgaacaatggaaagagctttctcagcttattaaaaaacatgaactcattcctttttttgatatcgcttatcaaggatttgggaaagatttagaactcgatgcacaacctattcggtactttgctagtgaaggccatgaaatgttgatcgcttactctttttctaaaaattttggtttatacggggaacgagtaggttttttgactgttgtgacatctcaacaaaaacaaataccatctatagctagtcaattaaaggttttaattcgtgctaattactccaatcctcctcttcaaggagctcgaattgtttctacaatcttgagttcaccagaattaaccgaagaatggaaaatagaattaaaaaatatgcgtgaccgagttgttgaaatgcggaaaacatttattgcttctttgttagtcaaaggagaagataaaaatttaaactacttgcaacaacaaattggtttatttggtttttgtggattaaattattcccaagtcaatcgtttgcggaaagaatttgctatttatattcctagcgacggacgaatcaatattgcaggattaaacactcaaaatattgaatatgtagtcaatgcaatttcatctgttatggagtag

SEQ ID NO: 90806 - protein, 406 aa, Candidatus Protochlamydia amoebophila UWE25
MSFEIRDPMPFFNNISLLPPDPILNLSIDFSLDQNPQKINLSAGTYKTADGHSLVFTSVRKAEIDLLQKHLNKDYQPIEGNSVFLKNSLELLFGSDHALFTNKKFFAVQTVGGTSALRLGGEFLNKLTCQKIFISQPSWPNHKQVFEKTGLKIDSYPYFDFNAYKLNFSGMCQAIRQMPTGSVILLHGCCHNPSGVDPTFEQWKELSQLIKKHELIPFFDIAYQGFGKDLELDAQPIRYFASEGHEMLIAYSFSKNFGLYGERVGFLTVVTSQQKQIPSIASQLKVLIRANYSNPPLQGARIVSTILSSPELTEEWKIELKNMRDRVVEMRKTFIASLLVKGEDKNLNYLQQQIGLFGFCGLNYSQVNRLRKEFAIYIPSDGRINIAGLNTQNIEYVVNAISSVME

SEQ ID NO: 90807 - DNA, 1215 bp, Acinetobacter sp. ADP1
  CDS (1)..(1215): transl_table=11
atgtttcaacatatcccaccgtatgcgggcgatccaatcttgtcgcttatggaacaattcaacgccgattcacgcgaagcgaaagttaatttgagcattggtctttattataatgaagacagtattgtgcctcagcttgacagcgtcattgaagcacaaaaacgcattgaaccacgtcaaaacaaggttaagccatacctgccaatggaaggttttaaaccttaccgtgatgcaattcaaaccttgctctttggtcacaatagcccagcagttaaagcagggcgtgccgtgaccattcagacgcttggtggctcaggtgcacttaaagtgggtgcagattttttaaaaaactatttcccagattcagaagtctgggtaagccagccaacctgggataatcatatcgccatttttaatggtgcaggatttaaaacgcatttttatccgtactttgatgcagaaacacgtggtctcgattttgaaggcatgttagcgacattaaaacagcttccaaagcacagcattgtgctactacatccatgctgtcataacccgactggtgttgatctggtaccggcacaatgggatcaggtcattgacgtattaaaagcaggccatctgattcctttcctcgacattgcctatcagggctttggtgatggcatggagcaagatgcttatgcaattcgtgcacttgatcagtctggtcttaattttattgtcagcaattcgttctccaaaatcttttcactgtatggcgaacgtgtaggcgggctcacctttgtttgtgatgatgccgaagcagctcaatgcacttttggccagttaaaagcgactgtacgtcgaatttattctagtccaccgactacaggtgcatggttggtcgatcaggtcttgaatgatgctgaactcagtcaacagtggcaaaatgaagttaaggagatgcgtgaacgtattctcaaaatgcgtatcattttacgtgatgaattgaccaaggctttaccagatcgtgactttaactatctggtcgatcaaaaaggcatgtttagctatacaggtttgactgcagatcaggtcgataccctgcgtgaagattatgccatctatctggttcgtagtggccgtatttgtgttgcgggtttaaacatgaataatgtctatattgtagccaaagcgatggctgaagtattagccaccgaagtgactcctgcttaa

SEQ ID NO: 90808 - protein, 404 aa, Acinetobacter sp. ADP1
MFQHIPPYAGDPILSLMEQFNADSREAKVNLSIGLYYNEDSIVPQLDSVIEAQKRIEPRQNKVKPYLPMEGFKPYRDAIQTLLFGHNSPAVKAGRAVTIQTLGGSGALKVGADFLKNYFPDSEVWVSQPTWDNHIAIFNGAGFKTHFYPYFDAETRGLDFEGMLATLKQLPKHSIVLLHPCCHNPTGVDLVPAQWDQVIDVLKAGHLIPFLDIAYQGFGDGMEQDAYAIRALDQSGLNFIVSNSFSKIFSLYGERVGGLTFVCDDAEAAQCTFGQLKATVRRIYSSPPTTGAWLVDQVLNDAELSQQWQNEVKEMRERILKMRIILRDELTKALPDRDFNYLVDQKGMFSYTGLTADQVDTLREDYAIYLVRSGRICVAGLNMNNVYIVAKAMAEVLATEVTPA

SEQ ID NO: 90809 - DNA, 1191 bp, Erwinia carotovora subsp. atroseptica SCRI1043
  CDS (1)..(1191): transl_table=11
atgtttgaaaatatctctgctgcaccggccgatcctattctcgggctgaccgatcttttccgcgccgatgaccgcgcggataaaatcaatctgggtattggtgtctataaagatgaaaccggcaaaactccggttctgaccagcgtaaaaaaagcagaacactatctgctggaaaatgaaaccaccaaaaactatctgggcattgacggtctgccagcattcggtcagtgcacgcaggaactgctgtttggcaagcagaatgccatcattgccgacaaacgtgctcgtacggcacaaaccccaggcggaaccggtgcgttgcgcgtagccgctgatttcattgcaaatcagacgtcagcaaaacgcatctggatcagtaacccaacctggccaaatcacaataacgtgttctctgctgccggtttggaagtttgccagtatgactattacgatgctgctaaccacgcactggattttgatggtttgctgaatagcctgaacgccgtagaagcgggtgacgtggtgctgtttcacggctgttgtcataacccaaccggtatcgatcctaccgctgagcagtgggctacgctggccgagctgtcggtagcaaaaggctggctgccgctgtttgacttcgcctatcagggctttgcccgtggtatcgaagaagatgcggaaggcctgcgactcttcgctgcgaagcacgctgaactgatcgtatgcagctcgtactctaaaaatttcggtctgtacaatgaacgtgtcggtgcctgtacgctggttgctgctgatgccgcaacagcagacaaggcattcagtcaggtgaaagccgccattcgcgcaaactactctaacccgccgtcacacggcgcgaccattgttgctaccatcttgggcaatgatgcgctgaaggccatttgggagcaggaattgacggcaatgcgggagcgtattcagcgtatgcgtcagctgttcgtgaataccttgcaggaaaaaggcgcacagcaggatttctccttcatcatcaaccagaatgggatgttctcattcagcggcttgaccaaggagcaggttctgcgtctgcgtgacgaattcggcgtttatgcggtgaattctggccgagtcaatgttgcaggaatgacgccagaaaacatggcgccactctgcgaagcgattgttgccgtgctctga

SEQ ID NO: 90810 - protein, 396 aa, Erwinia carotovora subsp. atroseptica SCRI1043
MFENISAAPADPILGLTDLFRADDRADKINLGIGVYKDETGKTPVLTSVKKAEHYLLENETTKNYLGIDGLPAFGQCTQELLFGKQNAIIADKRARTAQTPGGTGALRVAADFIANQTSAKRIWISNPTWPNHNNVFSAAGLEVCQYDYYDAANHALDFDGLLNSLNAVEAGDVVLFHGCCHNPTGIDPTAEQWATLAELSVAKGWLPLFDFAYQGFARGIEEDAEGLRLFAAKHAELIVCSSYSKNFGLYNERVGACTLVAADAATADKAFSQVKAAIRANYSNPPSHGATIVATILGNDALKAIWEQELTAMRERIQRMRQLFVNTLQEKGAQQDFSFIINQNGMFSFSGLTKEQVLRLRDEFGVYAVNSGRVNVAGMTPENMAPLCEAIVAVL

SEQ ID NO: 90811 - DNA, 1194 bp, Erwinia carotovora subsp. atroseptica SCRI1043
  CDS (1)..(1194): transl_table=11
gtgtttcaaaacgttgatacctatgccggagatcctatcctgtctctgatggaaaaattcaaacaggatccaagagcagataagatcaatttgagtatcgggctgtactacaacgagcagaatattatcccgcagttgcgatccgtcagcacagcggaaagcagcctacggcagcctgctcagagcgcgaattcctatctgccgatggaagggttacagccttaccgcacggctatccagcatttgttgttcggtgaaagccacgcggcgctggaagcaggtcgcatcgcgaccatccagacgttgggcggttccggtgcgctgaaagtcggtgcagatttcctgaaacgctacttcccagcgtcagaagtgtgggtcagcgatccaacatgggaaaaccatattgcgatcttcgagggcgcgggctttaacgttcacacctacccgtatttcgatagcgaaagtctgggcgtgaaatttgacgccatgctctccaccctgcaaacgctgccaacacgcagcattgtgctgctacatccgtgctgccataacccgactggttccgatctcaccaccgaacagtgggatcgcgtcattgaggttatcatccagcgtgagctgattccgtttatggacatcgcttatcagggctttggcctcggcatcgagcaggatgcgtatgcaattcgcgccgttgccagcgcaggcgttccggcactgatcgccaactcgttctccaagattttctcactgtatagcgagcgcgtcggtggcctttccgtggtgtgtgacgatgccgacagcgcgcagcgcgtattgggtcagttaaaagcgaccgtacgccgcaactactcttccccaccaaatttcggcgctcaggtggtttctaaagtcctgaacgacgtgcagttgaacgccgactggaaagcggaagtcgaagagatgcgcacgcgtattctaagcatgcgtcaggagttggtttccgcattgaaaaacgcactgccgaaccgcaacgtcgactacctgctcacccagcgcggtatgttcagttacacgggtttcagcccggaacaagttgaccgcctgcgtgaagaatttggcgtgtacctgatcgccagcggccgtatgtgtatggcgggactcaaccacagcaacgtccaacgcgtcgctgccgctttcgccgccattcagtaa

SEQ ID NO: 90812 - protein, 397 aa, Erwinia carotovora subsp. atroseptica SCRI1043
MFQNVDTYAGDPILSLMEKFKQDPRADKINLSIGLYYNEQNIIPQLRSVSTAESSLRQPAQSANSYLPMEGLQPYRTAIQHLLFGESHAALEAGRIATIQTLGGSGALKVGADFLKRYFPASEVWVSDPTWENHIAIFEGAGFNVHTYPYFDSESLGVKFDAMLSTLQTLPTRSIVLLHPCCHNPTGSDLTTEQWDRVIEVIIQRELIPFMDIAYQGFGLGIEQDAYAIRAVASAGVPALIANSFSKIFSLYSERVGGLSVVCDDADSAQRVLGQLKATVRRNYSSPPNFGAQVVSKVLNDVQLNADWKAEVEEMRTRILSMRQELVSALKNALPNRNVDYLLTQRGMFSYTGFSPEQVDRLREEFGVYLIASGRMCMAGLNHSNVQRVAAAFAAIQ

SEQ ID NO: 90813 - DNA, 1197 bp, Desulfotalea psychrophila LSv54
  CDS (1)..(1197): transl_table=11
atgtggcagaatattgaggcagcaccagcggattctattttaggtcttaccgaggcctttcgtaatgaccccaatcctgcaaaggtaaatcttggcgttggcatttataaggatgaacagggagcaacccctattttacagtgtgtgaagaatgctgaagctcggttgattgaaaccgaggaaagcaaggtctatctgcctatatccggtgcccccgcctatacagaaaacgtacagaagctgctctttggtgaagagagtgaagttatcagctcaaaacgggcgatcacagcccatgcccccggtggcacaggtgccctgaggatgggggcggggctgttgaagacatttttccctgaggccaaggtatgggtaagcactcccacctgggccaaccatacgggtatcttttccagcacaggttttgagattgctcactatccatactatgatgagactcaccgtagcgttgattttcaggccatgctgatgagtctgcgggcagtacctgagggtgatattgtccttcttcatgcctgctgtcataatcccaccggtgttgatttgacactggagcagtggcatcaggttgtagccattgctcaagagaggaactggattccctttcttgactttgcctatcagggctttggcgtcggcacctccgaggatcgctgtgccatagagctctgtgccgaggcggggattgatttttttgtcgccagctctttttccaagaactttggtatgtataatgagcgtaccggagcaattaccgtggttgctgcaaatcaagcaagtgcggctgtggccctcagtcatctgaagaagaccatccgggttgtctactctaatcctccagcccatggtggcctggtggcagctactattttgagtgaccctgaactctatgatctctggcagcaggagctgcaggatatgcgcgagcgcatcatcgccatgcgcgttgctctggtagagggcttgagttcacgcggggttgatcaggatttcagctttattaccgagcagtctggtatgttctcttttagtggtctctccgatgagattgttgcctggcttcgtaaggagaagagtatctatgtggtgggtggtggtcggattaatcttgctggtcttactgccagcaatatagactatgtctgtgatgccattgccgaggctcttaagtcgtag

SEQ ID NO: 90814 - protein, 398 aa, Desulfotalea psychrophila LSv54
MWQNIEAAPADSILGLTEAFRNDPNPAKVNLGVGIYKDEQGATPILQCVKNAEARLIETEESKVYLPISGAPAYTENVQKLLFGEESEVISSKRAITAHAPGGTGALRMGAGLLKTFFPEAKVWVSTPTWANHTGIFSSTGFEIAHYPYYDETHRSVDFQAMLMSLRAVPEGDIVLLHACCHNPTGVDLTLEQWHQVVAIAQERNWIPFLDFAYQGFGVGTSEDRCAIELCAEAGIDFFVASSFSKNFGMYNERTGAITVVAANQASAAVALSHLKKTIRVVYSNPPAHGGLVAATILSDPELYDLWQQELQDMRERIIAMRVALVEGLSSRGVDQDFSFITEQSGMFSFSGLSDEIVAWLRKEKSIYVVGGGRINLAGLTASNIDYVCDAIAEALKS

SEQ ID NO: 90815 - DNA, 1194 bp, Yersinia pseudotuberculosis IP 32953
  CDS (1)..(1194): transl_table=11
gtgttccagaatgttgacgcctacgcaggtgaccccatcctttcactgatggaaagttttaaagccgataaccgggcacataaggtgaatctgagtattgggctttattacaatgaacaaggtgaaatcccgcaaatgcaggctgtggatgctgccgaagcgcaattgagtgctcaacctcatgggacaccggtttatttaccgatggaaggtctgcaatcttaccgtactgctatccagcaattattatttggtcacgaccatccaatgctggttcagcaacgggtggcgacaatacagacggtgggcggttctggtgcgttgaaagtcggggctgatttccttaatcactatttccctgattcacaggtgtgggtcagcgatcctacctgggaaaaccacgtggctatttttagcggcgcaggttttaaagtgaacacctatccgtatttcgacaatgataagctggcggtgaagtttgacccgatgctggcaaccttgcagcaattgcccgccagaagcatcgtgttgttacatccttgctgccacaatccaaccggttctgatctgaccaatgcccaatgggatcgcctcattgatgtggtaaaagagcgtgaactgatcccgttcctggatatagcgtaccaaggctttggggcagggctgaatgaagatgcttatgctatccgcgctatggccgcagctggattgccatgcctcatcagcaactccttctcaaaaatcttctcgctctataacgagcgggtcggtggtttatctgtggtgtgtgaaagtgacgaggccgcagggcgtgtattgggccaattgaaagcgacagtgcgccgtaactattccagcccgccaaactttggtgcgcaggtcgtttcgaaagtcctaaatgatacggtattgcgcgcgcaatggcaggcagaggtggaacagatgcgcctacggatccttgatatgcgccacacgctggtggaagccttaaaagcctcgttaccagagcgcaattttgattatctgttgcaacaacgcggcatgttcagctacaccggctttagtgaggcacaggtagatcgcttacgtgaagagtttggtgtgtatctgattgcgagcggaagaatgtgtatggcgggagtcaatcaccagaatgttgagcaggttgcggttgcttttgcggcggtacagtaa

SEQ ID NO: 90816 - protein, 397 aa, Yersinia pseudotuberculosis IP 32953
MFQNVDAYAGDPILSLMESFKADNRAHKVNLSIGLYYNEQGEIPQMQAVDAAEAQLSAQPHGTPVYLPMEGLQSYRTAIQQLLFGHDHPMLVQQRVATIQTVGGSGALKVGADFLNHYFPDSQVWVSDPTWENHVAIFSGAGFKVNTYPYFDNDKLAVKFDPMLATLQQLPARSIVLLHPCCHNPTGSDLTNAQWDRLIDVVKERELIPFLDIAYQGFGAGLNEDAYAIRAMAAAGLPCLISNSFSKIFSLYNERVGGLSVVCESDEAAGRVLGQLKATVRRNYSSPPNFGAQVVSKVLNDTVLRAQWQAEVEQMRLRILDMRHTLVEALKASLPERNFDYLLQQRGMFSYTGFSEAQVDRLREEFGVYLIASGRMCMAGVNHQNVEQVAVAFAAVQ

SEQ ID NO: 90817 - DNA, 1263 bp, Mannheimia succiniciproducens MBEL55E
  CDS (1)..(1263): transl_table=11
ttgcaaattacaatccttgtgagtataaaagaaaaactcatatcaaagcacaacatttctaaggaaagccctatgtttaaaaatatcactccggcacctgccgacccgattttaggtttaggtgaagccttcaaagcggaaaccagagaaaataaaatcaatttaggtattggcgtttataaagatgcggacggtgtaacgcctattatgactgcagtaaaaaaagcggaaggccagttatttgaaaacgaaaaagataaaaactacctgcctatagagggtgttgcggaatataacgcttatgcaaaagaattgttattcggtaaagattcggaaattatcgcatcaaaccgagcctgcacggtgcaaaccttaggcggaaccggcgcattgcgtattgccgcagaatttgtgcgtcgccaaactaaagcacaaaacgtatggatcagcaaaccgacctggccgaatcataatgcgatttttaatgccgtcggcgtaactattcgcgaatatcgttggtacaaccctgaaactaaagccttagactgggataatttactggctgatttaaacaatgccaacccgggggatgtggtgttattgcacggctgctgtcacaacccgaccggtattgacccgacaccggaacaatggaaagcattagccgagatgtcagcgaaaaacggctggttgccgctattcgactttgcttaccaaggtctggcaaacggtttggaagaagatgccgtcggtttacgtactttcgcagaaacccatcgcgaattattagttgccagctcgttctctaaaaatttcggtttatacagcgaacgtgtcggtgcctttacattagttgcggataatgcggatgtggcggcggtagctttaacacagataaaatcaattatccgtacgctgtattctaacccgtccgctcatggcgcccgtaccgttgcaaccgtattggcaaatccggaactgcgcaaagaatgggaagacgaattaacgagtatgcgtgatcgcatcaaacaaatgcgtaagcaactggttgaattacttaaagaattcggtgcacaggaagatttcagctacatcattgatcaaaaaggaatgttctcattcagcggattaaccgccgaacaggttgaccgtttgaaagaagaattcgctatttacgccgttcgttccggcagaatcaatgtggcgggaatcactgaagccaatatccgttaccttgccgaaagcattgtaaaagtactttaa

SEQ ID NO: 90818 - protein, 420 aa, Mannheimia succiniciproducens MBEL55E
MQITILVSIKEKLISKHNISKESPMFKNITPAPADPILGLGEAFKAETRENKINLGIGVYKDADGVTPIMTAVKKAEGQLFENEKDKNYLPIEGVAEYNAYAKELLFGKDSEIIASNRACTVQTLGGTGALRIAAEFVRRQTKAQNVWISKPTWPNHNAIFNAVGVTIREYRWYNPETKALDWDNLLADLNNANPGDVVLLHGCCHNPTGIDPTPEQWKALAEMSAKNGWLPLFDFAYQGLANGLEEDAVGLRTFAETHRELLVASSFSKNFGLYSERVGAFTLVADNADVAAVALTQIKSIIRTLYSNPSAHGARTVATVLANPELRKEWEDELTSMRDRIKQMRKQLVELLKEFGAQEDFSYIIDQKGMFSFSGLTAEQVDRLKEEFAIYAVRSGRINVAGITEANIRYLAESIVKVL

SEQ ID NO: 90819 - DNA, 1218 bp, Burkholderia pseudomallei K96243
  CDS (1)..(1218): transl_table=11
atgttcgaacaccttcccgcccaccccggcgacccgatcctgtcgctgttccaggcgtttcagcgcgatcccgagccgcgcaaggtcaatctgagcatcggcctttactacgacgaaaacggcgccgtgccggtgctcgacagcgtgcgcgcggcggcggcgcggctggccgcgcgggacgacgcccacacgtatctgccgatggaaggcatggccgactaccggcgcgcgctgcaggcgctcgtgttcggcgcgaacagccccgcgctgcgcgagcagcggatcgcgaccgtgcagacggtaggcggctccggcgcgctgcgcctcggcgcggatctgctcaagcgctatttccccgacagcgcgatctggatcggcgatccgacgtgggacaaccaccgcgtgctgttcgccgcagcgggactcgacgtgcatacgtatccgtattacgacgcggcgacgaacggcgtgcgcttcgacgcgatgatggcgacgctcgacacgctgcccgcgcgcgcgatcgtgctgctgcagccgtgctgccacaacccgacgggcatcgatctgtcgcgcgagcagtggcgcgagctcgccgcgctgtgcgagcggcgcgcgctgattgcgtttctcgacatcgcgtatcagggcttcggcgacggcctcgacgacgacgcgtggccgatccgcgcgatggccgatgcggggctgcccgtgtttgtcagccattcgttctcgaagaacttctcgctgtacggcgaacgctgcggcgggctgtcgatcgcatgcgcgaacgaacgcgaggccgcacgggtgctgagccagatccaggcgggcgtgcgccgcgtctattcgagcccgccgctgcacggcgcgcgcctcgtctcgaccgtgctgaacgatccggcgctcgcgcggcaatgggaccgcgacgtcgccgcgatgcgcgcgcgaatcaagcggatgcgcaccgcgctcgccgcgcggctcgcggcgcgcgtgcccggcgcgtcgttcgactatctcgtcgagcagcgcgggatgttcagctacacggggctcgcgccccatgaggtcgacgcgctgcgcgagcacgacggcgtctatctgctgcgctccggccgcgcatgcatcgcggggctgagcgatgcgaacgtcgaccatgtcgcgaacgcgatcgccgcggtgttgaaggcgcggcgagcgcgcgccgcggcgtga

SEQ ID NO: 90820 - protein, 405 aa, Burkholderia pseudomallei K96243
MFEHLPAHPGDPILSLFQAFQRDPEPRKVNLSIGLYYDENGAVPVLDSVRAAAARLAARDDAHTYLPMEGMADYRRALQALVFGANSPALREQRIATVQTVGGSGALRLGADLLKRYFPDSAIWIGDPTWDNHRVLFAAAGLDVHTYPYYDAATNGVRFDAMMATLDTLPARAIVLLQPCCHNPTGIDLSREQWRELAALCERRALIAFLDIAYQGFGDGLDDDAWPIRAMADAGLPVFVSHSFSKNFSLYGERCGGLSIACANEREAARVLSQIQAGVRRVYSSPPLHGARLVSTVLNDPALARQWDRDVAAMRARIKRMRTALAARLAARVPGASFDYLVEQRGMFSYTGLAPHEVDALREHDGVYLLRSGRACIAGLSDANVDHVANAIAAVLKARRARAAA

SEQ ID NO: 90821 - DNA, 1215 bp, Azoarcus sp. EbN1; identical to SEQ ID NO: 66537
  CDS (1)..(1215): transl_table=11

SEQ ID NO: 90822 - protein, 404 aa, Azoarcus sp. EbN1; identical to SEQ ID NO: 66538

SEQ ID NO: 90823 - DNA, 1206 bp, Azoarcus sp. EbN1
  CDS (1)..(1206): transl_table=11
atgccttcgatcttcgccgccgtcgagatggcgcctcgtgacccgattctcggcctgaacgaggccttcaacaccgacacccgcaccgacaaggtcaaccttggtgtcggcgtctattacgacgacaacggcaagattccgctgctggccgcagtgaaggctgccgaaaaggcgcgcctcgaggccatgccgccgcgtggctaccagccgatcgaaggcgctccggcctacaacaacgcggtgcagaacctgctgttcggcaaggattccgcactgattgcaaacggtcaggtggtgacgatacaggcgctcggcggcaccggggcgctgaaagtcggcggcgactacctgaagcggctgaatccggctgcaaccgtctacatttccgatcccagctgggaaaaccaccgcgcgatcttcgagtccgccggtttcgcggtcgacacctacccgtactacgatccggcgacgcgcggcgtgaacttcgcgggcatgaaagcgaagctcggcgaactggctgccggcgccgtcgtcgtgctgcacgcgtgctgccataacccgaccggcgccgacctcaccgaagcgcagtggggcgaagtggtcgaggcctgccgcgcgcgcggcctcgtgcccttcctcgacatggcgtatcagggtttcgccgacggcatcgagccggatgcagtcgcggtgcgcctgttctccgccagcggcctgcagttcttcgtctccagttcgttctcgaagtcgttctcgctgtacggcgagcgcgtcggcgcgctgtcgatcgtcactgcggacaaggacgaagccggtcgcgtcctgtcgcaggtcaagcgcgtcatccgcacgaactactcgaacccgcctacccacggcggcgcagtcgtcgctgccgtgctcaacgcccccgaactgcgccagatgtgggaagacgagctcgccggcatgcgcgatcgcatccgcgcgatgcgcgttggcctggtcgagagcctcaaaggcgccggcgtcgcccaggatttctctttcgtcatcgagcagcgcggcatgttctcctacaccggcctgtccgccgctcaggtcgagcagctgaagaacgagttcggcatctacgcggtgtcgacgggacggatctgcctcgcggcgctgaactcgcgcaatatcggctacgtcgcgaaggcgatcgcgtcggtcgcgaaggcgtga

SEQ ID NO: 90824 - protein, 401 aa, Azoarcus sp. EbN1
MPSIFAAVEMAPRDPILGLNEAFNTDTRTDKVNLGVGVYYDDNGKIPLLAAVKAAEKARLEAMPPRGYQPIEGAPAYNNAVQNLLFGKDSALIANGQVVTIQALGGTGALKVGGDYLKRLNPAATVYISDPSWENHRAIFESAGFAVDTYPYYDPATRGVNFAGMKAKLGELAAGAVVVLHACCHNPTGADLTEAQWGEVVEACRARGLVPFLDMAYQGFADGIEPDAVAVRLFSASGLQFFVSSSFSKSFSLYGERVGALSIVTADKDEAGRVLSQVKRVIRTNYSNPPTHGGAVVAAVLNAPELRQMWEDELAGMRDRIRAMRVGLVESLKGAGVAQDFSFVIEQRGMFSYTGLSAAQVEQLKNEFGIYAVSTGRICLAALNSRNIGYVAKAIASVAKA

SEQ ID NO: 90825 - DNA, 1185 bp, Silicibacter pomeroyi DSS-3
  CDS (1)..(1185): transl_table=11
atgttcgaaaacctcaaggcgcagcctgcggacaagatccttgccctgatgcagatgtacaaggacgatccgcgcagcgacaagatcgacctgggcgttggcgtctacaagaacgccgagggcgtgaccccggtgatgcgcgccgtcaaggcggccgaaaagatcgtgtgggagcaacaggagagcaaatcctataccgggctgatcggcgatccggcctattcggatgcgatgatcaagctgatcctgggcgatgcggtgcagcgcgccaatgtcggcgctgcggccacgccgggtggcaccggcgcatgccggcaggcgttcgagctgatcaagatggccagtcccgaggcgcgggttttcgtctcggacccgacctggcccaaccatatctcgatcctgaactacctgggcatgaccatggtgccctatcgctatttcgatgccgacagccgtggcgtcgatttcgagggcatgctggtcgatctgggtcaggcgcgcgcgggcgacgtggtgctgctgcatggctgctgccacaacccgaccggcgccaacctgaacctgagccagtggagagaggtggtgaagctgatcaatgccaagggcctcgtggcgatgatcgacatcgcctatcagggctttggcgacgggctggaggaagatgcgcagggcacccgactggtggcctcgtcggtcaaggaatgcctgatcgcggcgtcctgctccaagaactttggcgtctatcgcgagcgcaccggcctgttgatggcggtcagtcaggacagcggccagaccgcgctgaaccaggcgactttggcgtttctgaaccgtcagaactattccttcccgcccgatcacggcgcgcgggtggtgaccaccatcctgaacgacgacgcgctgcgcgccgactggatggccgagctggaggaaatccgcctgtcgatgctgggtctgcgccagcagctggccgacgagttgcagcgtctgagcggctcggaccggttcagttttatcgcgcagcaccggggcatgttctcgcgtatcggcgcggcgcccgagttggtcgagaagctgcggaccgagttcggcatctacatggtgggcgacagccggatgaatatcgccgggctgaatgcccagacggtgccgatcctggccaaggcgatcatcgacgccgggatctga

SEQ ID NO: 90826 - protein, 394 aa, Silicibacter pomeroyi DSS-3
MFENLKAQPADKILALMQMYKDDPRSDKIDLGVGVYKNAEGVTPVMRAVKAAEKIVWEQQESKSYTGLIGDPAYSDAMIKLILGDAVQRANVGAAATPGGTGACRQAFELIKMASPEARVFVSDPTWPNHISILNYLGMTMVPYRYFDADSRGVDFEGMLVDLGQARAGDVVLLHGCCHNPTGANLNLSQWREVVKLINAKGLVAMIDIAYQGFGDGLEEDAQGTRLVASSVKECLIAASCSKNFGVYRERTGLLMAVSQDSGQTALNQATLAFLNRQNYSFPPDHGARVVTTILNDDALRADWMAELEEIRLSMLGLRQQLADELQRLSGSDRFSFIAQHRGMFSRIGAAPELVEKLRTEFGIYMVGDSRMNIAGLNAQTVPILAKAIIDAGI

SEQ ID NO: 90827 - DNA, 1194 bp, Chlamydophila abortus S26/3
  CDS (1)..(1194): transl_table=11
atgagtttttttcatcaattacccacgtttgctcccgattctattttgggtttgcaaaaactatttttagaagacgagcgagaggagaaggtcaatcttgttataggttcttatgaagatcctaacaaggcttatggtggcttttcgagtgtccgcaaggcgcaattttcattgttagaaaacgagatgaataaagggtacttacctattagtgggttattgtcttttaatcagcaaatggaaagtcttgtttttggtgatgatgtaaatccgagttttgttgttggtgcccaagctctcgggggaacgggagcgttgcatttaggtgctaagattttcgccatggctcacccttctgctgcagtatacattcccgaacagacatggggaaaccatttgagaatatttgctcaacaaggtttagatgttctaaaatatccttattatagttcagaaagtaaaacactcgtttttgatgagatgatttctgtattgaaatctgctcccaagaactctttagtgcttttgcaatgttgttgtcataatcctacaggaatggaccttgacgagaacatgtggactcgtcttgcagaactgatgaaagaacgtcagcttcttcctttttttgatacggcgtatttaggctttgggttaggtatcgaagaagatagaaagcctataaagatttttatagattcagggcatactgtatttgtagccgcatgcgcaagtaagaatttttctctttatggggagcgtgtaggctattttgctgcatatagtcgggttgttgatgatttagataagatttctagctgtctcgaagaaaaaatacgaggagagtattcttcaccacctcgacatggagcgaaaattgtttctacaattttatcagatgcctctttaaaaacagaatggttggcagaattagacacgattcgttgttctttacaaaaaacacgcacgcgatttgttcaggctatgcgcaatcatattggtcattcttttgattttatcctatctcagaaaggattttttggttacccaggattttctttagaacaagtcttatttttaagattagaaaaaggtatttacacaaccagtggagccaggtttaatctcaacggaatcaccgataataacatcgatcatgtagttcagagctttgctgaggcataccaacaagcttag

SEQ ID NO: 90828 - protein, 397 aa, Chlamydophila abortus S26/3
MSFFHQLPTFAPDSILGLQKLFLEDEREEKVNLVIGSYEDPNKAYGGFSSVRKAQFSLLENEMNKGYLPISGLLSFNQQMESLVFGDDVNPSFVVGAQALGGTGALHLGAKIFAMAHPSAAVYIPEQTWGNHLRIFAQQGLDVLKYPYYSSESKTLVFDEMISVLKSAPKNSLVLLQCCCHNPTGMDLDENMWTRLAELMKERQLLPFFDTAYLGFGLGIEEDRKPIKIFIDSGHTVFVAACASKNFSLYGERVGYFAAYSRVVDDLDKISSCLEEKIRGEYSSPPRHGAKIVSTILSDASLKTEWLAELDTIRCSLQKTRTRFVQAMRNHIGHSFDFILSQKGFFGYPGFSLEQVLFLRLEKGIYTTSGARFNLNGITDNNIDHVVQSFAEAYQQA

SEQ ID NO: 90829 - DNA, 1197 bp, Pseudomonas syringae pv. syringae B728a
  CDS (1)..(1197): transl_table=11
atgagcctgttttccgctgtcgaaatggcaccccgcgatccgatcctgggtatcaacgaagccttcaacgccgacacccgcagcaccaaggtcaaccttggcgtaggcgtctactgtgatgaagacgggcgcatccccctgctgcgcgccgtggccgaagccgagaaggtccgcgtggcccagcatgctccgcgcggctacctgccgatcgacggtattgccgcctatgaccaggctgtgcaaaaactgttgctgggcgctgattcgccgctgatcgcctcgggccgcgtgctgaccacccaatcggtcggcggcaccggcgcactgaagatcggtgccgacttcctcaagcagctgctgcccgatgccgtcgtcgccatcagcgacccgagctgggaaaaccaccgtgcgctgttcgaaaccgcaggctttgcggtgcagaactatcgctactacgacgctgccactcacgacgtgaaccgtgccggcatgctcgaagacctgcacaacctgccgaacaactcggtggtggtgttgcatgcctgctgccacaacccgaccggcgtcgacctgagcctggatgactggaagaaagtgctggaagtggtcaaggccaagggccacgtaccgtttctggacatggcctaccaaggcttcggtcagggtattcaggaagatgcgctggcagtgcgcctgtttgccgagtcgggcctgaccttcttcgcctccagctcgttctccaaatcgctgtcgctgtatggcgaacgcgtcggcgcgctgtcgatcatcaccgaatcgaaggaagaaaccactcgcgtcctgtcccaggtcaaacgcgtgatccgtaccaactactccaacccgccgacccacggtgcgatcatctccgctgcggtgcttaacgacccgacgttgcgtgcaatgtgggaagaggaactaggcgaaatgcgtctgcgcatccagggcatgcgcaaggcgatggtcgagcgtctggctgataacccggccggtcaggacttcagcttcgtcgctcgccagtgcggcatgttttcctactccggcctgaccgccgaacaggcccagcgcctgcgcagcgagttcggcatctacgcgctggacaccgggcgtatctgcgtggccgcgctgaatcagaagaacatcgacgtagtgtgtgatgcgatcaagcaggttctttaa

SEQ ID NO: 90830 - protein, 398 aa, Pseudomonas syringae pv. syringae B728a
MSLFSAVEMAPRDPILGINEAFNADTRSTKVNLGVGVYCDEDGRIPLLRAVAEAEKVRVAQHAPRGYLPIDGIAAYDQAVQKLLLGADSPLIASGRVLTTQSVGGTGALKIGADFLKQLLPDAVVAISDPSWENHRALFETAGFAVQNYRYYDAATHDVNRAGMLEDLHNLPNNSVVVLHACCHNPTGVDLSLDDWKKVLEVVKAKGHVPFLDMAYQGFGQGIQEDALAVRLFAESGLTFFASSSFSKSLSLYGERVGALSIITESKEETTRVLSQVKRVIRTNYSNPPTHGAIISAAVLNDPTLRAMWEEELGEMRLRIQGMRKAMVERLADNPAGQDFSFVARQCGMFSYSGLTAEQAQRLRSEFGIYALDTGRICVAALNQKNIDVVCDAIKQVL

SEQ ID NO: 90831 - DNA, 1200 bp, Pseudomonas syringae pv. syringae B728a
  CDS (1)..(1200): transl_table=11
atgctagcccacgtggagtcatacgccggtgatccgatcctttcgctgatggagacctttggcaaggacccgcgtgcggacaaggtcaatctgagcatcggcctgtattacgacgcacagggccgcatcccgcagttggcatgcgtagcaacagcgcaacagcaactggccgaaggcgaacaggcggcgtccgtgtacctgccgatggaaggcctggcggcgtatcggcaggcggtgcaaaccctgttgttcggcgccgatcacccgctggttcaggcaggccgtgtcgccaccattcaaaccgtgggcggctcgggcgcgctgaagataggtgccgatttcctcaaatatgcgtttccggactcgcaggtctgggtgagtgacccgacctgggaaaaccataacgcgctgttcggcggggcgggcttcaaggtcaatgcgtatccgtactttgatgcccagaccggcggcgtcaggttcgagaccatgctcgacacggtgcaggggctgccggcgcagagcatcctcctgctgcacccgtgctgccataacccgaccggtgccgatctgacggtggcgcaatgggaccgcctgatcgaagtgatcaaggatcgtcagctcatcgccttcctggatatcgcctaccagggcttcggcaaaggcatcgacgaagacgtctatgccatccgggcgatggccaacgcaggtatcaccacgctggtcagtaactcgttctcgaaaatcttctcgctgtatggcgagcgggtaggcgggctgtcggtggtctgtgaggacacgacgtcggcggccaatgtgttcggccagctcaaggcaaccgtgcgccgcaactactccagcccgcctgcacatggcgcgtttctggtctcgaaagtgctcaacacgccgcacttgcgcgagcagtggctgggtgaagtcgaggccatgcgcctgcgtatcatcgacatgcgcacgcggctggtcgaggtgctggcgcagaaggtctccggccacgatttcagctttatcctcaggcagaacgggatgttcagctacaccggtctgaccccgcagcaggtcgacgaactgaaagatgttcacggcatttacatgctgcgcagtggccgggtgtgcatggcaggtttgaatgaagggaatatcgacaaggtatgtaacgcaatcgcgagcctcttcgcccgttaa

SEQ ID NO: 90832 - protein, 399 aa, Pseudomonas syringae pv. syringae B728a
MLAHVESYAGDPILSLMETFGKDPRADKVNLSIGLYYDAQGRIPQLACVATAQQQLAEGEQAASVYLPMEGLAAYRQAVQTLLFGADHPLVQAGRVATIQTVGGSGALKIGADFLKYAFPDSQVWVSDPTWENHNALFGGAGFKVNAYPYFDAQTGGVRFETMLDTVQGLPAQSILLLHPCCHNPTGADLTVAQWDRLIEVIKDRQLIAFLDIAYQGFGKGIDEDVYAIRAMANAGITTLVSNSFSKIFSLYGERVGGLSVVCEDTTSAANVFGQLKATVRRNYSSPPAHGAFLVSKVLNTPHLREQWLGEVEAMRLRIIDMRTRLVEVLAQKVSGHDFSFILRQNGMFSYTGLTPQQVDELKDVHGIYMLRSGRVCMAGLNEGNIDKVCNAIASLFAR

SEQ ID NO: 90833 - DNA, 1197 bp, Psychrobacter arcticus 273-4
  CDS (1)..(1197): transl_table=11
atgtttgaacgtatcgattactatgccggcgacccaatcttaggattgatggacaaatttgcagcagataacaacccagataaagtcaatttgggtgtcggtgtgtactatgacgaagatggcaaaatgccagtacttgagtgtgtaaaaacagctgaacagcgtattgcagacccaatctctcctcgtccgtatttgccaatggcaggtttaccaggacatcgcaaaggctgtcaagaattgctgtttggtaaagatgctcaggttttacaagatggcttggttgctactatcgcaaccatcggcggttctggtgcattaaaagtcggcgcagaatttatccacgaatggttcccgcagtctaagtgctatgtcagtgacccaacgtggggcaaccacattgctatttttgaaggctctgacgtcgaagtcggtaaatacccatactacgacaccgctactggtggcatcaaatttgatgagatgatcgcgttttttgagacgttgaataaagatgacgttcttttgcttcacccttgctgtcacaacccaacgggcgttgatttgactcgcgagcaatgggatcaagtactaaacgtcattcaagcgcgtgagctgattccgtttatggatatcgcttatcaaggctttggtgaagatatggacagcgatgcttacgcaattcgtaaagcggttgatatgggtctgccattgtttgttagcaactcattctctaaaaacttatcgctatatggcgagcgtgtcggtggtctatcagtcgtgtgcccaacagtcgatgaaactaaccgtgtttttggtcagctaaactctatggtacgtcgtatctactcaagcccgccatcacatggtggtcgcgtggtcgatatcgtgatgaacgacgaagccttgcatgagcaatgggttggcgaagtatatgcgatgcgtgaccgtatcaaatctatgcgcaccaagctcaaatcagtattagaagaaaaaatctcaggtcgtaactttgattacttgaccgcacaaaacggcatgtttagcttcacaggtctgacgcctgaacaagttgcacagctacaaagcaagtatggtatctatatggtatcgaactcacgtatgtgtgttgccggcttaaacagcagtaatatcgactatattgccaatgccatggttgacgtcttaaaagactaa

SEQ ID NO: 90834 - protein, 398 aa, Psychrobacter arcticus 273-4
MFERIDYYAGDPILGLMDKFAADNNPDKVNLGVGVYYDEDGKMPVLECVKTAEQRIADPISPRPYLPMAGLPGHRKGCQELLFGKDAQVLQDGLVATIATIGGSGALKVGAEFIHEWFPQSKCYVSDPTWGNHIAIFEGSDVEVGKYPYYDTATGGIKFDEMIAFFETLNKDDVLLLHPCCHNPTGVDLTREQWDQVLNVIQARELIPFMDIAYQGFGEDMDSDAYAIRKAVDMGLPLFVSNSFSKNLSLYGERVGGLSVVCPTVDETNRVFGQLNSMVRRIYSSPPSHGGRVVDIVMNDEALHEQWVGEVYAMRDRIKSMRTKLKSVLEEKISGRNFDYLTAQNGMFSFTGLTPEQVAQLQSKYGIYMVSNSRMCVAGLNSSNIDYIANAMVDVLKD

SEQ ID NO: 90835 - DNA, 1191 bp, Colwellia psychrerythraea 34H; identical to SEQ ID NO: 66543
  CDS (1)..(1191): transl_table=11

SEQ ID NO: 90836 - protein, 396 aa, Colwellia psychrerythraea 34H; identical to SEQ ID NO: 66544

SEQ ID NO: 90837 - DNA, 1200 bp, Pseudomonas syringae pv. phaseolicola 1448A
  CDS (1)..(1200): transl_table=11
atgctagcccacgtggagtcatacgctggtgatccgatcctttccctgatggaaacctttggcaaggattcccgtgcggacaaggtcaatctgagcatcggcttgtattacgacgcgcagggccgtatccctcagctggcatgcgtagcaacggcacaacagcaactggcccagggcgagcaggaggcttctgtctatctgccgatggaaggcctggcggcttatcggcatgcagtgcagaccctgttgttcggggcggatcacccgcttgtgcaggcaggacgcgtggcgaccatccagaccgtgggcggctccggcgcgctgaaagtaggtgccgacttcctcaagtatgccttcccggactcgcaggtctgggtcagcgatccgacctgggaaaaccacaacgcgctgttcggtggtgcgggcttcaaggtcaacagctacccgtatttcgacgcgcagactggcggggtcaggttcgaggccatgctcgatacggtgcagcgcctgcctgcgcagagcatccttttgctgcacccttgctgccacaacccgacaggtgccgatctgacagtcgagcaatgggaccggttgatcgaggttatcaaggatcgtcagctcatcgcgtttctggatattgcctatcagggctttggcaaaggcattgatgaggatgcctatgccatccgcgcaatggccaacgcaggtgttacaacgctggtcagtaactcgttctcgaaaatcttctcgctgtacggcgagcgggtcggcgggctgtcggtcgtctgcgaagacaccgcgtcggctgccaacgtattcggccagctgaaggccactgtacgtcgcaactactccagcccgcctgcgcatggcgcctttctggtttcaaaagtgctcaacacgccgcacctgcgcgagcagtggctgagcgaagtcgaggccatgcgcgtgcgcatcatcgacatgcgcacgcggctggttgaggtgctggcgcagaaggtttccggacgtgatttcagctttatcctcaggcagagcgggatgttcagctataccggtctgacgccacagcaggtcgatgaactgaaagacgttcacggcatttacatgctgcgcagtggccgggtgtgcatggcgggcctgaatgaaggcaatatcgacaaggtatgtaacgcaatcgcgagcctcttcacccactaa

SEQ ID NO: 90838 - protein, 399 aa, Pseudomonas syringae pv. phaseolicola 1448A
MLAHVESYAGDPILSLMETFGKDSRADKVNLSIGLYYDAQGRIPQLACVATAQQQLAQGEQEASVYLPMEGLAAYRHAVQTLLFGADHPLVQAGRVATIQTVGGSGALKVGADFLKYAFPDSQVWVSDPTWENHNALFGGAGFKVNSYPYFDAQTGGVRFEAMLDTVQRLPAQSILLLHPCCHNPTGADLTVEQWDRLIEVIKDRQLIAFLDIAYQGFGKGIDEDAYAIRAMANAGVTTLVSNSFSKIFSLYGERVGGLSVVCEDTASAANVFGQLKATVRRNYSSPPAHGAFLVSKVLNTPHLREQWLSEVEAMRVRIIDMRTRLVEVLAQKVSGRDFSFILRQSGMFSYTGLTPQQVDELKDVHGIYMLRSGRVCMAGLNEGNIDKVCNAIASLFTH

SEQ ID NO: 90839 - DNA, 1197 bp, Ralstonia eutropha JMP134; identical to SEQ ID NO: 66545
  CDS (1)..(1197): transl_table=11

SEQ ID NO: 90840 - protein, 398 aa, Ralstonia eutropha JMP134; identical to SEQ ID NO: 66546

SEQ ID NO: 90841 - DNA, 1194 bp, Pseudomonas fluorescens PfO-1
  CDS (1)..(1194): transl_table=11
atgcacttcgacgccatcggccgagtgcccggcgacccgatcctcggtctgatggaggcctacgcgcaggattccaacccgcgcaagttcgaccttggcgtgggcgtctacaaggatgcccagggcctgacgccgatccccgaggcggtgaaaatcgccgaggcgcgtctggtcgagagccaggacaccaagacctacatcggtggccacggcaatccgctgttcggcaaggtcatcaatgagctggtgcttggcgtcgattcgaagctgatcgccgagcaacgcgccggcgccacccaaacgccgggcggtactggcgccctgcgtctggcggcggacttcatcgcccaatgcctgccgggcaagggtgtatggctgagcaacccgacctggccgatccacgaaacgattttcgcggccgccggggtcaagatcagccattacccgtacgtcggcagcgacaaccgcctcgacgtcgatgcgatgctcgccgtgctcaacgaagtgccgaaaggtgatgtggtgctgctgcacgcgtgctgccacaacccgaccggtttcgacctgagccacgacgactggcagcgagtgctggaggtagtacgccgccgtgacctgctgccgctgatcgactttgcctaccagggctttggcgacggtctggagcaggatgcatggtcgacccggctgttcgccgccgagttgcccgagctgctgatcaccagctcctgctcgaagaacttcggtttatatcgcgaccgcaccggtgcgttgatcgtcagcgcgaaaaccgctgacaagctgatcgacatccgcagccagttggcgcacatcgcccgcaacctgtggtcaacgccaccggatcacggcgcggctgtggtcgccacgatcctcgccgacccggagctgaaacgccgctgggccgacgaagtggaagccatgcgtctgcgcatcgcccagttgcgcagcggactggtggaagcgctggaaccgcacggcctgcgcgagcgttttgcgcacatcggcgtgcaacgcgggatgttctcctacaccggactgtcgccggaacaggtgaagaacctgcgtgagcatcacagcgtgtacatggtcagctcgggccgggccaacgttgccgggattgatgcgacgcgtctcgacctgctggccgaagcgatcgccaacgtctgcaaatag

SEQ ID NO: 90842 - protein, 397 aa, Pseudomonas fluorescens PfO-1
MHFDAIGRVPGDPILGLMEAYAQDSNPRKFDLGVGVYKDAQGLTPIPEAVKIAEARLVESQDTKTYIGGHGNPLFGKVINELVLGVDSKLIAEQRAGATQTPGGTGALRLAADFIAQCLPGKGVWLSNPTWPIHETIFAAAGVKISHYPYVGSDNRLDVDAMLAVLNEVPKGDVVLLHACCHNPTGFDLSHDDWQRVLEVVRRRDLLPLIDFAYQGFGDGLEQDAWSTRLFAAELPELLITSSCSKNFGLYRDRTGALIVSAKTADKLIDIRSQLAHIARNLWSTPPDHGAAVVATILADPELKRRWADEVEAMRLRIAQLRSGLVEALEPHGLRERFAHIGVQRGMFSYTGLSPEQVKNLREHHSVYMVSSGRANVAGIDATRLDLLAEAIANVCK

SEQ ID NO: 90843 - DNA, 1185 bp, Rhodobacter sphaeroides 2.4.1
  CDS (1)..(1185): transl_table=11
atgctgaccgccctgaagccgcagcccgcggacaagatcctgcaactgatccagatgttccgcgaggatgcgcgcgcggacaagatcgatctgggcgtgggcgtctacaaggacccgaccgggctcaccccggtcatgcgggccgtgaaggcggccgagaagcggctctgggaggtcgagaccaccaagacctacaccggccttgccgacgagccggcctacaatgccgcgatggcgaagctgatcctcgcgggcgcggtcccggccgaccgggtggcctcggtcgccacccccggcggcacgggcgcggtgcgtcaggcgctcgagctgatccgcatggcctcgcccgaggccaccgtctggatctcgaacccgacctggccgaaccatctgtcgatcgtgaaatatctcggcatcccgatgcgggaataccgctatttcgacgccgagaccggcgccgtcgatgccgagggcatgatggaggatctggcccaggtgaaggcgggcgacgtggtgctgctgcacggctgctgccacaacccgaccggcgccaacccgaacccggtgcagtggctggccatctgcgagagcctggcccggacaggcgcggtgccgctgatcgacctcgcctatcagggcttcggcgacgggctcgagatggatgcggcggcgacgcggcttctggccaccagactgcccgaggtgctgatcgcggcctcctgctcgaagaacttcggcatctaccgcgagcgcacgggcatcctgatcgccatcggcgaggcggcgggccggggcacggtgcaggccaacctcaacttcctgaaccggcagaactactccttcccgccggaccatggcgcgcggctcgtgaccatgatcctcgaggacgagacgctgagcgccgactggaaggcggaactcgaggaggtgcggctcaacatgctgacactgcgccgccagcttgccgatgcgctgcaggccgagaccggctcgaaccgcttcggcttcgtggccgagcatcgcggcatgttctcgcgcctcgggatcacgcccgccgaggtggagcggctgcggaccgagcacggggtctacatggtgggcgattcgcggctgaacatcgcggggctgaaccggacgaccgtgccggtgctggcgcgcgcggtggccaaggtgctgcgcggctga

SEQ ID NO: 90844 - protein, 394 aa, Rhodobacter sphaeroides 2.4.1
MLTALKPQPADKILQLIQMFREDARADKIDLGVGVYKDPTGLTPVMRAVKAAEKRLWEVETTKTYTGLADEPAYNAAMAKLILAGAVPADRVASVATPGGTGAVRQALELIRMASPEATVWISNPTWPNHLSIVKYLGIPMREYRYFDAETGAVDAEGMMEDLAQVKAGDVVLLHGCCHNPTGANPNPVQWLAICESLARTGAVPLIDLAYQGFGDGLEMDAAATRLLATRLPEVLIAASCSKNFGIYRERTGILIAIGEAAGRGTVQANLNFLNRQNYSFPPDHGARLVTMILEDETLSADWKAELEEVRLNMLTLRRQLADALQAETGSNRFGFVAEHRGMFSRLGITPAEVERLRTEHGVYMVGDSRLNIAGLNRTTVPVLARAVAKVLRG

SEQ ID NO: 90845 - DNA, 1200 bp, Burkholderia sp. 383
  CDS (1)..(1200): transl_table=11
atgtcgctcttctccgctgtccagcttgctccccgcgacccgatcctgggcctgaacgaagccttcaacgccgatgcgcgtccgaccaaggtcaacctcggcgtcggtgtgtacacgaacgaagaaggcaagattccgctgctgcgcgcggttcgcgaagcagagaaggtgcgtgtcgacgccggcctgccccgcggctacctgccgatcgacggcatcgctgcctacgacgcggccgtgcagaagctgctgctcggcaacgactcgccgctgatcgcagctggtcgcgtggtcacggcccaggcgctgggcggcacgggcgcactgaagatcggcgccgatttcctgcgcaccgtgaacccgaacgtgaaggtcgcgattagcgatccgagctgggaaaaccaccgcgcgctgttcgaagcagccggtttcgaagtcgttgcgtacccgtattacgacgctgccaccaatggcgtgaacttcgaaggcatgctgtcggcactgaatagctacgcggcaggtacggtcgtcgtgctgcacgcgtgctgccacaacccgaccggcgtggacctgaccgaagcgcaatggcaacaggtcgtcgacgtcgtgaaggcgcgcaacctcgtgccgttcctcgacatggcctaccagggcttcggcgagaacatcgaggccgatgctgctgccgtgcgcctgtttgccgcggctgacctgaacgcattcgtgtcgtcgtcgttctcgaagtcgttctcgctgtatggcgagcgcgtcggcgcactgtcgatcatcacgtcgagcaaggaagaggcgacgcgcgtgctgtcgcaactgaagcgcgtgatccgcacgaactactcgaacccgccgacccatggcggcgccgtggtcgcagcggtgctcgcatcgccggaactgcacgcttcgtgggtgcaggaactcggtgaaatgcgcgatcgtatccgctcgatgcgcaatggtctcgtcgagcgcctgaaggcaagcggcgtcgatcgcgacttcagcttcatcaacgagcagcgcgggatgttctcgtattcgggcctgacctcggcgcaagtcgatcgcctgcgcgacgagttcggcatctacgcagtcggcacgggccggatctgcgtcgcagcactgaacacgcgcaacctcgacgcggtcgccaatgcggtcgcagccgtcctgaagtaa

SEQ ID NO: 90846 - protein, 399 aa, Burkholderia sp. 383
MSLFSAVQLAPRDPILGLNEAFNADARPTKVNLGVGVYTNEEGKIPLLRAVREAEKVRVDAGLPRGYLPIDGIAAYDAAVQKLLLGNDSPLIAAGRVVTAQALGGTGALKIGADFLRTVNPNVKVAISDPSWENHRALFEAAGFEVVAYPYYDAATNGVNFEGMLSALNSYAAGTVVVLHACCHNPTGVDLTEAQWQQVVDVVKARNLVPFLDMAYQGFGENIEADAAAVRLFAAADLNAFVSSSFSKSFSLYGERVGALSIITSSKEEATRVLSQLKRVIRTNYSNPPTHGGAVVAAVLASPELHASWVQELGEMRDRIRSMRNGLVERLKASGVDRDFSFINEQRGMFSYSGLTSAQVDRLRDEFGIYAVGTGRICVAALNTRNLDAVANAVAAVLK

SEQ ID NO: 90847 - DNA, 1203 bp, Burkholderia sp. 383; identical to SEQ ID NO: 66547
  CDS (1)..(1203): transl_table=11

SEQ ID NO: 90848 - protein, 400 aa, Burkholderia sp. 383; identical to SEQ ID NO: 66548

SEQ ID NO: 90849 - DNA, 1203 bp, Burkholderia thailandensis E264
  CDS (1)..(1203): transl_table=11
atgtttgaacatatcgatgcataccccggcgatccgattctcacgctgaacgagaacttccagcaggacccgcgcacacgcaaggtcaacctgagcatcggcatctatttcgacgacgacggcaggattccggtgatgggcgccgtgcgcgaggccgaggccgtcgtgcagcgcgaatccggcccgaagccgtatttgccgatgacggggctcgcggcgtatcgcgacgcggtgcaggcggtcgtgttcggcgagaacagcgacgcgcgcgcggccggacgcatcgcgacggttcagacgctcggcggttcgggcgcgctgaaggtcggcgcggatttcatcaagcgctatttcccgcacgcgcaggtgtggatcagcgatccgagctgggagaaccaccggttcatcttcgagcgcgcgggcttcacggtcaacacgtacccgtactacgacgaggcgacgggcggcctgaagttcgacgcgatgctggccgcgatcgacgcgctgccgaaaaggagcgtcgtgctgctgcatgcgtgctgccacaacccgacgggcgtcgatctcgacgacgcgcagtggctcaagctgatcgacgtgctgcaggcgcgcgagttgctgccgttcgtcgacatggcgtatcagggcttcggcgcggggctcgcggccgacgcgttcgcgatccgcgagctggcgcgccgcgggatgccggcgttcgtcgcgaactcgttctcgaagaatttctcgctgtacggcgagcgcgtcggcgcgctgtcggtgatctgcgaggacgcggcggccgccgcgcgcgtgctcggccagctcgcgggcgcggtgcgctcgaactacagcaacccgccgacgtacggcgcgaagatcgtcgcgcaagtgctgacgacgcccgcgctgcgcgcgcaatgggaagaagagctcgcggcgatgtgccggcgcatcgcgaagatgcgcggcgcgatccacgatggcctgcgcgcgcacgtgcagggcgaggcgctgtcgcgctacgtgaagcagcgcgggatgttcacgtacacggggctcaccgaggcgcaggtcgagtgcctgcgcgagcagcacggcgtttatgtgctgcgctcgggccgcatgtgcgtggccggcctgaacgaggcgaacgtcgggatcgtcgcggaagcgatcggcgctgtgatcgcgagcggcgtctga

SEQ ID NO: 90850 - protein, 400 aa, Burkholderia thailandensis E264
MFEHIDAYPGDPILTLNENFQQDPRTRKVNLSIGIYFDDDGRIPVMGAVREAEAVVQRESGPKPYLPMTGLAAYRDAVQAVVFGENSDARAAGRIATVQTLGGSGALKVGADFIKRYFPHAQVWISDPSWENHRFIFERAGFTVNTYPYYDEATGGLKFDAMLAAIDALPKRSVVLLHACCHNPTGVDLDDAQWLKLIDVLQARELLPFVDMAYQGFGAGLAADAFAIRELARRGMPAFVANSFSKNFSLYGERVGALSVICEDAAAAARVLGQLAGAVRSNYSNPPTYGAKIVAQVLTTPALRAQWEEELAAMCRRIAKMRGAIHDGLRAHVQGEALSRYVKQRGMFTYTGLTEAQVECLREQHGVYVLRSGRMCVAGLNEANVGIVAEAIGAVIASGV

SEQ ID NO: 90851 - DNA, 1278 bp, Burkholderia thailandensis E264
  CDS (1)..(1278): transl_table=11
atgcggctcggccgccgcggccaagccgttgttcccgtcatccgtcaacccgtgtccaacatgttcgaacacattcccgcgtatcccggcgacccgatcctgtcgctgttccaggcgttccagcgcgatcccgagccgcgcaaggtcaatctgagcatcggcctttactacgacgaaaacgacgccgtgccggtgctcgacagcgtgcgcgcggcggcggcgcaatgggccgggcggcacgacgcgcacacgtatctgccgatggaaggcatggccgactaccggcgcgcgctgcaatcgctcgtgttcggcgcaagcagcgccgcgttgcgcgacaagcggatcgcgaccgtgcagacggtgggcggctccggcgcgctgcgcctcggcgcggatctgctcaagcgctatttccccgacagcgcggtctggatcggcgatccgacgtgggacaaccaccgcgtgctgttcgccgcggcgggcctcgacgtgcacacgtatccgtactacgacgcggcgacgaacggcgtgcgcttcgacgcgatgatggcgacgctcgacacgctgcccgcgcgcgcgatcgtgctattgcagccgtgctgccacaacccgaccggcatcgacctgtcgcgcgagcagtggcgcgagatcgccgcgctgtgcgaccggcgcgggctgatcccgtttctcgacatcgcgtatcaaggcttcggcgacggcctcgacgacgatgcatggccgatccgcgcgatgaccgacgcgggcctgcccgtgttcgtgagcaactcgttctcgaagaatttctcgctgtacggcgaacgctgcggcgggctgtcgatcgcgtgcgcgaacgagcgcgaggcggcgcaggtgctcacccagatccaggcgggcgtgcgccgcgtctattcgagcccgccgctgcacggcgcgcgcctcgtgtcgaccgtgctgaacgacccggcgctcgcgcggcagtgggagcgcgacgtcgccgcgatgcgcgagcggatcaggcggatgcgcacggcgctcgcctcgcggctcgcggcgctcgtgcccggcgcgtcgttcgactatctcgccgagcagcgcggaatgttcagctacacgggcctcgcgcccgacgaggtcgatgcgctgcgcgagcacgacggcgtctacctgctgcgctccggccgcgcgtgcatcgcggggctgagcgacgcgaacgtcgactatgtcgcgaacgcgatcgccgcggtgctgaaggctcggcgcctgcgcgtcgcggcgtga

SEQ ID NO: 90852 - protein, 425 aa, Burkholderia thailandensis E264
MRLGRRGQAVVPVIRQPVSNMFEHIPAYPGDPILSLFQAFQRDPEPRKVNLSIGLYYDENDAVPVLDSVRAAAAQWAGRHDAHTYLPMEGMADYRRALQSLVFGASSAALRDKRIATVQTVGGSGALRLGADLLKRYFPDSAVWIGDPTWDNHRVLFAAAGLDVHTYPYYDAATNGVRFDAMMATLDTLPARAIVLLQPCCHNPTGIDLSREQWREIAALCDRRGLIPFLDIAYQGFGDGLDDDAWPIRAMTDAGLPVFVSNSFSKNFSLYGERCGGLSIACANEREAAQVLTQIQAGVRRVYSSPPLHGARLVSTVLNDPALARQWERDVAAMRERIRRMRTALASRLAALVPGASFDYLAEQRGMFSYTGLAPDEVDALREHDGVYLLRSGRACIAGLSDANVDYVANAIAAVLKARRLRVAA

SEQ ID NO: 90853 - DNA, 1194 bp, Saccharophagus degradans 2-40
  CDS (1)..(1194): transl_table=11
atgtttgatcgtttatcgctgttgtctgcagaccccattcttgggttaattggccaatttacggccgattcaaatcccaacaaaatcgatttgggggtgggggtatatcgagatgcccaaggtcatacgcctatattggcaacggtaaaaaaagccgaatctattttgtgggaagccgaacaaactaaatcttacattggccctgccggcaaccaacaatttaaccgcttggtgcttgagcttattctaggggatgagcacacagcattggcagacaaccgcgctatagctatgcaaacccctgggggctgtggagccttacgtgtcgctgccgagctaatagtggccgccaacccgaaagcaaaaatttgggtaagtgaccccacgtggggtaaccacgttccactgcttggtgattctggtatggagatagccacatacccatactacgactatgagagccacggtattcgctttgccgatatgctaaccacgctgcgtgagtctgcggtggccggcgaccttgtattagtgcatgcatgttgccataacccaagtggggcggacctcagtttggcccagtggttacagcttactaatttatgtgcagaaaaagggcttatcccgtttgtagatatggcctatcaaggttttggggatggtttagatcaagatgcagcgggtttgcgcatgatggccgatcagttacccgaagtgatatttgcctatagctgctctaaaaactttggtttgtatcgcgaacgaattggtgcagtaggcgttgttgccgcaaacaccgagcgcgccactgccgttgccagtcaaattatgcgcatagtgcgaggtatttattccatgcccccatcgcacggcgcggcaattgtagaaactattctcgccgaccctgtgctttgccaagcttgggtggatgagctggcgttgatgcgcaatcgcattcaaaccatgcgccaagcattattagatgcgatgaccgcgcaaggatacggcgataggtttcattttattaccggcgaaaaaggcatgttctcgtttttaggcttaacgcccgagcaggtgcagcggcttattaaagagcacagtgtttacatggtggacagcagccgcattaacgttgctgggcttacgccaacgaatatagatccgctggtgaaagccctaactgccgtgctgtag

SEQ ID NO: 90854 - protein, 397 aa, Saccharophagus degradans 2-40
MFDRLSLLSADPILGLIGQFTADSNPNKIDLGVGVYRDAQGHTPILATVKKAESILWEAEQTKSYIGPAGNQQFNRLVLELILGDEHTALADNRAIAMQTPGGCGALRVAAELIVAANPKAKIWVSDPTWGNHVPLLGDSGMEIATYPYYDYESHGIRFADMLTTLRESAVAGDLVLVHACCHNPSGADLSLAQWLQLTNLCAEKGLIPFVDMAYQGFGDGLDQDAAGLRMMADQLPEVIFAYSCSKNFGLYRERIGAVGVVAANTERATAVASQIMRIVRGIYSMPPSHGAAIVETILADPVLCQAWVDELALMRNRIQTMRQALLDAMTAQGYGDRFHFITGEKGMFSFLGLTPEQVQRLIKEHSVYMVDSSRINVAGLTPTNIDPLVKALTAVL

SEQ ID NO: 90855 - DNA, 1200 bp, Burkholderia xenovorans LB400
  CDS (1)..(1200): transl_table=11
atgtctctgttctccgccgtcgaacttgctccccgcgacccgattctgggcctgaacgaagccttcaatgccgatacgcgcaccaccaaggtcaaccttggcgtcggcgtgtacttcaatgaagaaggcaagattccgttgctgcgcgccgtgcgcgacgcagaaaaggcccgcgtcgatgccgcgctgccgcgcggctacctgccgatcgaaggcatcgccgcttacgatgccgctgtgcagaagctgctgctcggcaacgactcgccgctgatcgcggcgggccgcgtcgtgacggcgcaggcgctgggcggcacgggcgcgctgaaaattggcgcggacttcctgaagcgcctgaacccgaacgccaaggtcgcgatcagcgatccgagctgggaaaaccaccgcgcattgttcgaaggcgcaggtttcgaagtcgtgtcgtacccgtactacgacgcgcacacccacggcgtgaatttcgacgccatgctgagcgcgctgaacagctatgccgccggcacgatcgtcgtgctgcacgcgtgctgccacaacccgaccggcgtggacctcaacatcgagcaatggaagcaggttgtcgaagtggtcaaggcgcgcaatctggtgccgttcctcgacatcgcctaccagggtttcggcgacaacatcgaagcagacgcagcggccgtccgtctgttcgccgcggcggaactgaacgtgttcgtgtcgtcgtcgttctcgaagtcgttctcgctgtacggcgagcgcgtcggcgcgctgtcgatcatcacggcaagcaaggaagaagccgctcgcgtgctgtcgcaactcaagcgcgtgatccgcacgaactattcgaacccgccgacgcacggcggctcggtggtcgcggccgtgctcgcgtcgccggagctgcgcgccacgtgggaaacggaactggccgaaatgcgcgatcgcatccgcgccatgcgcaatggtctggtcgaacgcctgaaggcgagcggcgtggatcgcgacttcagcttcgtgaacgcgcagcgcggcatgttctcgtactcgggtctgacggcgccgcaggtggaccgtctgcgcgaagaattcggcatctacgccgtgagcacgggtcgcatctgcgtggccgcgctgaatacgcgcaacctcgacgcggtggccaacgcgatcgctcacgtattgaagtaa

SEQ ID NO: 90856 - protein, 399 aa, Burkholderia xenovorans LB400
MSLFSAVELAPRDPILGLNEAFNADTRTTKVNLGVGVYFNEEGKIPLLRAVRDAEKARVDAALPRGYLPIEGIAAYDAAVQKLLLGNDSPLIAAGRVVTAQALGGTGALKIGADFLKRLNPNAKVAISDPSWENHRALFEGAGFEVVSYPYYDAHTHGVNFDAMLSALNSYAAGTIVVLHACCHNPTGVDLNIEQWKQVVEVVKARNLVPFLDIAYQGFGDNIEADAAAVRLFAAAELNVFVSSSFSKSFSLYGERVGALSIITASKEEAARVLSQLKRVIRTNYSNPPTHGGSVVAAVLASPELRATWETELAEMRDRIRAMRNGLVERLKASGVDRDFSFVNAQRGMFSYSGLTAPQVDRLREEFGIYAVSTGRICVAALNTRNLDAVANAIAHVLK

SEQ ID NO: 90857 - DNA, 1197 bp, Ralstonia metallidurans CH34; identical to SEQ ID NO: 66551
  CDS (1)..(1197): transl_table=11

SEQ ID NO: 90858 - protein, 398 aa, Ralstonia metallidurans CH34; identical to SEQ ID NO: 66552

SEQ ID NO: 90859 - DNA, 1191 bp, Haemophilus somnus 129PT
  CDS (1)..(1191): transl_table=11
atgttcgagaacattaatgctgcacccgctgatccaattttaggtttaggtgaggcttttaaatctgaaacacgtgccaataaaattaacttgggtattggggtctataaagatgctaatggtaacacccccattatgaaagctgttaaagaagctgaaaatcgtctatttgaattagaaaccactaaaaactatttaactattgatggtattgcagaatttaattcatacactaaagaattattatttggtacaaattctaaaattattaaacaaggacgtgctaaaacagtacaaagtttaggaggaactggtgcgttacgtattgctgccgaatttatcaaacgtcaaaccacatctcaaaacgtttggattagttcaccaacttggccaaaccataatgctattttcaacgctgtaggtatgacaatccgtgaatatcgttactacgatgcagagaaaaaagctttagattgggataatttaattgctgacttaagcaatgccagtgaaggtgatgtggtgttattacatggttgttgtcataacccaacgggtattgatccaacccctgagcaatggaaaatactagcagaaatgtcagaaaaaaatggttggttaccgctctttgattttgcctatcaaggtcttgctaacgggttagaagaagatgctattggtttgcgaacttttgcagaaaatcataaagaattattagtcgcaagttcttattccaaaaactttggtttatacaatgaacgtgttggtgcctttactttagtagcagaaacagaagaaatttcagcaatagcattaacacaagtgaaatcaattattcgtactctctactctaacccagcttctcatggtgctacagctgtttctatcattttaggtgatgacctattacgtcaacaatgggaatccgaattaaccgaaatgcgtaatcgcattaaacgtatgcgttatcaatttgttgaattgctaaaagaatatggtgccaagcaagactttaacttcattattgaacaaaatggtatgttctcttttagtggtctaaatgcagaacaggtggatcgcttaaaagaagaatttgccatttatgctgtgcgttcaggacgtattaatttagccggtgtaactgaagataatattcgttatttatgtgaaagtattgtcaaggtgctttaa

SEQ ID NO: 90860 - protein, 396 aa, Haemophilus somnus 129PT
MFENINAAPADPILGLGEAFKSETRANKINLGIGVYKDANGNTPIMKAVKEAENRLFELETTKNYLTIDGIAEFNSYTKELLFGTNSKIIKQGRAKTVQSLGGTGALRIAAEFIKRQTTSQNVWISSPTWPNHNAIFNAVGMTIREYRYYDAEKKALDWDNLIADLSNASEGDVVLLHGCCHNPTGIDPTPEQWKILAEMSEKNGWLPLFDFAYQGLANGLEEDAIGLRTFAENHKELLVASSYSKNFGLYNERVGAFTLVAETEEISAIALTQVKSIIRTLYSNPASHGATAVSIILGDDLLRQQWESELTEMRNRIKRMRYQFVELLKEYGAKQDFNFIIEQNGMFSFSGLNAEQVDRLKEEFAIYAVRSGRINLAGVTEDNIRYLCESIVKVL

SEQ ID NO: 90861 - DNA, 1191 bp, Shewanella sp. MR-4
  CDS (1)..(1191): transl_table=11
atgtttaactcactcgtcgcaatgcctgcggatcctatcctcggcctattaacccagtaccgtgaagactcacatcctcaaaaagtcgacttaggtgtgggcgtttataaggatcccgctggaaacactcccatccttaattgcgtgaaaaaagccgaaaaattccgtttagacactgaaaccaccaaagtgtatatcggcccaaccggttcgcctcagtttaataccctgataacagaattagcctttggcagtgatcacagcgcgattatcgccaaccgaattcgtactgtatccacgcctggtggtacaggcgccctgcgcgttgccggtgattttattaaacgctgcaatcctaatgctgtgctatgggtgagcgatcccacatgggctaaccatataggcttgtttgaagcggcgggtctgactgttaaaacctacccttactatgattacgacactaaatcgttaaagtttgatgagatgctcagcgcgcttgcgcagattggcccgaacgatgttgtgctattccacgcctgttgccataacccgagcgggatggatttaacggcagaacaatgggataaagtggttgccctcaccaaggagcaaggttttaccccgcttatcgacatggcttaccaaggttttggtgatggggtcgatatcgatgcctacggcgtgcgtaaaatggccgccgcggtcgataatatgatcctgtgtagctcttgctcgaaaaactttggtctgtaccgtgagcgtatcggttcatgctctgtggttgcaaaagatgcaaacacggcaagcatcgcgcaatcagtactgctttacgtagttcgttgcctctactccatgccgccagcccacggcgcggcgattgtcgaaaccattctaggttcggcagaattaaagcaagagtggttagatgagctcaaagtaatgcgcgaccgtatcaacggtaaccgcgccattttagtggaaaacctcaaaaccaatggcgtggaccgcgactttagctttatcgcacgtcaaaaaggcatgttctctttcctaggggttaatcctgagcaagtggcgcgtctgcagaaagaattcagcatttatatggtgggttcgagccgcattagcattgcaggcattagcgaagacaatgtggattacttagctaagtcgattgccgaagtactgtaa

SEQ ID NO: 90862 - protein, 396 aa, Shewanella sp. MR-4
MFNSLVAMPADPILGLLTQYREDSHPQKVDLGVGVYKDPAGNTPILNCVKKAEKFRLDTETTKVYIGPTGSPQFNTLITELAFGSDHSAIIANRIRTVSTPGGTGALRVAGDFIKRCNPNAVLWVSDPTWANHIGLFEAAGLTVKTYPYYDYDTKSLKFDEMLSALAQIGPNDVVLFHACCHNPSGMDLTAEQWDKVVALTKEQGFTPLIDMAYQGFGDGVDIDAYGVRKMAAAVDNMILCSSCSKNFGLYRERIGSCSVVAKDANTASIAQSVLLYVVRCLYSMPPAHGAAIVETILGSAELKQEWLDELKVMRDRINGNRAILVENLKTNGVDRDFSFIARQKGMFSFLGVNPEQVARLQKEFSIYMVGSSRISIAGISEDNVDYLAKSIAEVL

SEQ ID NO: 90863 - DNA, 1194 bp, Shewanella sp. MR-4; identical to SEQ ID NO: 66553
  CDS (1)..(1194): transl_table=11

SEQ ID NO: 90864 - protein, 397 aa, Shewanella sp. MR-4; identical to SEQ ID NO: 66554

SEQ ID NO: 90865 - DNA, 1191 bp, Rhizobium leguminosarum bv. viciae 3841
  CDS (1)..(1191): transl_table=11
atgttcgatgatctgataatgccgccagccgacaagatcctgtcgttgatgccgattttccggcaggacagtcgttcgaacaagatcgatctcggcgtcggagtctaccgcgacgcctccggtacgacgccgatcccgcgggcggtgagggaggcagaaaagcgaatccataccgcgcagacgaccaaggcctatgtcggcccggccggggatcctgttttttgcgatctcatcggcaggcttgtcttcggcgaggcagcgccgtgggagcgaattcgcggcatccagacgccgggcggagcaggcgccttgacggtgctcgccggcctgatctccctggcgcgcccgggtgcagcggtccatgtgcccgatccgacctgggtgaaccatgtgtcgatcctcgaagacaacgggcttcgggtcgtcacttacccgtacctcgatcgccggacaggcgaagtggatttcgacaccctgcttgatcatttctcacggtcggaacggggcgacatcgtgttgctgcacggctgctgccacaatccgaccggcgccgacccgagccgttcgcaatggcaggcgctggcggagatcatcgccgagcgcgggctcgttccgctggtcgatatcgcttatcaagggtttggcgagggtctcgaggacgatgccttcgtggtacggctgctcgccggcatggttccggaaatgctcgtctcctcgtcatgctcgaagaatttcggaatctatcgcgagcgtacaggtgccgcattcattctcgccaggaacgcggatcgggcggatgcagccaaggcgcaactcacggtgcgagcccgtgtcgtctattcgatgccgccggatcatggctcggctatagttcgcaccgtcctggaggaccctgcactcgcggccgactggcgcgccgaactggacgatatgcgctccagcattctgtcgctgcgccaggggcttgctgcctcgttccggcgtttcaccaatggcagcgactacgatttcctcgccaagaacaaaggcatgttttcgctgatcggtctgacacccggagaagccgtgatgctgcgcgagcagcacgccatctacatcgtcgaggacggacgcatcaatgtcgccgggctgcaggccagccagatcgacacctttgcggaagccgttctggcagttcgcgggaaacgctga

SEQ ID NO: 90866 - protein, 396 aa, Rhizobium leguminosarum bv. viciae 3841
MFDDLIMPPADKILSLMPIFRQDSRSNKIDLGVGVYRDASGTTPIPRAVREAEKRIHTAQTTKAYVGPAGDPVFCDLIGRLVFGEAAPWERIRGIQTPGGAGALTVLAGLISLARPGAAVHVPDPTWVNHVSILEDNGLRVVTYPYLDRRTGEVDFDTLLDHFSRSERGDIVLLHGCCHNPTGADPSRSQWQALAEIIAERGLVPLVDIAYQGFGEGLEDDAFVVRLLAGMVPEMLVSSSCSKNFGIYRERTGAAFILARNADRADAAKAQLTVRARVVYSMPPDHGSAIVRTVLEDPALAADWRAELDDMRSSILSLRQGLAASFRRFTNGSDYDFLAKNKGMFSLIGLTPGEAVMLREQHAIYIVEDGRINVAGLQASQIDTFAEAVLAVRGKR

SEQ ID NO: 90867 - DNA, 1197 bp, Pseudomonas aeruginosa UCBPP-PA14
  CDS (1)..(1197): transl_table=11
atgagtctgttttctgccgtcgaaatggcaccgcgtgatcccatccttggcctgaacgaagccttcaacgccgatacccgtccgggcaagatcaacctgggcgtgggcgtgtactacaacgaggaggggcgcattccgctgttgcgtgccgtgcaggctgccgagaaggcccgcatcgaggcccacgcgccgcgcggctacctgccgatcgaagggatcgccgcctacgaccagggcgtacagaaactgctgttcggtaacgaatccgagctgctggccgccggccgcgtggtcacgacccaggccgtcggcggcaccggcgccctcaagctcggcgccgacttcctcaagcgcctgctgcccgacgccaccgtggccatcagcgacccgagctgggaaaaccaccgcgcactgttcgaagccgccggcttcccggtgcagaactaccgctattacgacgccgccagcaatggcgtgaaccgcgccggcctgctggaagacctgaatgccctgccggcccgctcgatcgtggtcctgcacgcctgctgccataatccgaccggcgtcgatctcgagctggacgactggaaacaggtgctggacgtgctcaaggccaagggccacgtgccgttcctcgacatcgcctaccagggcttcggcaacggcatcgaggaagacgccgccgcggtgcgcctgttcgcccagtcgggcctgagcttcttcgtttccagctcgttctccaaatccttctcgctctatggcgaacgcgtcggcgccctctcgatcgtgaccgaaagccgcgatgaatcggcccgcgtgctgtcccaggtgaagcgggtgatccgcaccaactattcgaacccaccgacccacggcgccagcgtcgtctcctccgtgctcaacagctcggaactgcgggccctctgggagcaggaactgggcgagatgcgcgaccgcatccgcgacatgcgcctggcgatggtcgagcaactggcagcccacggcgccaagcgcgacttcagcttcgtcggtcgccagcgtggcatgttctcctattccggcctgaccgccgaccaggtcgagcgcctgaagaccgagttcggtatctatgccgtcagcaccggccgtatctgcgtcgccgcgctgaacaaatcgaacctggagaccatcaccaaggccatcgtccaggtcctgtag

SEQ ID NO: 90868 - protein, 398 aa, Pseudomonas aeruginosa UCBPP-PA14
MSLFSAVEMAPRDPILGLNEAFNADTRPGKINLGVGVYYNEEGRIPLLRAVQAAEKARIEAHAPRGYLPIEGIAAYDQGVQKLLFGNESELLAAGRVVTTQAVGGTGALKLGADFLKRLLPDATVAISDPSWENHRALFEAAGFPVQNYRYYDAASNGVNRAGLLEDLNALPARSIVVLHACCHNPTGVDLELDDWKQVLDVLKAKGHVPFLDIAYQGFGNGIEEDAAAVRLFAQSGLSFFVSSSFSKSFSLYGERVGALSIVTESRDESARVLSQVKRVIRTNYSNPPTHGASVVSSVLNSSELRALWEQELGEMRDRIRDMRLAMVEQLAAHGAKRDFSFVGRQRGMFSYSGLTADQVERLKTEFGIYAVSTGRICVAALNKSNLETITKAIVQVL

SEQ ID NO: 90869 - DNA, 1200 bp, Pseudomonas aeruginosa UCBPP-PA14
  CDS (1)..(1200): transl_table=11
atgagtcatttcgccaaggtcgcccgcgtaccgggcgacccgatcctgggcctgctcgacgcctaccgcaacgatccgcgcgcggacaagctggacctcggcgtcggtgtctacaaggatgcccagggcctgaccccgatcctgcgctcggtgaaactcgccgagcagcgcctggtcgagcaggaaaccaccaagagctacgtcggcggccacggcgatgcgctgttcgccgcgcgcctggcggaactggcgctcggcgccgcctcgccgctgttgctggagcaacgcgccgacgccacccagacgcccggcggcaccggcgccttgcgcctggccggcgacttcatcgcccattgcctgcccggccgcggcatctggctgagcgacccgacctggccgatccacgagacgctgttcgccgccgccggcctgaaggtttcccactacccctacgtcagcgccgacaaccgcctggatgtcgaggcgatgcttgctggcctggagcgcattccccagggagacgtggtgctgctgcatgcctgctgccacaacccgaccggtttcgacctgagccacgacgactggcgcagggtgctcgacgtggtgcgtcgtcgcgagctgctgccgctgatcgacttcgcctaccagggcttcggcgacggtctcgaggaagacgcctgggcggtacgcctgttcgccggcgaactgccggaggtgctggtcaccagttcctgctcgaagaacttcggcctgtaccgcgaccgcgtcggcgcgctgatcgtctgcgcgcagaacgccgagaagctcaccgacgtgcgtagccaactggccttcctcgcccgcaacctctggtcgaccccgccggcgcatggcgccgaggtggtcgcggcgatcctcggcgacagcgagttgaagggactctggcaggaagaggtcgaaggcatgcgctcgcgcatcgccagcctgcgcatcggcctggtcgaagccctggcgccgcacggcctggccgagcgcttcgcccatgtcggcgcgcaacgcgggatgttttcctataccggactgagcccgcagcaggtcgctcggctgcgcgacgagcacgccgtttacctggtctccagcggccgggccaacgtcgccggtctcgacgcgcgccgcctcgaccgcctggcgcaagccatcgcccaggtctgcgcggactga

SEQ ID NO: 90870 - protein, 399 aa, Pseudomonas aeruginosa UCBPP-PA14
MSHFAKVARVPGDPILGLLDAYRNDPRADKLDLGVGVYKDAQGLTPILRSVKLAEQRLVEQETTKSYVGGHGDALFAARLAELALGAASPLLLEQRADATQTPGGTGALRLAGDFIAHCLPGRGIWLSDPTWPIHETLFAAAGLKVSHYPYVSADNRLDVEAMLAGLERIPQGDVVLLHACCHNPTGFDLSHDDWRRVLDVVRRRELLPLIDFAYQGFGDGLEEDAWAVRLFAGELPEVLVTSSCSKNFGLYRDRVGALIVCAQNAEKLTDVRSQLAFLARNLWSTPPAHGAEVVAAILGDSELKGLWQEEVEGMRSRIASLRIGLVEALAPHGLAERFAHVGAQRGMFSYTGLSPQQVARLRDEHAVYLVSSGRANVAGLDARRLDRLAQAIAQVCAD

SEQ ID NO: 90871 - DNA, 1191 bp, Shewanella sp. ANA-3
  CDS (1)..(1191): transl_table=11
atgtttaactcactcgtcgcaatgcctgcggatcctatcctcggcctattaacccagtaccgtgaagactcacatcctcaaaaagtcgacttaggtgtgggcgtatataaggatcccgctggaaacactcccatccttaattgcgtgaaaaaagccgaaaaattccgtttagacactgaaaccaccaaagtgtatatcggcccaaccggttcacctcagtttaataccctgataacagaattagcctttggcagtgatcacagcgcgattatcaccaaccgcattcgtactgtttctactcctggtggcacgggcgccctgcgcgttgccggtgattttattaaacgctgcaatcctaatgctgtgctatgggtgagcgatcccacatgggctaaccatataggcttgtttgaagcggcgggtctgaccgttaaaacctacccttactatgattacgacactaaatcgttaaagttcgatgagatgctcagcgcgcttgcgcagattggcccgaacgatgtggtgctattccacgcctgttgccataacccaagcgggatggatttaacgacagaacaatgggataaagtggttgccctcaccaaggagcaaggttttaccccgcttatcgacatggcttaccaaggttttggtgatggggtcgatatcgatgcctacggcgtgcgtaaaatggccgctgcggtcgataatatgatcctgtgtagctcttgctcgaaaaacttcggtctgtaccgtgagcgtatcggttcatgctctgtggttgcaaaagatgcaaacacggcaaacatcgcgcaatctgtgctgctttacgtggttcgctgcctctactccatgccgccagcccacggcgcggcgattgtcgaaaccattctaggttcggcagaattaaagcaagaatggttagatgagctgaaagtgatgcgcgaccgtatcaacggtaaccgcgccattttagtggaaaaactcaaaaccaatggcgtggaccgcgactttagctttatcgcacgccaaaaaggcatgttctctttcctaggggttaatcctgagcaagtcgcgcgtctgcagaaagaattcagcatttatatggtgggttcgagtcgcattagcattgcaggcattagcgaagacaatgtggattacttagctaagtcgattgcaaaagtactgtaa

SEQ ID NO: 90872 - protein, 396 aa, Shewanella sp. ANA-3
MFNSLVAMPADPILGLLTQYREDSHPQKVDLGVGVYKDPAGNTPILNCVKKAEKFRLDTETTKVYIGPTGSPQFNTLITELAFGSDHSAIITNRIRTVSTPGGTGALRVAGDFIKRCNPNAVLWVSDPTWANHIGLFEAAGLTVKTYPYYDYDTKSLKFDEMLSALAQIGPNDVVLFHACCHNPSGMDLTTEQWDKVVALTKEQGFTPLIDMAYQGFGDGVDIDAYGVRKMAAAVDNMILCSSCSKNFGLYRERIGSCSVVAKDANTANIAQSVLLYVVRCLYSMPPAHGAAIVETILGSAELKQEWLDELKVMRDRINGNRAILVEKLKTNGVDRDFSFIARQKGMFSFLGVNPEQVARLQKEFSIYMVGSSRISIAGISEDNVDYLAKSIAKVL

SEQ ID NO: 90873 - DNA, 1209 bp, Azoarcus sp. BH72
  CDS (1)..(1209): transl_table=11
atgtccgcatcgatcttcgccgccgtcgagttggcgccccgtgacccgatcctcggcctcaacgaggccttcgccgccgacacccgcgcccagaaggtgaacctcggcgtcggcgtctactacgacgacaacggcaagattccgctgctggccgccgtccgcgccgccgaaaaggcccgcctcgaagccatgccgccgcgcggctaccagccgatcgaaggccccgccgcctacaacaacgcggtgcagaacctgctgctcggcaaggattccgcgctgatcgccaacggccaggtcgtcaccgtcgaagcactcggcggcaccggcgcgctgaaggtcggcgccgactacctcaagcgcctgctgccgggcgccacggtctacatctccgacccgagctgggaaaaccaccgcgcgctgttcgaatcggccggcttcccggtcgacacctacccttactacgacgccgccacccgcggcgtgaacttcgccggcatgaaggccaagctggaaagcctgccggccggctcgatcatcgtgctgcacgcctgctgccacaacccgaccggcgcggatctttccgacgcccagtgggatgaggtcgtcgccgcctgccgcgcccgcggcctggtgcccttcctcgacatggcctaccagggcttcgccgacggcatcgacgccgacgccgtcgcggtgcgcgccttctcggccagcggcctgcagttcttcgtttccagctcgttctccaagagcttctcgctgtacggcgagcgcgtcggcgcgctgtccatcatcaccgccagcaaggaagagtccggccgcgtgctgtcgcaagtcaagcgcgtgatccgtaccaactattccaacccgccgatccacggcggcgccatcgtcgccgcggtgctcaactccgccgaactgcgccagcagtgggaagacgaactcgccggcatgcgcgaccgcatccgcgcgatgcggacggggctggtcgagcagctgaaggccgaaggcgtggcgcaggacttctccttcgtgatcaagcagcgcggcatgttctcctacaccggcctcaccgccgcccaggtcgagaagctgaagaccgacttcggcatctacgcggtgtcgacgggccgtatctgcctggcggcgctgaactccaagaacatcggctacgtcgccaaggcgatcgcggcggtggtcaagggctga

SEQ ID NO: 90874 - protein, 402 aa, Azoarcus sp. BH72
MSASIFAAVELAPRDPILGLNEAFAADTRAQKVNLGVGVYYDDNGKIPLLAAVRAAEKARLEAMPPRGYQPIEGPAAYNNAVQNLLLGKDSALIANGQVVTVEALGGTGALKVGADYLKRLLPGATVYISDPSWENHRALFESAGFPVDTYPYYDAATRGVNFAGMKAKLESLPAGSIIVLHACCHNPTGADLSDAQWDEVVAACRARGLVPFLDMAYQGFADGIDADAVAVRAFSASGLQFFVSSSFSKSFSLYGERVGALSIITASKEESGRVLSQVKRVIRTNYSNPPIHGGAIVAAVLNSAELRQQWEDELAGMRDRIRAMRTGLVEQLKAEGVAQDFSFVIKQRGMFSYTGLTAAQVEKLKTDFGIYAVSTGRICLAALNSKNIGYVAKAIAAVVKG

SEQ ID NO: 90875 - DNA, 1194 bp, Neisseria meningitidis FAM18; identical to SEQ ID NO: 66559
  CDS (1)..(1194): transl_table=11

SEQ ID NO: 90876 - protein, 397 aa, Neisseria meningitidis FAM18; identical to SEQ ID NO: 66560

SEQ ID NO: 90877 - DNA, 1197 bp, Acidovorax sp. JS42
  CDS (1)..(1197): transl_table=11
atgtctctgttcaccgccgtcgaaatggctccccgcgacccgatcctgggtctcaacgaacaatacgccgccgaccccaatccagccaaggtcaacctgggcgtgggcgtgtacttcgacgacaacggcaagctgcccctgctgcagtgcgtgcaggcagccgaaaaggccatgatggacaagcccgctgcgcgcggctacctgcccatcgacggcatcgctgcctatgacaacgcggtcaaggccctggtgttcggcgcggagtccgacgtcgtcaaggccggccgcgtggccacggtgcaggccattggcggcacgggcggcctgaagatcggcgcagacttcctcaagaagatcagcccgaacgcgaaggtgctgatctccgacccgagctgggaaaaccaccgcgccatcttcaccaacgccggcttcgaggtgggcagctaccgctactacgacgccgccaaccgcaaggtggacttcgacggcatgctggccgacctgaacgccgccgcgcccggcaccatcgtggtgctgcatgcctgctgccacaaccccacgggctacgacatcaccgccgcgcagtgggagcaggtgatcgccgccgtgaaggccaagggcctggtggctttcctcgacatggcctaccagggcttcggccacggtattgccgaggacggcgccgtgatcggcaagttcgtcgcggccggcctgaacatcttcgtgtccacctcgttctccaagagcttcagcctgtacggcgagcgcgtgggcgcgctgtccgtggtggccaacgacaaggacgaggccgcgcgcgtgctctcgcagctcaagatcgtgatccgcaccaactacagcaacccgcccacgcacggcggcgccgtggtggcggcggtactgaacaaccccgagctgcgcgccctgtgggaaaaggagctgggcgaaatgcgcgtgcgcatcaaggaaatgcgccagaagctggtggacggcctgaaggccgccggtgtgaagcaggacatgggcttcatcaccacgcagatcggcatgttcagctactccggcctgtccaaagaccagatggtgcgcctgcgcaacgagttcggcgtgtacggcaccgacaccggccgcatgtgcgtggccgcgctcaacagcaagaacatcgactacgtctgccaggccattgccaaggtgatgtaa

SEQ ID NO: 90878 - protein, 398 aa, Acidovorax sp. JS42
MSLFTAVEMAPRDPILGLNEQYAADPNPAKVNLGVGVYFDDNGKLPLLQCVQAAEKAMMDKPAARGYLPIDGIAAYDNAVKALVFGAESDVVKAGRVATVQAIGGTGGLKIGADFLKKISPNAKVLISDPSWENHRAIFTNAGFEVGSYRYYDAANRKVDFDGMLADLNAAAPGTIVVLHACCHNPTGYDITAAQWEQVIAAVKAKGLVAFLDMAYQGFGHGIAEDGAVIGKFVAAGLNIFVSTSFSKSFSLYGERVGALSVVANDKDEAARVLSQLKIVIRTNYSNPPTHGGAVVAAVLNNPELRALWEKELGEMRVRIKEMRQKLVDGLKAAGVKQDMGFITTQIGMFSYSGLSKDQMVRLRNEFGVYGTDTGRMCVAALNSKNIDYVCQAIAKVM

SEQ ID NO: 90879 - DNA, 1191 bp, Haemophilus somnus 2336
  CDS (1)..(1191): transl_table=11
atgttcgagaatattaatgcggcacccgctgatccaattttaggtttaggtgaggcttttaaatctgaaatgcgtgccaataaaattaacttgggtattggggtctataaagatgctaatggtaacacccccattatgaaagctgttaaagaagctgaaaatcgtctatttgaattagaaaccactaaaaactatttaactattgatggtattgcagagtttaattcatacactaaagaattattatttggtacaaattctaaaattattaaacaaggacgtgctaaaacagtacaaagtttaggaggaaccggtgcgttacgcattgctgccgaatttatcaaacgtcaaaccacatctcaaaacgtttggattagttcaccaacttggccaaaccataatgctattttcaacgctgtaggtatgacaatccgtgaatatcgttactacgatgcagagaaaaaagctttagattgggataatttaattgctgacttaagcaatgccagtgaaggtgatgtggtgttattacatggttgttgtcataacccaacgggtattgatccaacccctgagcaatggaaaatactagcagaaatgtcagaaaaaaatggttggttaccgctctttgattttgcttatcaaggtcttgctaacgggttagaagaagatgctattggtttgcgaacttttgcagaaaatcataaagaattattagtcgcaagttcttattccaaaaactttggtttatacaatgaacgtgttggtgcctttactttagtagcagaaacagaagaaatttcagcaatagcattaacacaagtgaaatcaattattcgtactctctactctaacccagcttctcatggtgctacagctgtttctatcattttaggtgatgacctattacgtcaacaatgggaatccgaattaaccgaaatgcgtaatcgcattaaacgtatgcgttatcaatttgttgaattgttaaaagaatatggtgcaaagcaagactttagcttcattattgaacaaaatggcatgttctcttttagtggtctaaatgcagaacaggtggatcgcttaaaagaagaatttgccatttatgctgtgcgttcaggacgtattaatttagccggtgtaactgaagataatattcgttatttatgtgaaagtattgtcaaggtgctttaa

SEQ ID NO: 90880 - protein, 396 aa, Haemophilus somnus 2336
MFENINAAPADPILGLGEAFKSEMRANKINLGIGVYKDANGNTPIMKAVKEAENRLFELETTKNYLTIDGIAEFNSYTKELLFGTNSKIIKQGRAKTVQSLGGTGALRIAAEFIKRQTTSQNVWISSPTWPNHNAIFNAVGMTIREYRYYDAEKKALDWDNLIADLSNASEGDVVLLHGCCHNPTGIDPTPEQWKILAEMSEKNGWLPLFDFAYQGLANGLEEDAIGLRTFAENHKELLVASSYSKNFGLYNERVGAFTLVAETEEISAIALTQVKSIIRTLYSNPASHGATAVSIILGDDLLRQQWESELTEMRNRIKRMRYQFVELLKEYGAKQDFSFIIEQNGMFSFSGLNAEQVDRLKEEFAIYAVRSGRINLAGVTEDNIRYLCESIVKVL

SEQ ID NO: 90881 - DNA, 1191 bp, Haemophilus influenzae R2866
  CDS (1)..(1191): transl_table=11
atgtttgaacatattaaagcggcaccagccgatcccatcttaggcttaggcgaagcattcaaatctgaaactcgcgaaaataaaattaacttgggcattggcgtttataaagatgcgcaaggcacaaccccgattatgcgtgcagtgaaagaagcagaaaaacgcttatttgataaggaaaaaacgaaaaattatctgactatcgatggtattgctgattataacgaacaaacaaaagcgttacttttcggtaaagattctgaagtcatcaaatctaatcgtgcaagaacagtacaaagtttaggcggaacaggcgcattacgcattgcggcagaatttattaaacgtcaaactaaagcacaaaatgtttggatcagcaccccaacttggccaaaccacaatgcgattttcaatgccgtcggtatgacaattcgtgaatatcgttattatgatgctgaacgcaaagcccttgattgggatcatttacttgaagatttaagccaagcaagcgaaggcgatgtggtgcttttacacggttgttgccataatccgactggtattgaccctactccagaacaatggcaagaattagccgcactttcggcgaaaaacggctggttgccactctttgactttgcttatcaaggtttagcaaatggcttagatgaagatgcttatggcttgcgtgcttttgcggcaaaccacaaagaattgttagtagcgagttcattctcgaaaaactttggtttatataatgaacgtgttggtgcctttactcttgtggcagaaaatgcagaaattgcatcaaccacattaacccaagtgaaatcaattattcgtacactctactctaaccctgcatctcacggtggcgcaactgtagcaacagtattaaatgacactcaacttcgccaagagtgggaaaatgaattaactgaaatgcgtgaacgtatcaaaaaaatgcgtcatttattcgttcagttattaaaagaatatggtgcagaacaagatttcagctttatcattgaacaaaacggtatgttctctttcagtggattaacaggggaacaagtggatcgcttaaaagaagaatttgcaatttacgctgttcgttctggtcgtatcaatgtggctggtattactgaagataatattcgctatttatgtgaaagcattgtgaaagtgctttaa

SEQ ID NO: 90882 - protein, 396 aa, Haemophilus influenzae R2866
MFEHIKAAPADPILGLGEAFKSETRENKINLGIGVYKDAQGTTPIMRAVKEAEKRLFDKEKTKNYLTIDGIADYNEQTKALLFGKDSEVIKSNRARTVQSLGGTGALRIAAEFIKRQTKAQNVWISTPTWPNHNAIFNAVGMTIREYRYYDAERKALDWDHLLEDLSQASEGDVVLLHGCCHNPTGIDPTPEQWQELAALSAKNGWLPLFDFAYQGLANGLDEDAYGLRAFAANHKELLVASSFSKNFGLYNERVGAFTLVAENAEIASTTLTQVKSIIRTLYSNPASHGGATVATVLNDTQLRQEWENELTEMRERIKKMRHLFVQLLKEYGAEQDFSFIIEQNGMFSFSGLTGEQVDRLKEEFAIYAVRSGRINVAGITEDNIRYLCESIVKVL

SEQ ID NO: 90883 - DNA, 1203 bp, Xylella fastidiosa Ann-1
  CDS (1)..(1203): transl_table=11
gtgcccttatttacagatgtggaattggttccgggtgatcccattttgagcctcaacgatgcttataacgccgatacgcgtaccaacaaggtcaatttgggtattggtatttattgtgacgagagcggttgtatcccgctgttgcgggctgtccagcaggttgaagagcaacttgcgaagcatccgaaaccgcgcggttatctgccgattgatggtttgccagcctatatcaaagccacacaacaattgttgtttggagttgactccctcttgttgacggctggccgtgtggcgacttcacagactgttggaggttctggtgcattgcgggtggctgctgaggtactgaagcaggtgctaccgcatgccactgtggccattagccgtccaagctgggagaaccaccgtgctttgttcaccgctgctggcttcaagattgaggactatacctatttcgatacgctcggccacgcggtggactttactggaatggtggcggacttggcgaagctgcaaccaaagaccgtggtattacttcatggttgctgtcataacccaacgggtgccgatctcagcagggatcagtggaagcagcttgttgccttgttccaggaacgtcaattgctgccatgtattgatctggcttaccaaggattcaatcagggcattgatgcggatgcttatgccatacgtttgcttgccgaagaaggtattagtaactatgtagttgccaactcctactccaaatcgttctcgttgtatggcgagcgtgttggggggctgtcgatcgttgcttccaatactgagcaagctcaagcaatccagtcacaagtaaagcgtatcatccgtacgatttattccagtccgccggcacacggtgcctacttggtcgcgagcgtgctgaacagtcatgaattgcgcacgctgtgggagcaggagttagctcagatgcgtgaacgtatccacgggttgcgtgcgggtttggttactcgattgaaggcgctgggtgtgccggagtttgatttcatacaacgtcaagcaggcatgttttcgtattcggggttgagcaagatccaggtggatcgtttacgcgacgagttcgggatttatgcggtcagtagtggacgtatctgtctggctgcgttgagtcagcacaaattggaatacgtggcccaggctgtggtgaaggtgcatcaaggctga

SEQ ID NO: 90884 - protein, 400 aa, Xylella fastidiosa Ann-1
MPLFTDVELVPGDPILSLNDAYNADTRTNKVNLGIGIYCDESGCIPLLRAVQQVEEQLAKHPKPRGYLPIDGLPAYIKATQQLLFGVDSLLLTAGRVATSQTVGGSGALRVAAEVLKQVLPHATVAISRPSWENHRALFTAAGFKIEDYTYFDTLGHAVDFTGMVADLAKLQPKTVVLLHGCCHNPTGADLSRDQWKQLVALFQERQLLPCIDLAYQGFNQGIDADAYAIRLLAEEGISNYVVANSYSKSFSLYGERVGGLSIVASNTEQAQAIQSQVKRIIRTIYSSPPAHGAYLVASVLNSHELRTLWEQELAQMRERIHGLRAGLVTRLKALGVPEFDFIQRQAGMFSYSGLSKIQVDRLRDEFGIYAVSSGRICLAALSQHKLEYVAQAVVKVHQG

SEQ ID NO: 90885 - DNA, 1179 bp, Sulfitobacter sp. EE-36
  CDS (1)..(1179): transl_table=11
atgctcgacgcgcttgccgcccttcccgaagacccgatctggggtctgacctctgcctttcgcgccgatccgcgcagccacaagatcgacatggtcatcggcgtctaccgcgatgacaacggggccacgccgaatatgaaggcggtgcgcatggccgagcgcgccttggcgcaggacagtgcgccgaaaacctaccgcgctttggcgggcaatgcggtgttcaacgcgggcatggcgcggctggtcttgggcgatgcgcccgcgcggatcgcgcgcagccatgtgatccagacggtcggcgggacaggcgccttgcgcgtcctgggggatatgctggccagcctgcgccccgacaccacggtctggagcacggaccccggctatgtgaaccaccgtccgatattcgagggagccgggctgacgctgcagttgtatcgctggcaggccaagggcgacgcactggatcttgaccgcgtgctcgcggatctggcggcggcgaagccgggggatgtggtgctgctgcacggctgctgccacaaccccacgggcatcgatcccgatgcgaatatgtggcatgcgctggcccgattttgcgcggcgcgggggctgatcccgttgatcgacattgcctatcagggctttggccgcgggctcgacgaagatgcggcggggctgcgggtgatggtcgatgcggtgcccgtggcgatggttgcggcaagcgggtccaagaacatggggctatattgcgaacgtatcggggcggcgatggtgctggggccggatgcggcgtccatcgcccatgtgggtcgccacctagagacattgacccgcgcgaattattcgatgccccccgaacatggtgccgctgtcgcctgccatgtctttgacacccgcaccatctgggaggaagagctcaacagtatgcgcgcccgtgtccaatcgctgcggcagcaactggccgatgcgctggccgcgattgatgcggcccccgcatttcaggcgctgcggcaccatcgggggatgttttcgctgctgcccctcgcgcccgaccagatggagagcttgcgccgcgaccacgcgatctatggcacggccaccggacggatcaatatcgccggtctgcgcagcacgcagatcgaacaggtcgcggctgcgcttcgggaggtgtcacaggcgtga

SEQ ID NO: 90886 - protein, 392 aa, Sulfitobacter sp. EE-36
MLDALAALPEDPIWGLTSAFRADPRSHKIDMVIGVYRDDNGATPNMKAVRMAERALAQDSAPKTYRALAGNAVFNAGMARLVLGDAPARIARSHVIQTVGGTGALRVLGDMLASLRPDTTVWSTDPGYVNHRPIFEGAGLTLQLYRWQAKGDALDLDRVLADLAAAKPGDVVLLHGCCHNPTGIDPDANMWHALARFCAARGLIPLIDIAYQGFGRGLDEDAAGLRVMVDAVPVAMVAASGSKNMGLYCERIGAAMVLGPDAASIAHVGRHLETLTRANYSMPPEHGAAVACHVFDTRTIWEEELNSMRARVQSLRQQLADALAAIDAAPAFQALRHHRGMFSLLPLAPDQMESLRRDHAIYGTATGRINIAGLRSTQIEQVAAALREVSQA

SEQ ID NO: 90887 - DNA, 1179 bp, Roseovarius nubinhibens ISM
  CDS (1)..(1179): transl_table=11
atgctcagcaacctatcgcagcagcccgaggacaagatcctcgccctcatggcccagtatcgcgccgatccgcgcgacaccaaggtcgatctcggcgtcggggtctacaaggacgcaagcgggcacaccccgatcatgcgcgccgtcaaggcggccgagaaacggctctgggaagaggaacagaccaaatcctatgtggcgctcgcgggcgatcccggcttttccgacgcgatggtctcgctggtgctcggcgatgccgtggcccgcgatgccgtggcggcggcggcgaccccgggcggcaccggtgccgtgcgtcaggcgttcgagctgatccgcatggccaaccccaaggcgcggattttcgtgcccaacccgacctggcccaaccacctgagcatcctcaaatatctcggcatggaaacggtcacctaccgctatttcgacagcgccaccggtgccgtcgatttcgccgggatgcaggaagatctcgccgggctcaccgcaggcgatgtggtgctgctgcatggctgctgccacaacccaaccggcgccaacctgaccctgccggaatggcaggcggtgattgccgtgctcaatgacaagggcgcgatgccgatgatcgacatcgcctatcagggctttggcgacgggctcgacgccgatgccgccgccacccgtctggtggccaaatcctgccctgagacgctgatcgcggcgtcctgctcgaagaatttcggcatctaccgcgaacgcaccggcatcctgatggcggtgagccaaggccagaccgccgtggcgcaggacaatctcaacttcctgaaccggcagaacttttccttcccgcccgaccatggcgcgcggctggtgacgatgatcctcaatgatgacgcgctccgcgccgattggcaggccgagctcgaagaggtccgcaacggcatgctgggcctgcgcgaaagcctcgcggatgagctgcgcaaactctccggctcggaccggttcggctttgtcgcacagcatcgcggcatgttctcgcgcctcggcgcaacgcccgaacaggtcgcccatatgcgcgagcatcacggcatctacatggtgggcgacagccgcatcaacatcgccgggctcaacgtcaaatcggtgccgatcctcgccaaggcgatgatcgacgcaggcgtctga

SEQ ID NO: 90888 - protein, 392 aa, Roseovarius nubinhibens ISM
MLSNLSQQPEDKILALMAQYRADPRDTKVDLGVGVYKDASGHTPIMRAVKAAEKRLWEEEQTKSYVALAGDPGFSDAMVSLVLGDAVARDAVAAAATPGGTGAVRQAFELIRMANPKARIFVPNPTWPNHLSILKYLGMETVTYRYFDSATGAVDFAGMQEDLAGLTAGDVVLLHGCCHNPTGANLTLPEWQAVIAVLNDKGAMPMIDIAYQGFGDGLDADAAATRLVAKSCPETLIAASCSKNFGIYRERTGILMAVSQGQTAVAQDNLNFLNRQNFSFPPDHGARLVTMILNDDALRADWQAELEEVRNGMLGLRESLADELRKLSGSDRFGFVAQHRGMFSRLGATPEQVAHMREHHGIYMVGDSRINIAGLNVKSVPILAKAMIDAGV

SEQ ID NO: 90889 - DNA, 1185 bp, Oceanicola batsensis HTCC2597
  CDS (1)..(1185): transl_table=11
ttgttcgcagagctgcgcccccagcccgatgatccgatcctcgccctgatggaccggttccgggccgacccgcgcgcggacaagatcgacctcggcgttggggtctacaggaacagccggggcgtgacgcccgtgatgcaggccgtgaaatctgccgagcagcaactgctcgaacggcaggaaagcaagagctatacgggcctcgccggggatcccgctttcgtcgcggcgatgacgcggctcgtgctgggcggagaaatcgacgccgagcgcatcgccggcgccgcgaccgtgggcgggaccggtgcgctccggcaggccctcgatctggcgcgcttggcaagcccgggcgcgacggttcacattcccgatcccagctggcccaaccaccgggcgatcatcgaggcggtcgggctgtcctgccgcagctaccggtattacgacccggcagccggcggcatcgacatcgaggggatgattgccgacctcgccgcggcagagcccggggatgtcgttgtccttcatggctgctgtcacaatccgacaggcgccgatccgacggccgcgcaatggcacgatatcgtcgaggcgctccgcacatcccgtgcaaccgttctgatcgaccttgcgtatctggggttcggcgaggggctggatgcggatgccgccgcgacccgtctcgttgcgcggcaactgcccgaggtgatcgtggcggtgagttgctccaagaacttcggtctctatcgcgaccgggccggggtcgtgcttgtcctgtcagagaccggtgcgcatcgcgatgtggttcagggcaacctcgccacgctgaaccggctggcctattcctttcccgccgatcacggggcgaaggtggccgaaacgatcctgaacgatcctgcgctccatgcgtcctggaccgaggagctgggccagatgcgggggcggatcaacgagttgcgccggagcttggccgatgccctgcggtccgagaccggctcggaccgcttcgcctttctggcgtctcagaacggcatgttctcgcgtctggcggtgccaccggaggacatccgtcggctgcgcgaggagaaggcgatctatctgatcggagacgggcgcctgaatgtcgccgggctgaacgccgaggacatcccgcgcctcgcccgggcaatcgccgagatcagcccctag

SEQ ID NO: 90890 - protein, 394 aa, Oceanicola batsensis HTCC2597
MFAELRPQPDDPILALMDRFRADPRADKIDLGVGVYRNSRGVTPVMQAVKSAEQQLLERQESKSYTGLAGDPAFVAAMTRLVLGGEIDAERIAGAATVGGTGALRQALDLARLASPGATVHIPDPSWPNHRAIIEAVGLSCRSYRYYDPAAGGIDIEGMIADLAAAEPGDVVVLHGCCHNPTGADPTAAQWHDIVEALRTSRATVLIDLAYLGFGEGLDADAAATRLVARQLPEVIVAVSCSKNFGLYRDRAGVVLVLSETGAHRDVVQGNLATLNRLAYSFPADHGAKVAETILNDPALHASWTEELGQMRGRINELRRSLADALRSETGSDRFAFLASQNGMFSRLAVPPEDIRRLREEKAIYLIGDGRLNVAGLNAEDIPRLARAIAEISP

SEQ ID NO: 90891 - DNA, 1191 bp, Photobacterium sp. SKA34
  CDS (1)..(1191): transl_table=11
atgtttgagaaaattacggcagctcctgctgatccaattttaggtttaacagaagaattcaaagcagatacacgcgcaacaaagattaatctaggcgttggtatttataaagatgaaacaggtaatacgcctgttcttgctactgtaaaaaaagcagaagctattttgcttgaaaaagaaaaaacaaaatcatacttaagcattccaggtacgccagaatacggcctagccgttcaagagctgctttttggtaacgatgcaacaatcatcactgaaaaacgcgcacaaacagctcaagcaccaggtggtactggtgcgttacgtgttgctgcagaatttattaagcgacaattaggcgatgtaaaagtatggatcagtaatcctacttgggctaaccaccacggcgtctttggtgcagctggtcttgaaacacagccatactcttactataacgctgaaacaagtgatattgactttgacgcagcaattactgatttaagccaagctagccaaggtgatattgttcttctgcatggttgctgccataacccaacaggtattgacccaacaacagagcaatggcaaacactagcaaaactttgcattgaaaaaaagctactaccaatgtttgattttgcttatcaaggttttgcacgcggcgtagaagatgatgcgcaaggtttacgcatctttgcagatcaactgccagaattactggtagcgagctctttctctaagaactttggtttatacaatgagcgtgtaggcgcatttacacttgtaggtaaaacagcagagcaagcagcaacggcatttagccaagtgaaatctatcgcacgtgttatttattctaacccacccgctcacggtgctgcgattgttacaacaatcctaaataacgctgagcttcgtgcagaatgggaacaagaagttgctgatatgcgtgatcgtatccaagaaatgcgtacgctatttgtaaacacattaaaagagctgggtgtaactaacgactttagctttattgaacgtcaaaacggtatgttctcgttctctggtttatctaaagagcaagtaacacaacttaaaaatgattttgcgatttatattgttggttcaggccgtattagtgttgcgggtatgacaaaagataatatgatgcctttatgtaaaggtattgctgccgtcttataa

SEQ ID NO: 90892 - protein, 396 aa, Photobacterium sp. SKA34
MFEKITAAPADPILGLTEEFKADTRATKINLGVGIYKDETGNTPVLATVKKAEAILLEKEKTKSYLSIPGTPEYGLAVQELLFGNDATIITEKRAQTAQAPGGTGALRVAAEFIKRQLGDVKVWISNPTWANHHGVFGAAGLETQPYSYYNAETSDIDFDAAITDLSQASQGDIVLLHGCCHNPTGIDPTTEQWQTLAKLCIEKKLLPMFDFAYQGFARGVEDDAQGLRIFADQLPELLVASSFSKNFGLYNERVGAFTLVGKTAEQAATAFSQVKSIARVIYSNPPAHGAAIVTTILNNAELRAEWEQEVADMRDRIQEMRTLFVNTLKELGVTNDFSFIERQNGMFSFSGLSKEQVTQLKNDFAIYIVGSGRISVAGMTKDNMMPLCKGIAAVL

SEQ ID NO: 90893 - DNA, 1182 bp, Photobacterium sp. SKA34
  CDS (1)..(1182): transl_table=11
atgtttaaatctctctctccagcccaattagatcctattctttccctatcgatcgcatatcgagaagatccgcgtgacaacaaaatagatttaggtgtcggtgtttaccgcaatagtcttggtgaaacaccgatcatgcaagcagttcaacttgctgagcaacgtttaattaaaacacaaacaacaaaatcatacgtgagtttagcgggtagcgaagtatttaatcagtctatgatggatcttttactctcagatacatcggcacattctcgcgctgcagcagtgcaaactccgggtgcgagtggtgcgttacgtatgcttgctgatcttattcaagttgctcaacctgatactactgtttggttaaccaatccgagttatgttaaccataaacctgtgatggaagcggcaggtttaaaggtgaagtattacccatattttgagcctgaaactaagcaagttaatagcgatgcaatgctcaaagagattgccaaagcaggtccaaaagatgttgtgctattacatggttgctgccataacccgacaggtgctgatattacatttgctgattggcaagcgattacggcattggcaaacaaaaatggctttatgccgtttgtcgatatggcatatcttggttttggagatggcttagaacaagatggcgctggccttaagtacatggctgacaatatagaagagatggttgtagcgacttcttgttcaaagaactttggtttgtaccgtgaacgaacgggtgctgcgattattattagtaatagtcagcaagaagcacaaaaagcgaaaggacgtgttcttactttagcgcgttcaagttataccatgccaccagatcatggcgcggcattagttgctgatattttaaatgatcaacaactgacaactatctggaaagatgaattatataccatgcatagccgcattttgacgttacgccaagggttaacacaagcaatacgtcaacgtggtagtgagcaatttgattttattgaacagcataaaggtatgttctctgtaactggcttaacgcctgagcagattttaacggtacgtaagaagtatggtatttatgcggtaggtgatgggcgaattaatattgccggtttacaagagcagcatatcgaccacttggcagatgccttagttagcgtatcacgataa

SEQ ID NO: 90894 - protein, 393 aa, Photobacterium sp. SKA34
MFKSLSPAQLDPILSLSIAYREDPRDNKIDLGVGVYRNSLGETPIMQAVQLAEQRLIKTQTTKSYVSLAGSEVFNQSMMDLLLSDTSAHSRAAAVQTPGASGALRMLADLIQVAQPDTTVWLTNPSYVNHKPVMEAAGLKVKYYPYFEPETKQVNSDAMLKEIAKAGPKDVVLLHGCCHNPTGADITFADWQAITALANKNGFMPFVDMAYLGFGDGLEQDGAGLKYMADNIEEMVVATSCSKNFGLYRERTGAAIIISNSQQEAQKAKGRVLTLARSSYTMPPDHGAALVADILNDQQLTTIWKDELYTMHSRILTLRQGLTQAIRQRGSEQFDFIEQHKGMFSVTGLTPEQILTVRKKYGIYAVGDGRINIAGLQEQHIDHLADALVSVSR

SEQ ID NO: 90895 - DNA, 1200 bp, Oceanospirillum sp. MED92
  CDS (1)..(1200): transl_table=11
atgttcgaaggtttacacgcagttccccaagatccgattctagcgatgctggcgagctatcgagaagatacacacccgcagaaaatcgatctgggtatcggggtttataaaaatgatcagggtgataccccgattatgcgagcggtacaggtagcagaggccagactgctggcgactgaaaccacaaagagttatacagctcccgctggctcgcctgtttataacgaacgtgtcgctaagttggtttttggttcagaccatcctgtacttaacgataagcgagttgtttcagctcagaccccgggtggctgtggagccctacgcatggcggctgagtttctaagaggctgtaacgaggatagtaaggtatgggttagcacacccacgtgggcaaatcatatgcctttgttgggtggtgcgggtctagagatctgcatgtacccatactacgaccatgacaacaaaaacatcgattttcaggcgatgcttgatgcgctggaaagcgctgtggcaggggatatcgtgttgcttcatggttgctgccataacccaagtggcgctgaccttaataaagaacagtggcatgccatagcagatctgatggagcgcaagggcctgattccatttgtcgatatggcctatcagggcctaggtgcaggaatcgatgaagatgcctacggcttgcgtatgttggctgcacgtttcccggaaatggttgcagcgacttcctgctcaaagaactttggcctctatcgggagcgcacaggcacgctgtttattgttgcagcaacaccagagcaggcagcaaatgccggcagtcagctgttcagtaagatccgtagtcattactccatgccaccttctcatggtgcagccattgtagaaaccattctgggtgataccgagctttctcagacctggttggatgagctggctgtgatgcgtaaccgcattcaagggttacgtcagagtctggttgcaaaaattagagattcagcgatcgatcgtgacttctcttttatagagcagcaatttggcatgttctcctttctggggattaccagtgctcaggtcgaggcactgcgttcacagcacagtatttacatgattgattccagccgcatgaacgtagcgggtttgaatgatgaatgtatggactatttcgtatctgcgttaggcgaggtattgcgagccagctaa

SEQ ID NO: 90896 - protein, 399 aa, Oceanospirillum sp. MED92
MFEGLHAVPQDPILAMLASYREDTHPQKIDLGIGVYKNDQGDTPIMRAVQVAEARLLATETTKSYTAPAGSPVYNERVAKLVFGSDHPVLNDKRVVSAQTPGGCGALRMAAEFLRGCNEDSKVWVSTPTWANHMPLLGGAGLEICMYPYYDHDNKNIDFQAMLDALESAVAGDIVLLHGCCHNPSGADLNKEQWHAIADLMERKGLIPFVDMAYQGLGAGIDEDAYGLRMLAARFPEMVAATSCSKNFGLYRERTGTLFIVAATPEQAANAGSQLFSKIRSHYSMPPSHGAAIVETILGDTELSQTWLDELAVMRNRIQGLRQSLVAKIRDSAIDRDFSFIEQQFGMFSFLGITSAQVEALRSQHSIYMIDSSRMNVAGLNDECMDYFVSALGEVLRAS

SEQ ID NO: 90897 - DNA, 1188 bp, Oceanospirillum sp. MED92
  CDS (1)..(1188): transl_table=11
atgttttctgagttaatggcaccaccagcggatccaatccttggcttgtctattaaattcaaagccgacgaaaatccgaacaaaatcgatcttggtcctggtatctataaagacgaagccggcaatacaccggttctggcttgcgttaaaactgctgaaaaactccgcgtagacaacgaaacaacgaaaacctacctgggttcagcaggctcctccctgtttaatgacaagatcgctgatctgttactgggcgagcatgacattattaaacaaaatcgtatccgtacagtatccacccctggcggcacaggcgcactgcgtcttgcgggtgagttcctgaaaacctgtaaagcgggtgcgactatctgggttagcaacccgacatgggctaaccatcaaggtgttttcacagcagccggcctgactgttaaaacctacccgtactacgattatgaaaacaaatgcctggactttgcagcgatgactgaagcgctgaaacaagttccggcaggcgatgctgttctattacacgcatgctgccataacccaagcggcatggacctgaacaatgagcagtggcaacaagttgcagaattagccaaagaaaaaggctttatgccagtgatcgacattgcgtaccagggcttcggcaatggtctcgatgaagatgcctacggtctgcgcctgatggctaacaccgttgacgagctgattgtgtgcagctcatgctctaagaacttcggcctataccgtgagcgtatcggcggttgctccatcatcggtaaagacgcagcttctgcagacattatcggcgcagtgctaaaccgcgttgtacgtgttctgtattctatgccacctgcacatggcgcagcgattgttgaaacaatcctaagctcggaagagctgtccgctcagtggcacgcagaactgaaagagatgcgcgatcgcatcaacggaacacgccagctcttggttgagaaactagctgaaaaaggcgttactcaggactttagctttatcacgcgccaaaacggaatgttctcattcctgggcatcgatcaggcacaggtaacccgcctacaggacgagttcagcatctacgttgtggattccagccgcatcaacgtggcaggcatctctcagtcaaacgttgattacctgactgagtccctggctaagattctataa

SEQ ID NO: 90898 - protein, 395 aa, Oceanospirillum sp. MED92
MFSELMAPPADPILGLSIKFKADENPNKIDLGPGIYKDEAGNTPVLACVKTAEKLRVDNETTKTYLGSAGSSLFNDKIADLLLGEHDIIKQNRIRTVSTPGGTGALRLAGEFLKTCKAGATIWVSNPTWANHQGVFTAAGLTVKTYPYYDYENKCLDFAAMTEALKQVPAGDAVLLHACCHNPSGMDLNNEQWQQVAELAKEKGFMPVIDIAYQGFGNGLDEDAYGLRLMANTVDELIVCSSCSKNFGLYRERIGGCSIIGKDAASADIIGAVLNRVVRVLYSMPPAHGAAIVETILSSEELSAQWHAELKEMRDRINGTRQLLVEKLAEKGVTQDFSFITRQNGMFSFLGIDQAQVTRLQDEFSIYVVDSSRINVAGISQSNVDYLTESLAKIL

SEQ ID NO: 90899 - DNA, 1197 bp, Oceanospirillum sp. MED92
  CDS (1)..(1197): transl_table=11
atgctggagcatattgatgcagagcttgaggacccaattctaaaagtaatggccagtttcaaagcctctactgtttctcataaactggatctcggtattggcgtctatcgcgatagcaagggtaaaacaccgatttttaaagcggtcaaagaagctgagctcatcattcaaatgcaggagaccagtaaagcctatctggggcctgttggtgatacccaatataccggactgatccatcagcttttgtttggccagcttgattgcccccccgattttttccaaatcattcaaaccccaggtggtacgggtgcgctcagggttgctggggagtttttacacagcgcgctacccttcgcaactttgtggctttcagaccccgcctggtctacgcacaagcctatcttttccggggcacaactgcctactaaggagtatcgttactttgatcatgaaactcgtgtgctggattttgccgccatgtgcgaagatattgcagccatcccaacaggcgatatcgtcctgctgcagagctgtggtcacaaccccagcggctgcaatcttagttatgagcaatggctaagcgtttcgcaattaatggccgatagagggcttttacctttactcgatctggcctatcacgggctagatcagggtcagattttggatcttcaatcaattaaagcgattgaagcacaccatgatgagtggttgctttgctattcagcttcgaaaaccttcagtctatacaacgacagaaccggcgcgttggcagttagaaacagaaccattcaaaacgcccatcacgcgcttagcctgatcctgaatctggtgtgcgcaaactactatatgccacctgctcatggcgcatcggtggttcggaccattcttacaagctctgacctcacagagctctggaaacatgaacttgaagccgcccgaactagaattattgactgcagaaaagcgcttatcgatgctttatcaagttcggggaccgatgactatcagttcctcgaacgccaagagggtatgtttgcctatctgggcctgacagaaaaagagctagcttggctaagggaaaagcatgctctctattttggtccgggtggtcgtctgaacattgccggtttaaacccgcagagtcttccgcaaatcagccaagcgttgactgaacttgcgaaaaaaaaacggggctaa

SEQ ID NO: 90900 - protein, 398 aa, Oceanospirillum sp. MED92
MLEHIDAELEDPILKVMASFKASTVSHKLDLGIGVYRDSKGKTPIFKAVKEAELIIQMQETSKAYLGPVGDTQYTGLIHQLLFGQLDCPPDFFQIIQTPGGTGALRVAGEFLHSALPFATLWLSDPAWSTHKPIFSGAQLPTKEYRYFDHETRVLDFAAMCEDIAAIPTGDIVLLQSCGHNPSGCNLSYEQWLSVSQLMADRGLLPLLDLAYHGLDQGQILDLQSIKAIEAHHDEWLLCYSASKTFSLYNDRTGALAVRNRTIQNAHHALSLILNLVCANYYMPPAHGASVVRTILTSSDLTELWKHELEAARTRIIDCRKALIDALSSSGTDDYQFLERQEGMFAYLGLTEKELAWLREKHALYFGPGGRLNIAGLNPQSLPQISQALTELAKKKRG

SEQ ID NO: 90901 - DNA, 1194 bp, gamma proteobacterium HTCC2207
  CDS (1)..(1194): transl_table=11
atgtttgaaagtttaaagcccgtagttgctgatcctattcttggattgatggcggcttttcgagaagacccgcgcgagactaaaatcgatttaggcgttggcgtctatatgaatgaccgcggtcaaacgccggttatggattcggtaaaacgcgccgaagccaaattggccgagcttgagaaaaccaaatcctatcaaggcattgctggcgatgctgagtacaacagcagaatgttgcagttgatgtttggtcaggatcacgctgttctggcatctggacgagctaagagcctgcaggccccaggtggttctggcgctttgagagtcggtgctgaggtgattcgtcgcgctcgccccgaggcaaaattatgggttggcacacccacctggccgaaccatatcccactgcttggcagtgcgggttttgagattgcagaatatccctattacgacacagcgactcgcgaggtcaatattgacctaatgcttgagactctgcgccgggttcccgctggtgatgtggtgctgttgcatggttgctgtcataacccgactggcgcggatctgagcaacgaacagtgggaccagattactgagattgcgctggagcgcggttttgtaccctttattgacaccgcctatcaggggcttggtgatggcttggacgaagatgcctacggcatgcgtctgatggctgagaagttaccggagttggtagtggcctcgagctgctctaagaactttggtctctaccgcgagcgcactggatcgattacctttattacacaaactcctgagcaagctgcaattgtcggcggtcaggccatggcggtcgcccgtcagatgtactccatgccacctgctcacggcgctctgttagtctcgttaattctgggcgatgaagcgctttgtaaggactggaaagcggagctggaagaggttcgcctgcgaatcaaagctatgcgtacattgctggccgacagtattcaggacaatgcagcaggactggattttagtcatatcaagcgccagaacggcatgttctcgttcttgggtattgcgccagagcacctgacgcgcctgagagaagagtttggtatctatattgtctcttcaactcgtattaacttggcgggcattaactcaagcaatattgcctatcttgctgagtcgattcgcactgtactcaagtag

SEQ ID NO: 90902 - protein, 397 aa, gamma proteobacterium HTCC2207
MFESLKPVVADPILGLMAAFREDPRETKIDLGVGVYMNDRGQTPVMDSVKRAEAKLAELEKTKSYQGIAGDAEYNSRMLQLMFGQDHAVLASGRAKSLQAPGGSGALRVGAEVIRRARPEAKLWVGTPTWPNHIPLLGSAGFEIAEYPYYDTATREVNIDLMLETLRRVPAGDVVLLHGCCHNPTGADLSNEQWDQITEIALERGFVPFIDTAYQGLGDGLDEDAYGMRLMAEKLPELVVASSCSKNFGLYRERTGSITFITQTPEQAAIVGGQAMAVARQMYSMPPAHGALLVSLILGDEALCKDWKAELEEVRLRIKAMRTLLADSIQDNAAGLDFSHIKRQNGMFSFLGIAPEHLTRLREEFGIYIVSSTRINLAGINSSNIAYLAESIRTVLK

SEQ ID NO: 90903 - DNA, 1191 bp, Alteromonadales bacterium TW-7
  CDS (1)..(1191): transl_table=11
atgttctcagtattaaaaccattaccaaccgatcctattcttggccttatggcggcctataaaaaagatacaaaccctaataaaattgatttaggtgtgggtgtttataaagatgagcacggtaatacacctgtattaaacgcagtgaagaaagcagaagcatttcgcttagaaaatgaaacaagcaaatcttatattggcttagcaggtaacttagactactgtcaaaaaatggaacagctattacttggtgagcaccaagcattattagcaaatcgcgtgcgtacagcacaagcaccaggtggtacaggtgcgcttcgtgttgctgctgagtttattaagcgttgtaatacagatgcaactgtatgggttactacacctacttgggcaaaccatattagtttatttgaagctgcgggtttaaccgtaaaagaatacccgtactacgactacgaaaataaagacctgctgtttgatgagatgatcaatacccttaagcaagtaccaaagggtgatgtagtgctattacacgcatgctgtcataacccaagtggaatggatttaaacgaagctcagtggaacacagtagcagagcttgctaaagaagttggctttacaccattagtggatatagcttaccaaggctttggctcttcactagaagaagatgcgcgcggacttcgtattttagctgatgccgttgaagagttaattatttgctcatcgtgctctaaaaactttggtttatatcgtgagcgtatcggtgcatgttcattaattgcaaaagacagtgcgacagctgatgtgtcaaactcagtaatgttaagtgtggtacgtagcatttattcaatgcctccggcacatggtgctgatattgttaacactattttaagcagtacagagcttacgcaaatgtggcatgctgaacttgatgaaatgcgtacgcgtattaatggccttcgtagtttaattaaagaaagcttagcatcaaaagacatagcacaagacttttcatttattgaacgtcaacacggtatgttttcgttcttgggtattaataaagagcaaattgagcgattacaaaaagagtacggcatatacattgttggctcaagtcgtgtcaacgtagccggtgttagcaaagcaaaccttgattactttgcaaatgcagttgctgacgtttgtaaataa

SEQ ID NO: 90904 - protein, 396 aa, Alteromonadales bacterium TW-7
MFSVLKPLPTDPILGLMAAYKKDTNPNKIDLGVGVYKDEHGNTPVLNAVKKAEAFRLENETSKSYIGLAGNLDYCQKMEQLLLGEHQALLANRVRTAQAPGGTGALRVAAEFIKRCNTDATVWVTTPTWANHISLFEAAGLTVKEYPYYDYENKDLLFDEMINTLKQVPKGDVVLLHACCHNPSGMDLNEAQWNTVAELAKEVGFTPLVDIAYQGFGSSLEEDARGLRILADAVEELIICSSCSKNFGLYRERIGACSLIAKDSATADVSNSVMLSVVRSIYSMPPAHGADIVNTILSSTELTQMWHAELDEMRTRINGLRSLIKESLASKDIAQDFSFIERQHGMFSFLGINKEQIERLQKEYGIYIVGSSRVNVAGVSKANLDYFANAVADVCK

SEQ ID NO: 90905 - DNA, 1188 bp, marine gamma proteobacterium HTCC2143; identical to SEQ ID NO: 66563
  CDS (1)..(1188): transl_table=11

SEQ ID NO: 90906 - protein, 395 aa, marine gamma proteobacterium HTCC2143; identical to SEQ ID NO: 66564

SEQ ID NO: 90907 - DNA, 1197 bp, Pseudomonas putida GB-1
  CDS (1)..(1197): transl_table=11
atgagcctgttttccgctgtcgagctggcaccccgcgaccctatcctgggcctcaacgaagcattcaacgccgacccacgtaccgacaaggtcaacctgggcgtgggcgtgtactgcaatgaggaaggccgcatcccgctgctgcgcgccgtgatcgaagccgagacccagcgtgccgcacagcacgcctcgcgcggctacctgccgatcgacggcatcgccacttatgaccaggccgtgcaaaagctgatcttcggcgccgagtcgccactgctggccgctggccgtgtggtcaccgtacaggccgtcggtggtaccggcgcactgaaaatcggtgccgacttcctcaagcgcatctcgcctgacgccgtggtcgccatcagcgacccaagctgggaaaaccatcgcgcgctgttcgagtcggccggtttcccggtgcagacctatcgctactacgatgcgccgaccaacgatgtgaaccgcggcggcatgctggaagacctcaacgccctgccatcgggctcgatcgtcgtgctgcacgcctgctgccacaacccgaccggcgtcgacctgaacctggacgactggaaaaatgtcctggaggtggtcaaggccaagggccacgtgccgttcctcgacatggcctaccagggctttggtgatggcatcgccgaagacgccttcgccgttcgcctgttcgccgagtcgggcctggagttctttgtttccagctcgttctccaaatcgttctcgctgtacggcgagcgcgtcggcgcactgtcggtcgtcaccgcctccaaggacgagagcactcgcgtgctgtcgcaggtcaagcgcgtgatccgcaccacttactccaacccaccaacccacggtgcaaccatcgtagccaccgtgctgaacagcgccgaactgcgccagatgtgggaaaccgaactgggcgaaatgcgccagcgcatccacggcatgcgcaagcagatggtttcgctgctggccgaatatggcgccaatcgcgacttcagcttcgttggccgccaggtcggcatgttctcctactcgggcctgaccgttgatcaggtggcccgcctgaagaacgatttcggcatctacgccctggacaccggccgtatcgccgtggccgcgctgaaccagagcaacatccatgtggtcaccaaggctatcgtggaagtgctgtaa

SEQ ID NO: 90908 - protein, 398 aa, Pseudomonas putida GB-1
MSLFSAVELAPRDPILGLNEAFNADPRTDKVNLGVGVYCNEEGRIPLLRAVIEAETQRAAQHASRGYLPIDGIATYDQAVQKLIFGAESPLLAAGRVVTVQAVGGTGALKIGADFLKRISPDAVVAISDPSWENHRALFESAGFPVQTYRYYDAPTNDVNRGGMLEDLNALPSGSIVVLHACCHNPTGVDLNLDDWKNVLEVVKAKGHVPFLDMAYQGFGDGIAEDAFAVRLFAESGLEFFVSSSFSKSFSLYGERVGALSVVTASKDESTRVLSQVKRVIRTTYSNPPTHGATIVATVLNSAELRQMWETELGEMRQRIHGMRKQMVSLLAEYGANRDFSFVGRQVGMFSYSGLTVDQVARLKNDFGIYALDTGRIAVAALNQSNIHVVTKAIVEVL

SEQ ID NO: 90909 - DNA, 1185 bp, Marinobacter sp. ELB17
  CDS (1)..(1185): transl_table=11
atgtttgagtcgctgaagcagttacctcaggatccgatcctgcaactgatgcagatgtttcgcgacgacacccggcccgacaaggtcgatctgggtgtcggggtctataaggatgatgcgggcaagacgcccatcatggggtcggtacacgaagccgagcggcgcctgcttgagggagaaacgaccaaaagctatgtcgggccggccggagccgctggtttcaacgcggccatggcgcgcctcatcctggggaacggtaacagcctgatccgtgatggccgtacctcggtgattcagacgccgggcggttgtggtgctctgcgcatggccgcagaattttttcggctgtgtcagcctgacaccacggtctgggtcagcacgcccacttgggccaaccacatgccgttgttggggggtgccgggctgaatattcgtgaatattcctatctcaatagagaaacgttcacggtagattttcccgccatgctcgagacgctggaaggcgccagatcaggggatgtggtgctgctacacggctgctgccacaacccctccggtgccgacctgacgtttgatcaatggaaggccgttacccaaatgatccagcgcaaggggctgctgccctttgtggatatggcctaccagggtctgggtgagggtcttgaggaagatgcagccggtgttcggtatctggcgggccaggtaccggaaatggtgattgctgcttcctgctccaagaacttcggcttgtatcgggaacgcaccggtgccctgatgctgatttctgcaaccggcttgattaacacggcggccaccagccagctgttgagcgttgtacgttcccactattccatgccaccggctcatggcgccgccatcgttgaaaccattttaggtgatgacgccttgcgcgccggatggcagagcgaactaagcggtatgtgtgaccgtatccttggcctgcggcacgcctttgcggacgcactgactccggtgggtgactttggctttatcgcccggcagcgcggcatgttctcgttcctgggtataacaccggaacaggttcgccagttacgggaagagcatggcatctacatgctggaaagtagccgggtgaatgtagcaggcctgaatgaccgggtattgccaagagttgccagcgcgattcgcagtgttatgcagtaa

SEQ ID NO: 90910 - protein, 394 aa, Marinobacter sp. ELB17
MFESLKQLPQDPILQLMQMFRDDTRPDKVDLGVGVYKDDAGKTPIMGSVHEAERRLLEGETTKSYVGPAGAAGFNAAMARLILGNGNSLIRDGRTSVIQTPGGCGALRMAAEFFRLCQPDTTVWVSTPTWANHMPLLGGAGLNIREYSYLNRETFTVDFPAMLETLEGARSGDVVLLHGCCHNPSGADLTFDQWKAVTQMIQRKGLLPFVDMAYQGLGEGLEEDAAGVRYLAGQVPEMVIAASCSKNFGLYRERTGALMLISATGLINTAATSQLLSVVRSHYSMPPAHGAAIVETILGDDALRAGWQSELSGMCDRILGLRHAFADALTPVGDFGFIARQRGMFSFLGITPEQVRQLREEHGIYMLESSRVNVAGLNDRVLPRVASAIRSVMQ

SEQ ID NO: 90911 - DNA, 1685 bp, Lotus corniculatus; identical to SEQ ID NO: 66575
  CDS (119)..(1492)

SEQ ID NO: 90912 - protein, 457 aa, Lotus corniculatus; identical to SEQ ID NO: 66576

SEQ ID NO: 90913 - DNA, 1690 bp, Glycine max; identical to SEQ ID NO: 66577
  CDS (152)..(1522)

SEQ ID NO: 90914 - protein, 456 aa, Glycine max; identical to SEQ ID NO: 66578

SEQ ID NO: 90915 - DNA, 1737 bp, Canavalia lineata; identical to SEQ ID NO: 66579
  CDS (44)..(1441)

SEQ ID NO: 90916 - protein, 465 aa, Canavalia lineata; identical to SEQ ID NO: 66580

SEQ ID NO: 90917 - DNA, 2112 bp, Ajellomyces capsulata; identical to SEQ ID NO: 66581
  CDS (331)..(1614)

SEQ ID NO: 90918 - protein, 427 aa, Ajellomyces capsulata; identical to SEQ ID NO: 66582

SEQ ID NO: 90919 - DNA, 1248 bp, Aspergillus oryzae
  CDS (1)..(1248)
atgtctgcccaatacctcgacgtgcccgtccttcctacggatgttgcctttggcttgctagccgatttcgatgccgaccaagacccaaagaaagtctccttaattgctggagcctatcgggatgaaaagggcctaccttggatccttcccagcgtgaaacaagcgaaagagcgcattgcagccgacccaagatcgcatcatgagtatcttgatattgcagggtcccctgtatttttgaatattgccaggtccctcgtatttggaaccgagctagctgaaagctggaacgtcgcaagcatccaagctgtgtctggtaccggagcaaatcatctgggtgcttcatttcttgccaagcacttgaaaccccagcatgtctttatcccggaccctacctgggtaaaccacaaaacggtctgggctgtggcagcccctgaagtggctcagagagagtacccatactacgatccaaagacgcggtccattaagttcgccgatatgctttcgacactggacatagacgcacagccgaacgacgtggtcatccttcaagcatgtgcccataatcccacaggtctggacctaactcgggaccaatggaagcagctagcagacttagctttgaagaagaagctgttcgtcttgtttgacagtgcctaccaaggcttcgcaactggaaatgtagaagacgacgcatggtcagtgcggtatttcaccgagcatcttctatcgagcccagaccctgatcaaaggattcccggactatgcgttgcacagtctttctccaagaactttggactttacggtgaacgggtgggcgcattgcatttagtcgccccatcggacgtttccatacaaggagccaaatctcaactgtcactgattgcgcgagcagaatattctaatccgcctcgatttggtgctcagattgttcaaactgtcctcacggatccaaggctcagagagcaatggcagcaggatttgaacaccatgagctcgcgcataatgggcatgcggaagcaactgcggacgaggctggaagaccttgccacccctggagattggtctcacattgagtcccagattgggatgtttagttatacagggttgagtaaggagcatgttaataagctgaaggaggagtatcatatctatctaatgccctctggacgggctagtctctgcgggctgaatgaggggaatgttgactatgtcgcgaggtgcatctccaaggtagtgaaggaggtctga

SEQ ID NO: 90920 - protein, 415 aa, Aspergillus oryzae
MSAQYLDVPVLPTDVAFGLLADFDADQDPKKVSLIAGAYRDEKGLPWILPSVKQAKERIAADPRSHHEYLDIAGSPVFLNIARSLVFGTELAESWNVASIQAVSGTGANHLGASFLAKHLKPQHVFIPDPTWVNHKTVWAVAAPEVAQREYPYYDPKTRSIKFADMLSTLDIDAQPNDVVILQACAHNPTGLDLTRDQWKQLADLALKKKLFVLFDSAYQGFATGNVEDDAWSVRYFTEHLLSSPDPDQRIPGLCVAQSFSKNFGLYGERVGALHLVAPSDVSIQGAKSQLSLIARAEYSNPPRFGAQIVQTVLTDPRLREQWQQDLNTMSSRIMGMRKQLRTRLEDLATPGDWSHIESQIGMFSYTGLSKEHVNKLKEEYHIYLMPSGRASLCGLNEGNVDYVARCISKVVKEV

SEQ ID NO: 90921 - DNA, 1239 bp, Aspergillus oryzae; identical to SEQ ID NO: 66587
  CDS (1)..(1239)

SEQ ID NO: 90922 - protein, 412 aa, Aspergillus oryzae; identical to SEQ ID NO: 66588

SEQ ID NO: 90923 - DNA, 1254 bp, Aspergillus oryzae; identical to SEQ ID NO: 66589
  CDS (1)..(1254)

SEQ ID NO: 90924 - protein, 417 aa, Aspergillus oryzae; identical to SEQ ID NO: 66590

SEQ ID NO: 90925 - DNA, 1191 bp, Escherichia coli
  CDS (1)..(1191): transl_table=11
atgtttgagaacattaccgccgctcctgccgacccgattctgggcctggccgatctgtttcgtgccgatgaacgtcccggcaaaattaacctcgggattggtgtctataaagatgagacgggcaaaaccccggtactgaccagcgtgaaaaaggctgaacagtatctgctcgaaaatgaaaccaccaaaaattacctcggcattgacggcatccctgaatttggtcgctgcactcaggaactgctgtttggtaaaggtagcgccctgatcaatgacaaacgtgctcgcacggcacagactccggggggcactggcgcactacgcgtggctgccgatttcctggcaaaaaataccagcgttaagcgtgtgtgggtgagcaacccaagctggccgacccataagagcgtctttaactctgcaggtctggaagttcgtgaatacgcttattatgatgcggaaaatcacactcttgacttcgatgcactgattaacagcctgaatgaagctcaggctggcgacgtagtgctgttccatggctgctgccataacccaaccggtatcgaccctacgctggaacaatggcaaacactggcacaactctccgttgagaaaggctggttaccgctgtttgacttcgcttaccagggttttgcccgtggtctggaagaagatgctgaaggactgcgcgctttcgcggctatgcataaagagctgattgttgccagttcctactctaaaaactttggcctgtacaacgagcgtgttggcgcttgtactctggttgctgccgacagtgaaaccgttgattgcgcattcggccaaatgaaagcggcgattcgcgctaactactctaacccaccagcacacggcgcttctgttgttgccaccatcctgagcaacgatgcgttacgtgcgatttgggaacaagagctgactgatatgcgccagcgtattcagcgtatgcgtcagttgttcgtcaatacgctgcaggaaaaaggcgcaaaccgcgacttcagctttatcatcaaacagaacggcatgttctccttcagtggcctgacaaaagaacaagtgctgcgtctgcgcgaagagtttggcgtatatgcggttgcttctggtcgcgtaaatgtggccgggatgacaccagataacatggctccgctgtgcgaagcgattgtggcagtgctgtaa

SEQ ID NO: 90926 - protein, 396 aa, Escherichia coli
MFENITAAPADPILGLADLFRADERPGKINLGIGVYKDETGKTPVLTSVKKAEQYLLENETTKNYLGIDGIPEFGRCTQELLFGKGSALINDKRARTAQTPGGTGALRVAADFLAKNTSVKRVWVSNPSWPTHKSVFNSAGLEVREYAYYDAENHTLDFDALINSLNEAQAGDVVLFHGCCHNPTGIDPTLEQWQTLAQLSVEKGWLPLFDFAYQGFARGLEEDAEGLRAFAAMHKELIVASSYSKNFGLYNERVGACTLVAADSETVDCAFGQMKAAIRANYSNPPAHGASVVATILSNDALRAIWEQELTDMRQRIQRMRQLFVNTLQEKGANRDFSFIIKQNGMFSFSGLTKEQVLRLREEFGVYAVASGRVNVAGMTPDNMAPLCEAIVAVL

SEQ ID NO: 90927 - DNA, 1191 bp, Escherichia coli
  CDS (1)..(1191): transl_table=11
atgtttgagaacattaccgccgctcctgccgacccgattctgggcctggccgatctgtttcgtgccgatgaacgtcccggcaaaattaacctcgggattggtgtctataaagatgagacgggcaaaaccccggtactgaccagcgtgaaaaaggctgaacagtatctgctcgaaaatgaaaccaccaaaaattacctcggcattgacggcatccctgaatttggtcgctgcactcaggaactgctgtttggtaaaggtagcgccctgatcaatgacaaacgtgctcgcacggcacagactccggggggcactggcgcactacgcgtggctgccgatttcctggcaaaaaataccagcgttaagcgtgtgtgggtgagcaacccaagctggccgacccataagagcgtctttaactctgcaggtctggaagttcgtgaatacgcttattatgatgcggaaaatcacactcttgacttcgatgcactgattaacagcctgaatgaagctcaggctggcgacgtagtgctgttccatggctgctgccataacccaaccggtatcgaccctacgctggaacaatggcaaacactggcacaactctccgttgagaaaggctggttaccgctgtttgacttcgcttaccagggttttgcccgtggtctggaagaagatgctgaaggactgcgcgctttcgcggctatgcataaagagctgattgttgccagttcctactctaaaaactttggcctgtacaacgagcgtgttggcgcttgtactctggttgctgccgacagtgaaaccgttgatcgcgcattcagccaaatgaaagcggcgattcgcgctaactactctaacccaccagcacacggcgcttctgttgttgccaccatcctgagcaacgatgcgttacgtgcgatttgggaacaagagctgactgatatgcgccagcgtattcagcgtatgcgtcagttgttcgtcaatacgctgcaggaaaaaggcgcaaaccgcgacttcagctttatcatcaaacagaacggcatgttctccttcagtggcctgacaaaagaacaagtgctgcgtctgcgcgaagagtttggcgtatatgcggttgcttctggtcgcgtaaatgtggccgggatgacaccagataacatggctccgctgtgcgaagcgattgtggcagtgctgtaa

SEQ ID NO: 90928 - protein, 396 aa, Escherichia coli
MFENITAAPADPILGLADLFRADERPGKINLGIGVYKDETGKTPVLTSVKKAEQYLLENETTKNYLGIDGIPEFGRCTQELLFGKGSALINDKRARTAQTPGGTGALRVAADFLAKNTSVKRVWVSNPSWPTHKSVFNSAGLEVREYAYYDAENHTLDFDALINSLNEAQAGDVVLFHGCCHNPTGIDPTLEQWQTLAQLSVEKGWLPLFDFAYQGFARGLEEDAEGLRAFAAMHKELIVASSYSKNFGLYNERVGACTLVAADSETVDRAFSQMKAAIRANYSNPPAHGASVVATILSNDALRAIWEQELTDMRQRIQRMRQLFVNTLQEKGANRDFSFIIKQNGMFSFSGLTKEQVLRLREEFGVYAVASGRVNVAGMTPDNMAPLCEAIVAVL

SEQ ID NO: 90929 - DNA, 1191 bp, Escherichia coli
  CDS (1)..(1191): transl_table=11
atgtttgagaacatgaccgccgctcctgccgacccgattctgggcctggccgatctgtttcgtgccgatgaacgtcccggcaaaattaacctcgggattggtgtctataaagatgagacgggcaaaaccccggtactgaccagcgtgaaaaaggctgaacagtatctgctcgaaaatgaaaccaccaaaaattacctcggcattgacggcatccctgaatttggtcgctgcactcaggaactgctgtttggtaaaggtagcgccctgatcaatgacaaacgtgctcgcacggcacagactccggggggcactggcgcactacgcgtggctgccgatttcctggcaaaaaataccagcgttaagcgtgtgtgggtgagcaacccaagctggccgacccataagagcgtctttaactctgcaggtctggaagttcgtgaatacgcttattatgatgcggaaaatcacactcttgacttcgatgcactgattaacagcctgaatgaagctcaggctggcgacgtagtgctgttccatggctgctgccataacccaaccggtatcgaccctacgctggaacaatggcaaacactggcacaactctccgttgagaaaggctggttaccgctgtttgacttcgcttaccagggttttgcccgtggtctggaagaagatgctgaaggactgcgcgctttcgcggctatgcataaagagctgattgttgccagttcctactctaaaaactttggcctgtacaacgagcgtgttggcgcttgtactctggttgctgccgacagtgaaaccgttgatcgcgcattcagccaaatgaaagcggcgattcgcgctaactactctaacccaccagcacacggcgcttctgttgttgccaccatcctgagcaacgatgcgttacgtgcgatttgggaacaagagctgactgatatgcgccagcgtattcagcgtatgcgtcagttgttcgtcaatacgctgcaggaaaaaggcgcaaaccgcgacttcagctttatcatcaaacagaacggcatgttctccttcagtggcctgacaaaagaacaagtgctgcgtctgcgcgaagagtttggcgtatatgcggttgcttctggtcgcgtaaatgtggccgggatgacaccagataacatggctccgctgtgcgaagcgattgtggcagtgctgtaa

SEQ ID NO: 90930 - protein, 396 aa, Escherichia coli
MFENMTAAPADPILGLADLFRADERPGKINLGIGVYKDETGKTPVLTSVKKAEQYLLENETTKNYLGIDGIPEFGRCTQELLFGKGSALINDKRARTAQTPGGTGALRVAADFLAKNTSVKRVWVSNPSWPTHKSVFNSAGLEVREYAYYDAENHTLDFDALINSLNEAQAGDVVLFHGCCHNPTGIDPTLEQWQTLAQLSVEKGWLPLFDFAYQGFARGLEEDAEGLRAFAAMHKELIVASSYSKNFGLYNERVGACTLVAADSETVDRAFSQMKAAIRANYSNPPAHGASVVATILSNDALRAIWEQELTDMRQRIQRMRQLFVNTLQEKGANRDFSFIIKQNGMFSFSGLTKEQVLRLREEFGVYAVASGRVNVAGMTPDNMAPLCEAIVAVL

SEQ ID NO: 90931 - DNA, 1454 bp, Lupinus angustifolius; identical to SEQ ID NO: 66591
  CDS (37)..(1299)

SEQ ID NO: 90932 - protein, 420 aa, Lupinus angustifolius; identical to SEQ ID NO: 66592

SEQ ID NO: 90933 - DNA, 1755 bp, Glycine max; identical to SEQ ID NO: 66593
  CDS (73)..(1464)

SEQ ID NO: 90934 - protein, 463 aa, Glycine max; identical to SEQ ID NO: 66594

SEQ ID NO: 90935 - DNA, 1514 bp, Panicum miliaceum; identical to SEQ ID NO: 66595
  CDS (47)..(1276)

SEQ ID NO: 90936 - protein, 409 aa, Panicum miliaceum; identical to SEQ ID NO: 66596

SEQ ID NO: 90937 - DNA, 1681 bp, Panicum miliaceum; identical to SEQ ID NO: 66597
  CDS (64)..(1437)

SEQ ID NO: 90938 - protein, 457 aa, Panicum miliaceum; identical to SEQ ID NO: 66598

SEQ ID NO: 90939 - DNA, 1755 bp, Glycine max; identical to SEQ ID NO: 66599
  CDS (73)..(1464)

SEQ ID NO: 90940 - protein, 463 aa, Glycine max; identical to SEQ ID NO: 66600

SEQ ID NO: 90941 - DNA, 1717 bp, Glycine max; identical to SEQ ID NO: 66601
  CDS (54)..(1337)

SEQ ID NO: 90942 - protein, 427 aa, Glycine max; identical to SEQ ID NO: 66602

SEQ ID NO: 90943 - DNA, 1753 bp, Lotus japonicus; identical to SEQ ID NO: 66607
  CDS (86)..(1342)

SEQ ID NO: 90944 - protein, 418 aa, Lotus japonicus; identical to SEQ ID NO: 66608

SEQ ID NO: 90945 - DNA, 1206 bp, Crassostrea gigas; identical to SEQ ID NO: 66609
  CDS (1)..(1206)

SEQ ID NO: 90946 - protein, 401 aa, Crassostrea gigas; identical to SEQ ID NO: 66610

SEQ ID NO: 90947 - DNA, 1191 bp, Actinobacillus porcitonsillarum
  CDS (1)..(1191): transl_table=11
atgtttagtcatattcaagcagcaccagccgatcctattttaggtttaggagaagcatttaaagcagaaacacgtgccggaaaaattaatcttggtattggtgtttatatgaacgatgaagggaaaacgacaatcgttaaagccgttaaagaatcggaacgccaattattagaaacggaaatgaccaaaaattatttaaccattgatggtgtggcagcttataacgcccaaacccaagtattgcttttcggtgaaaatgctgaagtgattacttctggtcgagcgaaaacagcacaaagtttgggtggcaccggtgctttacgtattgcagcagaatttattaaacgtaacacctctgcaaaaaatgtttggatttcggctccaacttggccaaaccataatgcgattatggcagcggttggcttaaatgtgaaagattatcgctactacgatccaaaaacaaaccgcttagattgggataatcttattgcggatttaagccaagcggaagctggtgatgtggtgttattccacggttgttgtcataacccaaccggtatcgatccaacaccggaacaatgggaaacattagcagctttatctgcagaaaaaggctggttaccattatttgactttgcttatcaaggtcttggtaacggtttagaagaagatgcttacggtttacgtgcctttgctaaaagccacaaagaattattagttgcaagctcgtattcaaaaaacttcggtttatataatgagcgtgttggtgcatttaccctagtggctgaaaatgcagaagttgcaaatcgtgcctttacgcaagtgaaatctattattcgtgtactctactctaacccatcagcacacggtgcaagtaccgttgcaacagtgttagcaaatcctacgctgaaagcttcgtggattgaagaattgacggaaatgcgtaaccgtattaaagagatgcgcaatcaattagttcagttattaaaagagaaaggggcaactcaagacttctcttttatcaatgaacaaaatggaatgttctctttcagtggcttaacacctgaacaagtcgatcgtttacgtgaagaatttgctatttatgcggttcgctccggacgtatcaacgttgcaggcattaccagcagcaatattgaagcgttagcagaagctattgtgaaagtactttaa

SEQ ID NO: 90948 - protein, 396 aa, Actinobacillus porcitonsillarum
MFSHIQAAPADPILGLGEAFKAETRAGKINLGIGVYMNDEGKTTIVKAVKESERQLLETEMTKNYLTIDGVAAYNAQTQVLLFGENAEVITSGRAKTAQSLGGTGALRIAAEFIKRNTSAKNVWISAPTWPNHNAIMAAVGLNVKDYRYYDPKTNRLDWDNLIADLSQAEAGDVVLFHGCCHNPTGIDPTPEQWETLAALSAEKGWLPLFDFAYQGLGNGLEEDAYGLRAFAKSHKELLVASSYSKNFGLYNERVGAFTLVAENAEVANRAFTQVKSIIRVLYSNPSAHGASTVATVLANPTLKASWIEELTEMRNRIKEMRNQLVQLLKEKGATQDFSFINEQNGMFSFSGLTPEQVDRLREEFAIYAVRSGRINVAGITSSNIEALAEAIVKVL

SEQ ID NO: 90949 - DNA, 1290 bp, Aedes aegypti; identical to SEQ ID NO: 66613
  CDS (1)..(1290)

SEQ ID NO: 90950 - protein, 429 aa, Aedes aegypti; identical to SEQ ID NO: 66614

SEQ ID NO: 90951 - DNA, 1227 bp, Aedes aegypti; identical to SEQ ID NO: 66615
  CDS (1)..(1227)

SEQ ID NO: 90952 - protein, 408 aa, Aedes aegypti; identical to SEQ ID NO: 66616

SEQ ID NO: 90953 - DNA, 1194 bp, Neisseria subflava; identical to SEQ ID NO: 66619
  CDS (1)..(1194): transl_table=11

SEQ ID NO: 90954 - protein, 397 aa, Neisseria subflava; identical to SEQ ID NO: 66620

SEQ ID NO: 90955 - DNA, 1690 bp, Glycine max; identical to SEQ ID NO: 66577
  CDS (263)..(1522)

SEQ ID NO: 90956 - protein, 419 aa, Glycine max; identical to SEQ ID NO: 66622

SEQ ID NO: 90957 - DNA, 1251 bp, Drosophila melanogaster; identical to SEQ ID NO: 66623
  CDS (1)..(1251)

SEQ ID NO: 90958 - protein, 416 aa, Drosophila melanogaster; identical to SEQ ID NO: 66624

SEQ ID NO: 90959 - DNA, 1797 bp, Phaseolus vulgaris; identical to SEQ ID NO: 66625
  CDS (176)..(1561)

SEQ ID NO: 90960 - protein, 461 aa, Phaseolus vulgaris; identical to SEQ ID NO: 66626

SEQ ID NO: 90961 - DNA, 1191 bp, Aeromonas hydrophila
  CDS (1)..(1191): transl_table=11
atgtttgaaaaggttgttgccgccccaccggatccgatcctgggcctgaccgaagccttccgcgctgactctcgcagccacaagatcaatctgggggtcgggatctacaaggatgaaaccggtgccacccctatccttcactgcgtcaagaaagccgagcagaagctgctcaccgacgagaagaccaagaattatctcggtattgaaggcaatatcgaatacggccgcatagtgcagcaactgctgttcggacaggactccgccttgatcgccagtggccgcgccaagaccgcccaggcgccgggcggcaccggtgccctgcgcattgccgccgagttcgtggtgcgcaacgggctggccaagaccatctggatctccgatcccacctgggccaaccacgtcagcgtattccaggccgccggtttgaccgtcaagtggtacaagtactacgacgccgccaccaaggggctcgactttgccgccatgcaggcgtcgctcaatgacgtacaggctggtgagctggtgctgctgcacggctgctgccacaacccgaccggtatcgaccccaccgctgagcagtggcgcgccctggccaaacagagtgccgccgccggctggctgccgctgtttgacttcgcctatcagggctttgcccgtggcatcgaagaagatgccgagggtcttcgcatcttcgccgagtgtcacgacgagctgctggtggcgagctctttctccaaaaacttcggcctctacaacgagcgggtcggcgccttcaccctggtcagcgcgaccaaggcgatcgccgatgtggccttcacccaggtcaagaccgtcatccgtgccaactactccaacccgccgtcacacggcgctgccgtggtgacaaccatcgtcagtgacccggctctctatgtcgagtgggttgaagaagtggcggccatgcgggtgcgcattcgcgagatgcgcgagctgctggtggagaagctggcagccttgggtgtgagccaggatttcagctttatccgcgagcagaacggcatgttctccttctccggtctctccaaggatcaggttgagcagctcaagagcgagtttgccatctacatcgtcggttcaggccggatcagcgtggccgggatcacccgtgccaacatagatcccctgtgtgacgccatcgccaaggtactgtga

SEQ ID NO: 90962 - protein, 396 aa, Aeromonas hydrophila
MFEKVVAAPPDPILGLTEAFRADSRSHKINLGVGIYKDETGATPILHCVKKAEQKLLTDEKTKNYLGIEGNIEYGRIVQQLLFGQDSALIASGRAKTAQAPGGTGALRIAAEFVVRNGLAKTIWISDPTWANHVSVFQAAGLTVKWYKYYDAATKGLDFAAMQASLNDVQAGELVLLHGCCHNPTGIDPTAEQWRALAKQSAAAGWLPLFDFAYQGFARGIEEDAEGLRIFAECHDELLVASSFSKNFGLYNERVGAFTLVSATKAIADVAFTQVKTVIRANYSNPPSHGAAVVTTIVSDPALYVEWVEEVAAMRVRIREMRELLVEKLAALGVSQDFSFIREQNGMFSFSGLSKDQVEQLKSEFAIYIVGSGRISVAGITRANIDPLCDAIAKVL

SEQ ID NO: 90963 - DNA, 1293 bp, Arabidopsis thaliana; identical to SEQ ID NO: 66627
  CDS (1)..(1293)

SEQ ID NO: 90964 - protein, 430 aa, Arabidopsis thaliana; identical to SEQ ID NO: 66628

SEQ ID NO: 90965 - DNA, 1218 bp, Arabidopsis thaliana; identical to SEQ ID NO: 66629
  CDS (1)..(1218)

SEQ ID NO: 90966 - protein, 405 aa, Arabidopsis thaliana; identical to SEQ ID NO: 66630

SEQ ID NO: 90967 - DNA, 1350 bp, Arabidopsis thaliana
  CDS (1)..(1350)
atgaaaactactcatttctcttcctcttcttcttccgatcgcaggatcggtgctctgctccgtcatctcaattccggctcagattcggacaacctgagctctctttatgcatctccgacatcgggaggcaccggtggttctgttttctctcatcttgttcaagctccagaggatcctattcttggggtgacagttgcatacaacaaagatcctagcccagttaagctgaatttaggagttggtgcttaccgaactgaggagggaaaacctttggttcttaatgttgtgaggaaagctgagcagcagcttatcaatgacagaacaagaatcaaggagtatcttcccattgttggattggttgagttcaacaagttaagcgctaagctcatactaggcgctgacagtcctgctattcgggagaatcggattaccaccgtggagtgtttgtctggtactggttctctgagagttggaggagagtttttggctaaacattatcatcagaaaacaatttacatcactcagccaacatggggaaatcatccaaagattttcacgctcgctggtttgacagtgaaaacttaccgatactacgatccagcgacgcgtgggttgaactttcaaggtttattagaagaccttggtgctgccgcacctggttctatagtgcttctccatgcctgtgcccataaccctactggtgttgatccaaccattcaacaatgggagcaaatcaggaagttgatgcgatcaaagggattgatgcccttcttcgatagtgcttatcagggctttgcaagtggaagtcttgatacagatgcgaaacctattaggatgtttgttgctgatggcggagaatgcctcgttgctcaaagttatgcgaagaacatgggactctatggagaacgagttggagctctcagcattgtatgcaaatcagcagatgttgcggggagagttgaaagccaactgaaactagtgataaggccaatgtactcgagtcctccaatccatggtgcatcaatcgtggctgtaatcctccgtgacaagaatttgttcaacgaatggactctggaactgaaggccatggctgatcgtatcatcagcatgaggaaacagcttttcgaggcattacgtactcgaggcactcctggagactggagtcacatcataaagcagattggtatgtttaccttcacagggttaaacccagctcaagtctccttcatgactaaagagtaccacatctacatgacatctgacgggaggataagcatggctggtctgagttcgaagactgtacctcaccttgcagacgctatccatgctgttgtcaccaaagccgtctga

SEQ ID NO: 90968 - protein, 449 aa, Arabidopsis thaliana; identical to SEQ ID NO: 66632

SEQ ID NO: 90969 - DNA, 1447 bp, Arabidopsis thaliana; identical to SEQ ID NO: 66633
  CDS (1)..(1362)

SEQ ID NO: 90970 - protein, 453 aa, Arabidopsis thaliana; identical to SEQ ID NO: 66634

SEQ ID NO: 90971 - DNA, 1523 bp, Daucus carota; identical to SEQ ID NO: 66635
  CDS (24)..(1241)

SEQ ID NO: 90972 - protein, 405 aa, Daucus carota; identical to SEQ ID NO: 66636

SEQ ID NO: 90973 - DNA, 1224 bp, Oryza sativa subsp
  CDS (1)..(1224)
atggcgtcgtcgtccgtcttcgctggcctcgcgcaggcgccggaggaccccatcctcggggtgacggtcgcgtacaacaaggatcccagccccgtgaaggtcaatctcggcgtcggcgcctaccggaccgaggaagggaagcccctggtgctgaatgtggtcaggcgcgctgagcagatgctgatcaacaacccgtcacgtgttaaggagtatttgccgatcactggactggccgatttcaataagctgagtgctaagcttatttttggtgctgacagtcctgccattcaagagaatagggtggctacagttcagtgcttgtcaggaactggttctttaagggtgggaggtgaatttcttgcaaggcattatcatgaacgcactatatacatcccacagccaacctgggggaatcaccccaaagtgttcactttagctggcctgactgttaggagttaccgctactatgatcctgcaacccgtggactggatttccaagggctgttagaagatctcggttcagctccttcaggtgcaattgtactgcttcatgcttgtgcccacaaccctactggagtagacccaactttggaccagtgggaacagatcaggcagttgatgagatcaaaagcattgctgccattctttgatagcgcttatcagggatttgcaagtggaagtcttgaccaagatgctcaatcagtgcgcatgtttgttgctgatggtggtgaattgctcatggctcagagctacgctaagaacatgggattgtatggagagcgtgtcggtgctttaagcatagtttgtggaagtgctgatgtagctgtcagggttgaaagtcaacttaagcttgtaattaggcctatgtattcaaaccctcctattcatggtgcatctatcgtggctaccatacttaaggacagtgcaatgttcaatgaatggactgtggagctgaagggcatggctgataggattattagcatgaggcaacagctttttgatgctctgaaaacgagagaaactcctggagactggagtcacatcattaagcagatcggaatgttcactttcactgggctcaacagtgatcaagtggctttcatgaggcaggaataccacatttacatgacatctgatgggaggatcagtatggctggtttgagcgggaggaccattccgcatcttgcagatgcaatccatgccgcagtcacaaaactgaagtga

SEQ ID NO: 90974 - protein, 407 aa, Oryza sativa subsp; identical to SEQ ID NO: 66638

SEQ ID NO: 90975 - DNA, 2114 bp, Saccharomyces cerevisiae
  CDS (466)..(1821)
cttgctgtaactaattggtttatatttaaatatttcactttttaaagggcgtttgcatgcgaccatcgtcgatgattcatattgttcggatgcggaagatggcttccatgagttttgcacgccgtctcatgtgattgttggagtcatagctcgcatatcttcctattgtcagatgtaatatcgacggaaatggcatcttggagtatggaagcactattctgctttgctccaatatttaggatgccgcatttttcatatttttttttacatttttcgcttacgtatataaattgctagcaagtattcgctctctctgtcttggttatctaattgctaaccgtcgcaattgaaaagaaaaaaaaaatacagaatagacgatagcggattgaacgatagcatactattgagtgcgttttcccttctcatttgaaaattactatccgtttttcactgccgaaagacttgatgttgaggacgaggcttactaattgcagtctatggaggccctactacacgtcatcgcttagtagagtaccaagagcacctccagataaagtcttggggttatctgaacacttcaaaaaggtaaaaaatgttaacaaaattgacctgaccgtaggaatatataaagatggttggggcaaagtgacgacgtttccctccgttgcaaaagctcaaaaattgattgaatctcatttagagttgaataagaatctttcatatttaccaataacaggttccaaagaatttcaggaaaacgttatgaaatttttgttcaaggaatcatgtccgcagtttgggccattttatttagcccatgatagaatcagctttgttcagactttgagtggtacaggcgccctagctgtagcagctaaattcttggcattatttatttcaagagatatttggatacctgacccatcatgggcaaatcataagaacatttttcagaacaatggttttgaaaatatttaccggtattcctattataaggacggtcagatagacatcgacggatggattgagcaattgaaaacctttgcatataacaaccagcaagaaaacaataagaacccaccttgcataatcttgcatgcgtgttgtcacaaccctacaggtctcgacccaactaaagagcaatgggaaaagattatagatactatatatgagctaaaaatggtacccattgttgatatggcttatcagggtttagagtctggtaacttactaaaggacgcatatttattgaggctatgtctcaatgtaaataaatatccaaattggagtaacggtatctttctttgtcaatcttttgccaagaacatgggcctttatggtgaacgagttggttccttaagcgttatcacgccggcaactgcgaacaatggaaagttcaaccctctacaacagaaaaactcattgcagcaaaatattgactcccaattaaaaaagattgtcagaggtatgtattcttctccaccaggatacggttctcgtgtggtaaatgtagtattatcagatttcaaattgaaacagcaatggttcaaggatgttgatttcatggttcagagattgcatcacgtcagacaggagatgtttgaccgtctagggtggccggatcttgtaaatttcgcacaacagcacggtatgttttactatacaaggtttagtccaaagcaagtcgaaatattgagaaacaattacttcgtctatttaacaggtgatggtagattgtcgcttagcggagtcaatgattcgaacgttgattacttatgtgaatctcttgaagcagtctcgaaaatggacaaactcgcataattttttcaccttacagttcacctttgtctttatttttttattacttttcccttctcattttgccacacaataatttatagaatataataattttttgtaataattaataaaccttttttttatctactctatatacacttttcagataactagattggattaattcgtgatcgaactagttattaaattttaaatgaaaagaaagctagcgctagccaactattttaattacggtggcagtgcatcatatccttacatttcattttaggtttcctatgttttcttctttcaaa

SEQ ID NO: 90976 - protein, 451 aa, Saccharomyces cerevisiae; identical to SEQ ID NO: 66420

SEQ ID NO: 90977 - DNA, 1197 bp, Pseudomonas aeruginosa
  CDS (1)..(1197): transl_table=11
atgagtctgttttctgccgtcgaaatggcaccgcgtgatcccatccttggcctgaacgaagccttcaacgccgatacccgtccgggcaagatcaacctgggcgtgggcgtgtactacaacgaggaggggcgcattccgctgttgcgtgccgtgcaggctgccgagaaggcccgcatcgaggcccacgcgccgcgcggctacctgccgatcgaagggatcgccgcctacgaccagggcgtacagaaactgctgttcggtaacgagtccgagctgctggccgccggccgtgtggtcacgacccaggccgtcggcggcaccggcgcgctcaagctcggcgccgacttcctcaagcgcctgctgcccgacgccaccgtggccatcagcgacccgagctgggaaaaccaccgcgcactgttcgaagccgccggcttcccggtgcagaactaccgctattacgacgccgccagcaatggcgtgaaccgcgccggcctgctggaagacctgaatgccctgccggcccgctcgatcgtggttctgcacgcctgctgccataatccgaccggcgtcgatctcgagctggacgactggaaacaggtgctggacgtgctcaaggccaagggccacgtgccgttcctcgacatcgcctaccagggcttcggcaacggcatcgaggaagacgccgccgcggtgcgcctgttcgcccagtcgggcctgagcttcttcgtttccagctcgttctccaaatccttctcgctctatggcgaacgcgtcggcgccctctcgatcgtgaccgaaagccgcgatgaatcggcccgcgtgctgtcccaggtgaagcgggtgatccgcaccaactattcgaacccaccgacccacggcgccagcgtcgtctcctccgtgctcaacagcccggaactgcgggccctctgggagcaggaactgggcgagatgcgcgaccgcatccgcgacatgcgcctggcgatggtcgagcaactggcagcccacggcgccaagcgcgacttcagcttcgtcggtcgccaacgtggcatgttctcctattccggcctgaccgccgaccaggtcgagcgcctgaagaccgagttcggtatctacgccgtcagcaccggccgtatctgcgtcgccgcgctgaacaaatcgaacctggagaccatcaccaaggccatcgtccaggtcctgtag

SEQ ID NO: 90978 - protein, 398 aa, Pseudomonas aeruginosa
MSLFSAVEMAPRDPILGLNEAFNADTRPGKINLGVGVYYNEEGRIPLLRAVQAAEKARIEAHAPRGYLPIEGIAAYDQGVQKLLFGNESELLAAGRVVTTQAVGGTGALKLGADFLKRLLPDATVAISDPSWENHRALFEAAGFPVQNYRYYDAASNGVNRAGLLEDLNALPARSIVVLHACCHNPTGVDLELDDWKQVLDVLKAKGHVPFLDIAYQGFGNGIEEDAAAVRLFAQSGLSFFVSSSFSKSFSLYGERVGALSIVTESRDESARVLSQVKRVIRTNYSNPPTHGASVVSSVLNSPELRALWEQELGEMRDRIRDMRLAMVEQLAAHGAKRDFSFVGRQRGMFSYSGLTADQVERLKTEFGIYAVSTGRICVAALNKSNLETITKAIVQVL

SEQ ID NO: 90979 - DNA, 1191 bp, Salmonella typhi
  CDS (1)..(1191): transl_table=11
atgtttgagaacataaccgccgctcctgccgacccgattttgggcctggccgatctgtttcgcgccgatgaccgtccagggaaaattaaccttggcattggcgtatataaagatgaaaccggcaaaacaccggtgctcaccagcgttaaaaaagccgagcagtatttactggaaaatgaaacgacgaaaaactatctcggcattgacgggattccggaatttgctcgctgcactcaggaactgctgttcggcaaaggcagcgcgctgattaatgataagcgcgcacgcacggcgcaaacgccgggcggtaccggcgcgttacgcattgccgccgactttttggcaaaaaatactccggtaaaacgggtgtgggtgagcaaccccagctggccgaaccacaaaagcgtgtttaacgctgccggcctggaagttcgggagtacgcttactacgatgcggaaaatcactcgctggattttgaagcgctacaagccagcctgagcgaagcacaggccggcgatgtggttctgttccacggttgctgtcataacccaaccggcattgaccctactctggaacagtggcaggttctggctgagctttccgttgaaaaagggtggctgccgctattcgatttcgcctaccagggctttgcccgcggcctggaagaagatgcggaaggtctgcgcgcctttgccgcgctgcataaagagctcattgtcgccagctcctactccaaaaacttcggcttatataatgagcgcgtcggcgcctgcaccctcgttgccgccgatgcggaaaccgtggatcgcgcttttagccagatgaaatccgccattcgcgctaactactccaacccaccagcgcacggcgcgtccatcgtcgcgactatcctgagtaatgacgccctgcgcgctatctgggaacaggaactgacggacatgcgccagcgtattcagcgtatgcgtcaactgttcgtgaataccttgcaggaaaaaggcgcgaaccgtgacttcagctttattatcaagcagaacgggatgttctcattcagcggtctgaccaaagatcaggtgctgcgtctgcgtgaagagtttggcgtttatgccgtggcttctggtcgcgtgaacgtggcgggcatgaccccggataatatggcgccgctgtgcgaagccattgtcgcggtactataa

SEQ ID NO: 90980 - protein, 396 aa, Salmonella typhi
MFENITAAPADPILGLADLFRADDRPGKINLGIGVYKDETGKTPVLTSVKKAEQYLLENETTKNYLGIDGIPEFARCTQELLFGKGSALINDKRARTAQTPGGTGALRIAADFLAKNTPVKRVWVSNPSWPNHKSVFNAAGLEVREYAYYDAENHSLDFEALQASLSEAQAGDVVLFHGCCHNPTGIDPTLEQWQVLAELSVEKGWLPLFDFAYQGFARGLEEDAEGLRAFAALHKELIVASSYSKNFGLYNERVGACTLVAADAETVDRAFSQMKSAIRANYSNPPAHGASIVATILSNDALRAIWEQELTDMRQRIQRMRQLFVNTLQEKGANRDFSFIIKQNGMFSFSGLTKDQVLRLREEFGVYAVASGRVNVAGMTPDNMAPLCEAIVAVL

SEQ ID NO: 90981 - DNA, 1191 bp, Salmonella typhimurium
  CDS (1)..(1191): transl_table=11
atgtttgagaacataaccgccgctcctgccgacccgattttgggcctggccgatctgtttcgcgccgatgaccgtccagggaaaattaaccttggcattggcgtatataaagatgaaaccggcaaaacaccggtgctcaccagcgttaaaaaagccgagcagtatttactggaaaatgaaacgacgaaaaactatctcggcattgacgggattccggaatttgctcgctgcactcaggaactgctgttcggcaaaggcagcgcgctgattaacgataagcgcgcacgcacggcgcaaacgccgggcggtaccggcgcgttacgcattgccgccgactttttggcaaaaaatactccggtaaaacgggtgtgggtgagcaaccccagctggccgaaccacaaaagcgtgtttaacgctgccggcctggaagttcgggagtacgcttactacgatgcggaaaatcacacgctggattttgaagcgctacaagccagcctgagcgaagcacaggccggcgatgtggttctgttccacggttgctgtcataacccaaccggcattgaccctactctggaacagtggcaggttctggctgagctttccgttgaaaaagggtggctgccgctattcgatttcgcttaccagggctttgcccgcggcctggaagaagatgcggaaggtctgcgcgcctttgccgcgctgcataaagagcttattgtcgccagctcctactccaaaaacttcggcttatataatgagcgcgtcggcgcctgcaccctcgttgccgccgatgcggaaaccgtggatcgcgcttttagccagatgaaatccgccattcgcgctaactactccaacccgccagcgcacggcgcgtccatcgtcgcgactatcctgagtaatgacgccctgcgcgctatctgggaacaggaactgacggacatgcgccagcgtattcagcgtatgcgtcaactgttcgtgaataccttgcaggaaaaaggcgcgaaccgtgacttcagctttattatcaagcagaacgggatgttctcattcagcggtctgaccaaagatcaggtgctgcgtctgcgtgaagagttcggcgtttatgccgtggcttctggtcgcgtgaacgtggcgggcatgaccccggataatatggcgccgctgtgcgaagccattgtcgcggtactgtaa

SEQ ID NO: 90982 - protein, 396 aa, Salmonella typhimurium
MFENITAAPADPILGLADLFRADDRPGKINLGIGVYKDETGKTPVLTSVKKAEQYLLENETTKNYLGIDGIPEFARCTQELLFGKGSALINDKRARTAQTPGGTGALRIAADFLAKNTPVKRVWVSNPSWPNHKSVFNAAGLEVREYAYYDAENHTLDFEALQASLSEAQAGDVVLFHGCCHNPTGIDPTLEQWQVLAELSVEKGWLPLFDFAYQGFARGLEEDAEGLRAFAALHKELIVASSYSKNFGLYNERVGACTLVAADAETVDRAFSQMKSAIRANYSNPPAHGASIVATILSNDALRAIWEQELTDMRQRIQRMRQLFVNTLQEKGANRDFSFIIKQNGMFSFSGLTKDQVLRLREEFGVYAVASGRVNVAGMTPDNMAPLCEAIVAVL

SEQ ID NO: 90983 - DNA, 1170 bp, Rhizobium meliloti
  CDS (1)..(1170): transl_table=11
atgttcgacgccctcgcccgccaagccgacgatcccttgctggccctgatcggcctgttcaggaaggatgagcgccccggaaaggtcgatctcggcgtaggagtctatcgcgacgagaccggacgcacgccgatcttccgggccgtcaaggcggcggaaaagcggcttctcgaaacacaggacagcaaggcctatatcggccccgaaggggacctcgtctttctcgatcggctctgggaactcgtcggcggcgacacgatcgagcggagccatgttgcgggcgtccagacgcccggcggctccggcgcgctccgtttggcggcggacctcatcgcccgcatgggcggccgaggcatctggctcgggctgccgagctggccgaaccacgcgccgatcttcaaggcggccgggctcgatatcgccacctacgacttcttcgacattccgtcgcagtcggtcatcttcgataatctggtgagcgcgctggaaggcgccgcatccggcgatgcggtgctgctgcatgcaagctgccacaacccgaccggcggcgtcctgagcgaagcacaatggatggagatcgccgcgctggtggccgagcgcggcctgctgccgctcgtcgatctcgcctatcaggggttcggccgcggcctcgaccaggatgtcgcgggcctccggcatcttctcggcgtggtcccggaagcgctcgtcgcggtttcctgctcgaagtccttcgggctttatcgcgagcgcgcgggcgcgatcttcgcgcggaccagctcgactgcctcggcggacagggtgcgctcaaacctcgcgggcctcgcacgcaccagctattccatgccgccggatcacggcgcagccgtcgtgcggacgatccttgacgacccggaactcaggcgcgactggacggaggagctcgagacgatgcggctcaggatgacgggcctccggcggtcgcttgccgagggactccgcacccgctggcagagcctcggcgcagtcgccgatcaggagggcatgttctccatgctgccgctttccgaagcggaggttatgcggctcaggaccgagcacggcatctatatgccggcatccggccgcatcaacatcgccgggctgaagacggcggaagccgccgagattgccggcaagttcaccagtctctga

SEQ ID NO: 90984 - protein, 389 aa, Rhizobium meliloti
MFDALARQADDPLLALIGLFRKDERPGKVDLGVGVYRDETGRTPIFRAVKAAEKRLLETQDSKAYIGPEGDLVFLDRLWELVGGDTIERSHVAGVQTPGGSGALRLAADLIARMGGRGIWLGLPSWPNHAPIFKAAGLDIATYDFFDIPSQSVIFDNLVSALEGAASGDAVLLHASCHNPTGGVLSEAQWMEIAALVAERGLLPLVDLAYQGFGRGLDQDVAGLRHLLGVVPEALVAVSCSKSFGLYRERAGAIFARTSSTASADRVRSNLAGLARTSYSMPPDHGAAVVRTILDDPELRRDWTEELETMRLRMTGLRRSLAEGLRTRWQSLGAVADQEGMFSMLPLSEAEVMRLRTEHGIYMPASGRINIAGLKTAEAAEIAGKFTSL

SEQ ID NO: 90985 - DNA, 1194 bp, Escherichia coli
  CDS (1)..(1194): transl_table=11
gtgtttcaaaaagttgacgcctacgctggcgacccgattcttacgcttatggagcgttttaaagaagaccctcgcagcgacaaagtgaatttaagtatcggtctgtactacaacgaagacggaattattccacaactgcaagccgtggcggaggcggaagcgcgcctgaatgcgcagcctcatggcgcttcgctttatttaccgatggaagggcttaactgctatcgccatgccattgcgccgctgctgtttggtgcggaccatccggtactgaaacaacagcgcgtagcaaccattcaaacccttggcggctccggggcattgaaagtgggcgcggatttcctgaaacgctacttcccggaatcaggcgtctgggtcagcgatcctacctgggaaaaccacgtagcaatattcgccggggctggattcgaagtgagtacttacccctggtatgacgaagcgactaacggcgtgcgctttaatgacctgttggcgacgctgaaaacattacctgcccgcagtattgtgttgctgcatccatgttgccacaacccaacgggtgccgatctcactaatgatcagtgggatgcggtgattgaaattctcaaagcccgcgagcttattccattcctcgatattgcctatcaaggatttggtgccggtatggaagaggatgcctacgctattcgcgccattgccagcgctggattacccgctctggtgagcaattcgttctcgaaaattttctccctttacggcgagcgcgtcggcggactttctgttatgtgtgaagatgccgaagccgctggccgcgtactggggcaattgaaagcaacagttcgccgcaactactccagcccgccgaattttggtgcgcaggtggtggctgcagtgctgaatgacgaggcattgaaagccagctggctggcggaagtagaagagatgcgtactcgcattctggcaatgcgtcaggaattggtgaaggtattaagcacagagatgccagaacgcaatttcgattatctgcttaatcagcgcggcatgttcagttataccggtttaagtgccgctcaggttgaccgactacgtgaagaatttggtgtctatctcatcgccagcggtcgcatgtgtgtcgccgggttaaatacggcaaatgtacaacgtgtggcaaaggcgtttgctgcggtgatgtaa

SEQ ID NO: 90986 - protein, 397 aa, Escherichia coli
MFQKVDAYAGDPILTLMERFKEDPRSDKVNLSIGLYYNEDGIIPQLQAVAEAEARLNAQPHGASLYLPMEGLNCYRHAIAPLLFGADHPVLKQQRVATIQTLGGSGALKVGADFLKRYFPESGVWVSDPTWENHVAIFAGAGFEVSTYPWYDEATNGVRFNDLLATLKTLPARSIVLLHPCCHNPTGADLTNDQWDAVIEILKARELIPFLDIAYQGFGAGMEEDAYAIRAIASAGLPALVSNSFSKIFSLYGERVGGLSVMCEDAEAAGRVLGQLKATVRRNYSSPPNFGAQVVAAVLNDEALKASWLAEVEEMRTRILAMRQELVKVLSTEMPERNFDYLLNQRGMFSYTGLSAAQVDRLREEFGVYLIASGRMCVAGLNTANVQRVAKAFAAVM

SEQ ID NO: 90987 - DNA, 1185 bp, Paracoccus denitrificans
  CDS (1)..(1185): transl_table=11
atgctgggcaatctgaaaccgcaggcccccgacaagatcctggccctgatgggcgaattcagggccgatccccgccagggcaagatcgacctgggcgtgggggtctacaaggatgccaccggccacaccccgatcatgcgggccgtccacgccgccgagcagcgcatgctggaaaccgagaccaccaagacctatgccggcctctcgggcgagcccgagttccaaaaggccatgggcgagctgatcctgggcgacggactgaaatccgagaccaccgcgacgctggcgacggtcggcggcaccggcgccctccggcaggcgctggaactggcgcgcatggcgaacccggacctgcgggtcttcgtcagcgatccgacctggccgaaccatgtctcgatcatgaatttcatgggcctgccggtgcagacctatcgctatttcgatgccgagacccgcggcgtcgatttcgagggcatgaaggccgacctcgccgccgcgaaaaagggcgacatggtgctgctgcacggctgctgccacaacccgaccggcgccaacctgacgctggatcaatgggccgagatcgcctcgatcctggaaaagaccggcgcgctgccgctgatcgacctggcctatcagggcttcggcgacgggctggaagaggacgcggccggcacccggctgatcgcctcgcgcatccccgaggtgctgatcgcggcctcgtgcagcaagaacttcggcatctaccgcgaacgcaccggctgcctgctggcgctttgcgccgatgcggcgaccagggagctggcgcagggcgccatggccttcctgaaccgccagacctattccttcccgcccttccacggcgccaagatcgtctcgaccgtgctgaccacgcccgaactgcgcgccgactggatggccgagctggaagcggtgcgcagcggcatgctgcgcctgcgcgagcaattggcgggcgagttgcgcgatctcagcggttcggaccgtttcggcttcgtggccgagcatcgcggcatgttctcgcgcctgggcgccacgcccgaacaggtcaagcgcatcaaggaagagttcggcatctacatggtgggcgattcgcgcatcaacatcgccgggctgaacgacaacaccatcccgatcctggcccgcgctatcatcgaggtgggggtctaa

SEQ ID NO: 90988 - protein, 394 aa, Paracoccus denitrificans
MLGNLKPQAPDKILALMGEFRADPRQGKIDLGVGVYKDATGHTPIMRAVHAAEQRMLETETTKTYAGLSGEPEFQKAMGELILGDGLKSETTATLATVGGTGALRQALELARMANPDLRVFVSDPTWPNHVSIMNFMGLPVQTYRYFDAETRGVDFEGMKADLAAAKKGDMVLLHGCCHNPTGANLTLDQWAEIASILEKTGALPLIDLAYQGFGDGLEEDAAGTRLIASRIPEVLIAASCSKNFGIYRERTGCLLALCADAATRELAQGAMAFLNRQTYSFPPFHGAKIVSTVLTTPELRADWMAELEAVRSGMLRLREQLAGELRDLSGSDRFGFVAEHRGMFSRLGATPEQVKRIKEEFGIYMVGDSRINIAGLNDNTIPILARAIIEVGV

SEQ ID NO: 90989 - DNA, 1383 bp, Oryza sativa; identical to SEQ ID NO: 66425
  CDS (1)..(1383)

SEQ ID NO: 90990 - protein, 460 aa, Oryza sativa; identical to SEQ ID NO: 66426

SEQ ID NO: 90991 - DNA, 1218 bp, Brassica napus; identical to SEQ ID NO: 66643
  CDS (1)..(1218)

SEQ ID NO: 90992 - protein, 405 aa, Brassica napus; identical to SEQ ID NO: 66644

SEQ ID NO: 90993 - DNA, 1242 bp, Brassica napus; identical to SEQ ID NO: 66645
  CDS (1)..(1242)

SEQ ID NO: 90994 - protein, 413 aa, Brassica napus; identical to SEQ ID NO: 66646

SEQ ID NO: 90995 - DNA, 1218 bp, Brassica napus; identical to SEQ ID NO: 66647
  CDS (1)..(1218)

SEQ ID NO: 90996 - protein, 405 aa, Brassica napus; identical to SEQ ID NO: 66648

SEQ ID NO: 90997 - DNA, 1251 bp, Brassica napus
  CDS (1)..(1251)
atgagttccatcttgtcaaacgtccttcctgctccggaagatccttttctcagtgcttttaatcttctttgtatggtcacaaaacaggttatttttgcctgtagggatgatccttgtccagttaagttgaatttgagtgcgggtgcctatcgaaccgaggagggaaagcctcttgttcttgaggtggtgagaaaagcagagcaacagttagcgaatgacctatcttgtgacaagggttatctctcaattgatggacttgctgattttaacaaattgagcgccaagctgatcttaggtgatgatagtcatgcagtggatgagaatagagttgttactatccagtgtttgtctggtactggttctttgagagtcggagctgagtttctagcaaaacaccaccaacaacgagtcgttttcgttccaaatccaacttgggggaaccatccctttattttcacattggcgggtttaagtgtagagtatttccgttactatgatccgcaaacccgaggactcgacttcgaaggcatgctcgaggatcttggtgctgcaccgcctggagctattgtggtattgcaatcttgtgcgcataaccccacaggaattgacccaacactggaacaatgggaaaagattcgacaaattgtgaggtctaaaggtttattacccttctttgataatgcatatcagggttttgctagtgggaaccttgactcagatgcacaatcggtgcgtatgtttgttgctgatggaggtgaatgtttgatagctcaaagttttgccaaaaacatgggtctttatggtgagcgtattggtgctcttaccattgtatgcacctcacaagatgtggctaggaaaattcacagtcaagtgttacttgttgttagacctatgtatcttagcccaccaattcatggagcatccattgttaccacaattcttaaaaacagtgatatgtacaaggactggactatcgagctgaaaggcatggctgaccgcatcataagcatgcgccaacagttatatgaagctatacaagctagaggtacacccggtgattggagtcacattatcaaacagattgggatgttttcttttacaggactgaatgagaagcaagttcgttggatggccaaagaatatcacatttatattacttatgatgggaggataagcattgcaagtctaagttcaaagacagtgcctcaactcgctgatgctatacatgctgcagttacccgccttgcctaa

SEQ ID NO: 90998 - protein, 416 aa, Brassica napus
MSSILSNVLPAPEDPFLSAFNLLCMVTKQVIFACRDDPCPVKLNLSAGAYRTEEGKPLVLEVVRKAEQQLANDLSCDKGYLSIDGLADFNKLSAKLILGDDSHAVDENRVVTIQCLSGTGSLRVGAEFLAKHHQQRVVFVPNPTWGNHPFIFTLAGLSVEYFRYYDPQTRGLDFEGMLEDLGAAPPGAIVVLQSCAHNPTGIDPTLEQWEKIRQIVRSKGLLPFFDNAYQGFASGNLDSDAQSVRMFVADGGECLIAQSFAKNMGLYGERIGALTIVCTSQDVARKIHSQVLLVVRPMYLSPPIHGASIVTTILKNSDMYKDWTIELKGMADRIISMRQQLYEAIQARGTPGDWSHIIKQIGMFSFTGLNEKQVRWMAKEYHIYITYDGRISIASLSSKTVPQLADAIHAAVTRLA

SEQ ID NO: 90999 - DNA, 1374 bp, Brassica napus; identical to SEQ ID NO: 66649
  CDS (1)..(1374)

SEQ ID NO: 91000 - protein, 457 aa, Brassica napus; identical to SEQ ID NO: 66650

SEQ ID NO: 91001 - DNA, 1362 bp, Brassica napus; identical to SEQ ID NO: 66651
  CDS (1)..(1362)

SEQ ID NO: 91002 - protein, 453 aa, Brassica napus; identical to SEQ ID NO: 66652

SEQ ID NO: 91003 - DNA, 1281 bp, Triticum aestivum; identical to SEQ ID NO: 66653
  CDS (1)..(1281)

SEQ ID NO: 91004 - protein, 426 aa, Triticum aestivum; identical to SEQ ID NO: 66654

SEQ ID NO: 91005 - DNA, 1386 bp, Zea mays; identical to SEQ ID NO: 66655
  CDS (1)..(1386)

SEQ ID NO: 91006 - protein, 461 aa, Zea mays; identical to SEQ ID NO: 66656

SEQ ID NO: 91007 - DNA, 1380 bp, Zea mays
  CDS (1)..(1380)
atggccaccgccgccgccttctctgtctcctcgccggcggcctccgccgtcgccgcgcgatccaaggtgtttggaggagttaaccaggcgagaactagaactggctgccgcgtcggcatcacgcggaagaactttggccgtgtcatgatggcccttgcagtggatgtttctcgttttgaaggagtgccaatggctcctccagacccaattcttggggtttctgaggcctttaaagcagataaaagcgagctgaagctcaatcttggtgttggtgcctataggacagaagagctgcagccctacgtgctcaatgtagtcaagaaggctgaaaatcttatgttggagaaaggagaaaacaaagagtatcttcccattgaaggtttagccgcgtttaacaaagcaacagcagagctattgcttggagctgataaccctgttattaatcaaggactggttgctacacttcagtctctctcgggcactggatcactgcgtctcgctgcagcattcatacaaagatactttcctgaagctaaagtgctgatatcgtcgcctacctggggtaaccacaagaatatcttcaatgatgctagggtaccttggtcagagtaccggtattatgaccccaagactgttgggttggattttgagggaatgatagctgacattgaggctgctcctgaaggttcttttgttctgctacatggttgtgctcacaacccaactggaatagacccaactcctgaacagtgggagaaaattgcagatgtcattcaagagaaaaagcatatgccattctttgatgttgcatatcagggttttgccagtggaagccttgatgaagatgcattttctgtcaggctttttgttaagcgtggcatggaagtgtttgttgcacaatcttacagcaagaaccttggtttatattctgaaagggttggtgcaataaatgtcgtgtgctcagcaccagaagttgcagatagggtaaagagccagctgaaacgattggcacgtcccatgtactcgaacccccctattcacggtgccaagatagttgccaacgttgttggtgatccaaccatgtttggtgaatggaaacaagagatggagctaatggctggacggatcaagaatgtaagacagaagctctacgacagtttgtctgccaaggacaagagcggcaaggactggtctttcattctgaggcagattggcatgttctcctacaccggcttgaacaaagcgcagagtgacaacatgacggataaatggcatatttacatgaccaaggatgggcggatctcgttagctgggctgtccctggctaagtgtgattatcttgccgacgccatcatcgattccttccataatgtgaactag

SEQ ID NO: 91008 - protein, 459 aa, Zea mays
MATAAAFSVSSPAASAVAARSKVFGGVNQARTRTGCRVGITRKNFGRVMMALAVDVSRFEGVPMAPPDPILGVSEAFKADKSELKLNLGVGAYRTEELQPYVLNVVKKAENLMLEKGENKEYLPIEGLAAFNKATAELLLGADNPVINQGLVATLQSLSGTGSLRLAAAFIQRYFPEAKVLISSPTWGNHKNIFNDARVPWSEYRYYDPKTVGLDFEGMIADIEAAPEGSFVLLHGCAHNPTGIDPTPEQWEKIADVIQEKKHMPFFDVAYQGFASGSLDEDAFSVRLFVKRGMEVFVAQSYSKNLGLYSERVGAINVVCSAPEVADRVKSQLKRLARPMYSNPPIHGAKIVANVVGDPTMFGEWKQEMELMAGRIKNVRQKLYDSLSAKDKSGKDWSFILRQIGMFSYTGLNKAQSDNMTDKWHIYMTKDGRISLAGLSLAKCDYLADAIIDSFHNVN

SEQ ID NO: 91009 - DNA, 1230 bp, Zea mays; identical to SEQ ID NO: 66657
  CDS (1)..(1230)

SEQ ID NO: 91010 - protein, 409 aa, Zea mays; identical to SEQ ID NO: 66658

SEQ ID NO: 91011 - DNA, 1374 bp, Hordeum vulgare; identical to SEQ ID NO: 66659
  CDS (1)..(1374)

SEQ ID NO: 91012 - protein, 457 aa, Hordeum vulgare; identical to SEQ ID NO: 66660

SEQ ID NO: 91013 - DNA, 1251 bp, Brassica napus
  CDS (1)..(1251)
atgagttccatcttgtcaaacgtccttcctgctccggaagatccttttctcagtgcttttaatcttctttgtatggtcacaaaacaggttatttttgcttgtagagatgatccttgtccggttaagttgaatttgagcgccggtgcctatcgaaccgaggagggaaagcctcttgttcttgaggtggtgagaaaagcagagcaacagttagcgaatgacctgtcttgtgacaagggatatctcccaattgatggacttgctgattttaacaaattgagcgccaagctaatcttaggtgatgatagtcatgcagtgaaagagaatagagttgttactatccagtgtttgtctggtactggttctttgagagtcggagctgagtttctagcaaaacaccaccaacaacgtgtcattttcgttccaaatccaacttgggggaaccatccctttattttcacattggcgggtttgtctgtagagtatttccgttactatgatccgcaaacccgaggactcgacttcgaaggcatgctcgaggatcttggtgctgcaccgtctggagctatagtggtattgcaagcttgtgcgcataaccccacaggaattgacccaacactggaacaatgggaacagattcgacaaattgtgagatctaaaggcttattacccttctttgataatgcatatcagggttttgctagtgggaaccttgactcagatgcacaatcggtgcgtatgtttgttgctgatggaggtgaatgtttgatagctcaaagttttgccaaaaacatgggtctttatggagagcgtattggggctcttaccattgtatgcacctcacaagatgtggctaggaaaataaacagccaactgctacttgttgtgagacctatgtatcttagcccaccaattcatggagcatcaattgttaccacaattcttaaaaacagtgatatgtacaaggactggacgatcgagctgaaaggaatggctaaccgcataataagcatgcgcaaacagttatatgaagctatacaagctagaggcacacccggtgattggagtcacattatcaaacagattgggatgttttcttttacaggactgaatgagaagcaagttcgctggatggccaaagaatatcacatttatatgacttatgatgggaggataagcattgcaagtctaagttcaaagacagtgcctcaactcgctgatgctatacatgctgcagttacccgccttgcctaa

SEQ ID NO: 91014 - protein, 416 aa, Brassica napus
MSSILSNVLPAPEDPFLSAFNLLCMVTKQVIFACRDDPCPVKLNLSAGAYRTEEGKPLVLEVVRKAEQQLANDLSCDKGYLPIDGLADFNKLSAKLILGDDSHAVKENRVVTIQCLSGTGSLRVGAEFLAKHHQQRVIFVPNPTWGNHPFIFTLAGLSVEYFRYYDPQTRGLDFEGMLEDLGAAPSGAIVVLQACAHNPTGIDPTLEQWEQIRQIVRSKGLLPFFDNAYQGFASGNLDSDAQSVRMFVADGGECLIAQSFAKNMGLYGERIGALTIVCTSQDVARKINSQLLLVVRPMYLSPPIHGASIVTTILKNSDMYKDWTIELKGMANRIISMRKQLYEAIQARGTPGDWSHIIKQIGMFSFTGLNEKQVRWMAKEYHIYMTYDGRISIASLSSKTVPQLADAIHAAVTRLA

SEQ ID NO: 91015 - DNA, 1359 bp, Brassica napus; identical to SEQ ID NO: 66661
  CDS (1)..(1359)

SEQ ID NO: 91016 - protein, 452 aa, Brassica napus; identical to SEQ ID NO: 66662

SEQ ID NO: 91017 - DNA, 1218 bp, Brassica napus; identical to SEQ ID NO: 66663
  CDS (1)..(1218)

SEQ ID NO: 91018 - protein, 405 aa, Brassica napus; identical to SEQ ID NO: 66664

SEQ ID NO: 91019 - DNA, 1362 bp, Brassica napus; identical to SEQ ID NO: 66665
  CDS (1)..(1362)

SEQ ID NO: 91020 - protein, 453 aa, Brassica napus; identical to SEQ ID NO: 66666

SEQ ID NO: 91021 - DNA, 1374 bp, Brassica napus; identical to SEQ ID NO: 66667
  CDS (1)..(1374)

SEQ ID NO: 91022 - protein, 457 aa, Brassica napus; identical to SEQ ID NO: 66668

SEQ ID NO: 91023 - DNA, 1218 bp, Brassica napus; identical to SEQ ID NO: 66669
  CDS (1)..(1218)

SEQ ID NO: 91024 - protein, 405 aa, Brassica napus; identical to SEQ ID NO: 66670

SEQ ID NO: 91025 - DNA, 1362 bp, Brassica napus; identical to SEQ ID NO: 66671
  CDS (1)..(1362)

SEQ ID NO: 91026 - protein, 453 aa, Brassica napus; identical to SEQ ID NO: 66672

SEQ ID NO: 91027 - DNA, 1392 bp, Glycine max; identical to SEQ ID NO: 66673
  CDS (1)..(1392)

SEQ ID NO: 91028 - protein, 463 aa, Glycine max; identical to SEQ ID NO: 66674

SEQ ID NO: 91029 - DNA, 1284 bp, Glycine max; identical to SEQ ID NO: 66675
  CDS (1)..(1284)

SEQ ID NO: 91030 - protein, 427 aa, Glycine max; identical to SEQ ID NO: 66676

SEQ ID NO: 91031 - DNA, 1383 bp, Zea mays; identical to SEQ ID NO: 66677
  CDS (1)..(1383)

SEQ ID NO: 91032 - protein, 460 aa, Zea mays; identical to SEQ ID NO: 66678

SEQ ID NO: 91033 - DNA, 1293 bp, Zea mays; identical to SEQ ID NO: 66679
  CDS (1)..(1293)

SEQ ID NO: 91034 - protein, 430 aa, Zea mays; identical to SEQ ID NO: 66680

SEQ ID NO: 91035 - DNA, 1380 bp, Zea mays; identical to SEQ ID NO: 66681
  CDS (1)..(1380)

SEQ ID NO: 91036 - protein, 459 aa, Zea mays; identical to SEQ ID NO: 66682

SEQ ID NO: 91037 - DNA, 1383 bp, Zea mays; identical to SEQ ID NO: 66683
  CDS (1)..(1383)

SEQ ID NO: 91038 - protein, 460 aa, Zea mays; identical to SEQ ID NO: 66684

SEQ ID NO: 91039 - DNA, 26 bp, Artificial sequence
  primer
atgaacaaaagaacacaggaatacaa

SEQ ID NO: 91040 - DNA, 28 bp, Artificial sequence
  primer
ttacaatttagcttcaatagtatagaag

SEQ ID NO: 91041 - protein, 468 aa, Artificial sequence
  consensus sequence
  Variant (2)..(2): Xaa in position 2 is any amino acid
  Variant (4)..(4): Xaa in position 4 is any amino acid
  Variant (7)..(14): Xaa in position 7 to 14 is any amino acid
  Variant (15)..(25): Xaa in position 15 to 25 is any or no amino acid
  Variant (27)..(30): Xaa in position 27 to 30 is any amino acid
  Variant (32)..(33): Xaa in position 32 to 33 is any amino acid
  Variant (35)..(36): Xaa in position 35 to 36 is any amino acid
  Variant (38)..(38): Xaa in position 38 is any amino acid
  Variant (40)..(43): Xaa in position 40 to 43 is any amino acid
  Variant (45)..(51): Xaa in position 45 to 51 is any amino acid
  Variant (53)..(54): Xaa in position 53 to 54 is any amino acid
  Variant (57)..(66): Xaa in position 57 to 66 is any amino acid
  Variant (67)..(70): Xaa in position 67 to 70 is any or no amino acid
  Variant (72)..(75): Xaa in position 72 to 75 is any amino acid
  Variant (77)..(86): Xaa in position 77 to 86 is any amino acid
  Variant (88)..(89): Xaa in position 88 to 89 is any amino acid
  Variant (91)..(95): Xaa in position 91 to 95 is any amino acid
  Variant (96)..(106): Xaa in position 96 to 106 is any or no amino acid
  Variant (108)..(111): Xaa in position 108 to 111 is any amino acid
  Variant (113)..(115): Xaa in position 113 to 115 is any amino acid
  Variant (119)..(119): Xaa in position 119 is any amino acid
  Variant (121)..(139): Xaa in position 121 to 139 is any amino acid
  Variant (140)..(152): Xaa in position 140 to 152 is any or no amino acid
  Variant (154)..(154): Xaa in position 154 is any amino acid
  Variant (156)..(156): Xaa in position 156 is any amino acid
  Variant (159)..(161): Xaa in position 159 to 161 is any amino acid
  Variant (163)..(165): Xaa in position 163 to 165 is any amino acid
  Variant (167)..(171): Xaa in position 167 to 171 is any amino acid
  Variant (172)..(178): Xaa in position 172 to 178 is any or no amino acid
  Variant (180)..(180): Xaa in position 180 is any amino acid
  Variant (182)..(207): Xaa in position 182 to 207 is any amino acid
  Variant (208)..(215): Xaa in position 208 to 215 is any or no amino acid
  Variant (218)..(218): Xaa in position 218 is any amino acid
  Variant (220)..(220): Xaa in position 220 is any amino acid
  Variant (226)..(226): Xaa in position 226 is any amino acid
  Variant (228)..(231): Xaa in position 228 to 231 is any amino acid
  Variant (234)..(246): Xaa in position 234 to 246 is any amino acid
  Variant (248)..(249): Xaa in position 248 to 249 is any amino acid
  Variant (251)..(251): Xaa in position 251 is any amino acid
  Variant (257)..(258): Xaa in position 257 to 258 is any amino acid
  Variant (260)..(262): Xaa in position 260 to 262 is any amino acid
  Variant (263)..(263): Xaa in position 263 is any or no amino acid
  Variant (266)..(268): Xaa in position 266 to 268 is any amino acid
  Variant (270)..(271): Xaa in position 270 to 271 is any amino acid
  Variant (272)..(292): Xaa in position 272 to 292 is any or no amino acid
  Variant (294)..(295): Xaa in position 294 to 295 is any amino acid
  Variant (298)..(298): Xaa in position 298 is any amino acid
  Variant (299)..(299): Xaa in position 299 is any or no amino acid
  Variant (302)..(302): Xaa in position 302 is any amino acid
  Variant (303)..(303): Xaa in position 303 is any or no amino acid
  Variant (306)..(306): Xaa in position 306 is any amino acid
  Variant (308)..(322): Xaa in position 308 to 322 is any amino acid
  Variant (323)..(337): Xaa in position 323 to 337 is any or no amino acid
  Variant (339)..(343): Xaa in position 339 to 343 is any amino acid
  Variant (345)..(346): Xaa in position 345 to 346 is any amino acid
  Variant (349)..(349): Xaa in position 349 is any amino acid
  Variant (352)..(353): Xaa in position 352 to 353 is any amino acid
  Variant (356)..(357): Xaa in position 356 to 357 is any amino acid
  Variant (359)..(361): Xaa in position 359 to 361 is any amino acid
  Variant (363)..(365): Xaa in position 363 to 365 is any amino acid
  Variant (366)..(369): Xaa in position 366 to 369 is any or no amino acid
  Variant (371)..(372): Xaa in position 371 to 372 is any amino acid
  Variant (373)..(373): Xaa in position 373 is any or no amino acid
  Variant (375)..(376): Xaa in position 375 to 376 is any amino acid
  Variant (378)..(380): Xaa in position 378 to 380 is any amino acid
  Variant (382)..(383): Xaa in position 382 to 383 is any amino acid
  Variant (386)..(388): Xaa in position 386 to 388 is any amino acid
  Variant (390)..(394): Xaa in position 390 to 394 is any amino acid
  Variant (395)..(395): Xaa in position 395 is any or no amino acid
  Variant (397)..(406): Xaa in position 397 to 406 is any amino acid
  Variant (407)..(417): Xaa in position 407 to 417 is any or no amino acid
  Variant (419)..(419): Xaa in position 419 is any amino acid
  Variant (421)..(423): Xaa in position 421 to 423 is any amino acid
  Variant (426)..(427): Xaa in position 426 to 427 is any amino acid
  Variant (428)..(428): Xaa in position 428 is any or no amino acid
  Variant (431)..(433): Xaa in position 431 to 433 is any amino acid
  Variant (435)..(444): Xaa in position 435 to 444 is any amino acid
  Variant (446)..(449): Xaa in position 446 to 449 is any amino acid
  Variant (452)..(454): Xaa in position 452 to 454 is any amino acid
  Variant (457)..(467): Xaa in position 457 to 467 is any amino acid
PXDXILXXXXXXXXXXXXXXXXXXXDXXXXKXXLXXGXYXXXXGXXXXXXXVXXAEXXXXXXXXXXXXXXYXXXXGXXXXXXXXXXLXXGXXXXXXXXXXXXXXXXRXXXXQXXXGTGXLXXXXXXXXXXXXXXXXXXXXXXXXXXXXXXXXPXWXNHXXXFXXXGXXXXXXXXXXXXYXYXXXXXXXXXXXXXXXXXXXXXXXXXXXXXXXXXXLHXCXHNPTGXDXXXXQWXXXXXXXXXXXXXPXXDXAYQGFXXGXXXXDAXXXRXXXXXXXXXXXXXXXXXXXXXXXSXXKNXXLYXXERXGXXXXXXXXXXXXXXXXXXXXXXXXXXXXXXQXXXXXRXXYSXPPXXGAXXVXXXLXXXXXXXLXXXWXXEXXXMXXRIXXXRXXXXXXLXXXXXXXXXXXXXXXXXXXXXQXGXXXMFXXXGLXXXQXXXXXXXXXXYXXXXGRXXXAGXXXXXXXXXXXA

SEQ ID NO: 91042 - protein, 10 aa, Artificial sequence
  protein pattern
  Variant (2)..(2): Xaa in position 2 is any amino acid
  Variant (6)..(6): Xaa in position 6 is Ala, Cys, Ser or Thr
  Variant (7)..(7): Xaa in position 7 is Phe or Tyr
  Variant (8)..(8): Xaa in position 8 is any amino acid
  Variant (10)..(10): Xaa in position 10 is Phe, Ile, Leu or Met
QXGMFXXXGX

SEQ ID NO: 91043 - protein, 19 aa, Artificial sequence
  protein pattern
  Variant (2)..(4): Xaa in position 2 to 4 is any amino acid
  Variant (6)..(6): Xaa in position 6 is any amino acid
  Variant (9)..(9): Xaa in position 9 is any amino acid
  Variant (10)..(10): Xaa in position 10 is Phe, His or Tyr
  Variant (12)..(12): Xaa in position 12 is Ala, Gly or Ser
  Variant (13)..(13): Xaa in position 13 is any amino acid
  Variant (14)..(14): Xaa in position 14 is Ile, Leu or Val
  Variant (15)..(15): Xaa in position 15 is Ala, Ile or Val
  Variant (16)..(17): Xaa in position 16 to 17 is any amino acid
  Variant (18)..(18): Xaa in position 18 is Ile, Leu or Val
  Variant (19)..(19): Xaa in position 19 is Phe, Leu, Met or Val
RXXXSXPPXXGXXXXXXXX

SEQ ID NO: 91044 - protein, 13 aa, Artificial sequence
  protein pattern
  Variant (2)..(2): Xaa in position 2 is Ala, Cys, Gly, Ser or Thr
  Variant (3)..(3): Xaa in position 3 is Ile, Leu, Pro or Val
  Variant (4)..(4): Xaa in position 4 is Gly or Ser
  Variant (6)..(6): Xaa in position 6 is Ser or Thr
  Variant (8)..(8): Xaa in position 8 is any amino acid
  Variant (9)..(10): Xaa in position 9 to 10 is any or no amino acid
  Variant (12)..(12): Xaa in position 12 is any amino acid
  Variant (13)..(13): Xaa in position 13 is Ala, Ile or Val
QXXXGXGXXXLXX

SEQ ID NO: 91045 - DNA, 312 bp, Saccharomyces cerevisiae; identical to SEQ ID NO: 22431
  CDS (1)..(312)

SEQ ID NO: 91046 - protein, 103 aa, Saccharomyces cerevisiae; identical to SEQ ID NO: 22432

SEQ ID NO: 91047 - DNA, 727 bp, Zea mays
  CDS (84)..(452)
cccacgcgtccgcggacgcgtgggcttgcaatcacaacgaacaaaagctctcgatctcaccgacaccgaggaagaagagatcaatggcgtccgagcagggagtcgtgatcgcgtgccacagcaaggctgagtttgacgcccacatgaccaaggcccaggaagccggcaagctggtggtcattgacttcactgccgcctggtgcggtccatgccgcgccatcgccccactgttcgtcgaacacgccaagaagttcactcaggtcgtcttcctgaaggtggacgtggacgaagtgaaggaagtcaccgcggcctacgaggtcgaggcgatgccgaccttccacttcgtcaagaacggcaagacggtcgcgaccatcgtgggtgccaagaaggacgagctcctggcccagatcgagaagcatgccgcgcctgcgcctgcgtctgcgtctgcctaaaggagatcagatcagtcgtcgccgtcaataagggccagcacgtatggctgtaaatgttgtcgttatcagttctggctttgtcgtttgtgggcgattgtgaactagtagtatgtttgtttctatccgagccggaggcgatacttaaccatggatacttgttgtgagttcgtttctgttcgcgtgtgactcttgaattgaatcaaccagctcaccactgcaccaggccgtggtgagtggtgacagtgatttcctgttaaaaaaaaaaaaaaaaaaaa

SEQ ID NO: 91048 - protein, 122 aa, Zea mays; identical to SEQ ID NO: 22586

SEQ ID NO: 91049 - DNA, 405 bp, Oryza sativa (japonica cultivar-group); identical to SEQ ID NO: 22473
  CDS (1)..(405)

SEQ ID NO: 91050 - protein, 134 aa, Oryza sativa (japonica cultivar-group); identical to SEQ ID NO: 22474

SEQ ID NO: 91051 - DNA, 321 bp, Bombyx mori; identical to SEQ ID NO: 22269
  CDS (1)..(321)

SEQ ID NO: 91052 - protein, 106 aa, Bombyx mori; identical to SEQ ID NO: 22270

SEQ ID NO: 91053 - DNA, 318 bp, Archaeoglobus fulgidus DSM 4304; identical to SEQ ID NO: 69596
  CDS (1)..(318): transl_table=11

SEQ ID NO: 91054 - protein, 105 aa, Archaeoglobus fulgidus DSM 4304; identical to SEQ ID NO: 69597

SEQ ID NO: 91055 - DNA, 321 bp, Mesorhizobium loti MAFF303099
  CDS (1)..(321): transl_table=11
atggctaccgtgaaagtcgatataaataacttccagtcggaagttctggaatccgcagcacccgtcgtcgtcgatttctgggccgaatggtgcgatccctgcaagatgattgctccgagcctcgaggaaatctccgtcgagatggaaagcaagatcaaggtcgccaagctcaacatcgatgaaaacccggaactcgccgcccaattgggcgtgcgctccattccggcgctcgcgatcttcaagggcggcgaagtggccgatttctcggtcggcgccaaaccgaagactgctcttttgaactggatttcgaacgctgcctga

SEQ ID NO: 91056 - protein, 106 aa, Mesorhizobium loti MAFF303099
MATVKVDINNFQSEVLESAAPVVVDFWAEWCDPCKMIAPSLEEISVEMESKIKVAKLNIDENPELAAQLGVRSIPALAIFKGGEVADFSVGAKPKTALLNWISNAA

SEQ ID NO: 91057 - DNA, 585 bp, Arabidopsis thaliana
  CDS (1)..(585)
atgaagggaaattggtcgatcgtacgaaaggttcttcatcgccagttctccactctccgttcctcgacaccatcgtcgcgattatctacttccatccgaccgcttgttctggccccaaactcgatatcgtcgctaatcgctagaaattcgttgttcactgcctccaacattggtccatccatcgattttaacttctccaacacttcgcttcctcatcggagaagcctctgttcggaagctggaggtgaaaatggtgttgttctagtgaaatcagaggaagagttcatcaatgcaatgagcaaagctcaagatggatctttaccatcggtcttctatttcactgccgcctggtgtggaccatgcaggtttatctctcctgtaatcgtggagcttagtaaacaatatcccgatgtaactacgtataaagtcgacattgatgagggcgggatttcgaacactatcagcaagttgaatatcacggctgtgccaacactgcatttcttcaaaggaggctcgaagaaaggggaggttgtgggtgcagatgtcacgaagctgaagaatctcatggaacagctctacaagtga

SEQ ID NO: 91058 - protein, 194 aa, Arabidopsis thaliana
MKGNWSIVRKVLHRQFSTLRSSTPSSRLSTSIRPLVLAPNSISSLIARNSLFTASNIGPSIDFNFSNTSLPHRRSLCSEAGGENGVVLVKSEEEFINAMSKAQDGSLPSVFYFTAAWCGPCRFISPVIVELSKQYPDVTTYKVDIDEGGISNTISKLNITAVPTLHFFKGGSKKGEVVGADVTKLKNLMEQLYK

SEQ ID NO: 91059 - DNA, 315 bp, Bacillus halodurans C-125
  CDS (1)..(315): transl_table=11
atggcaattgtaaatgttactgatcaaacgtttgctcaagaaacaagcgaaggtcttgttcttgcagacttctgggcaccgtggtgcggcccttgtaaaatgattgctccagttctagaagaacttgatggggaaatgggcgataaagttaagattgcaaaattggatgtagatgaaaatcaagaaacagcaagcaaattcaatgtaatgagtatcccaacgttgatcgttttcaaagacggtcaagtcgtggatcaagtgactggcttccaaccaaaggacgcattagctgagcttttgaacaaacatctttaa

SEQ ID NO: 91060 - protein, 104 aa, Bacillus halodurans C-125
MAIVNVTDQTFAQETSEGLVLADFWAPWCGPCKMIAPVLEELDGEMGDKVKIAKLDVDENQETASKFNVMSIPTLIVFKDGQVVDQVTGFQPKDALAELLNKHL

SEQ ID NO: 91061 - DNA, 315 bp, Lactococcus lactis subsp. lactis Il1403
  CDS (1)..(315): transl_table=11
atggaatataatattactgatgcaacgtttgatgaagaaacaaaagaagggcttgttttaattgacttttgggcaacttggtgtggtccatgtcgcatgcaagcgccaattttggaacaactttcagaagaacttgacgaatcagaacttaagatttgcaaaatggatgttgatgaaaacccagcaacagcccaaggatttggcattatgtctatcccaacattgatgttcaaaaaagatggtgaagaagtaaaacgcattgttggtgttcaaacaaaagcacaacttaaagccgttattgctgaattatcataa

SEQ ID NO: 91062 - protein, 104 aa, Lactococcus lactis subsp. lactis Il1403
MEYNITDATFDEETKEGLVLIDFWATWCGPCRMQAPILEQLSEELDESELKICKMDVDENPATAQGFGIMSIPTLMFKKDGEEVKRIVGVQTKAQLKAVIAELS

SEQ ID NO: 91063 - DNA, 315 bp, Campylobacter jejuni subsp. jejuni NCTC 11168
  CDS (1)..(315): transl_table=11
atgggaaaatatattgaattaacaagtgataattttgctcaagcaaaagaaggtgtagctttagttgatttttgggctccatggtgcggaccttgtagaatgcttgctccagttattgatgaactttcaaatgacttcgatggtaaagctaaaatttgcaaagtaaatacagatgaacaaggtgatttagcagctgaatttggtgttcgctctattcctacgcttattttctttaaaaatggtgaagttgtagatcaactcgttggtgcacaatctaaacaagcaattagcgataaattaaactctttactataa

SEQ ID NO: 91064 - protein, 104 aa, Campylobacter jejuni subsp. jejuni NCTC 11168
MGKYIELTSDNFAQAKEGVALVDFWAPWCGPCRMLAPVIDELSNDFDGKAKICKVNTDEQGDLAAEFGVRSIPTLIFFKNGEVVDQLVGAQSKQAISDKLNSLL

SEQ ID NO: 91065 - DNA, 315 bp, Streptococcus pneumoniae TIGR4
  CDS (1)..(315): transl_table=11
atggcaaaagcaattacagatgcaacattcgaacaagaaacaaaagacggtttggtcttagtagacttctgggcaacttggtgtggtccatgtcgtatgcaaggtccaatcttggacaaattgtctgaagaactttcagaagatgtcttgaaaatcgttaaaatggacgttgatgaaaatccaaacacagctcgtgcttttggaatcatgtctattccaactcttctcttcaaaaaagacggccaagttgtcaaacaagttgcaggtgttcacacagcagaacaaatcaaggccatcattgctgaattgagctaa

SEQ ID NO: 91066 - protein, 104 aa, Streptococcus pneumoniae TIGR4
MAKAITDATFEQETKDGLVLVDFWATWCGPCRMQGPILDKLSEELSEDVLKIVKMDVDENPNTARAFGIMSIPTLLFKKDGQVVKQVAGVHTAEQIKAIIAELS

SEQ ID NO: 91067 - DNA, 318 bp, Clostridium acetobutylicum ATCC 824
  CDS (1)..(318): transl_table=11
atggtaaaagaaattaatgagtctatttttgatgaagaaataaaaacttcaggagagcctgtaatagttgatttttgggctccatggtgcggaccttgcaaaatgcttggacctataattgatgaattatctgaagatcttgatggtaaagcaaaatttacaaaggttaatgtagatgagaatcctggaatagcaagtaagtttggaatagcaagtatacctacagttatgatatttaaagatggaaatcctgttgaaactttagtaggttttagacctaagcaatcaatcacagcttctatagaaaagcacatgtaa

SEQ ID NO: 91068 - protein, 105 aa, Clostridium acetobutylicum ATCC 824
MVKEINESIFDEEIKTSGEPVIVDFWAPWCGPCKMLGPIIDELSEDLDGKAKFTKVNVDENPGIASKFGIASIPTVMIFKDGNPVETLVGFRPKQSITASIEKHM

SEQ ID NO: 91069 - DNA, 402 bp, Agrobacterium tumefaciens str. C58; identical to SEQ ID NO: 69604
  CDS (1)..(402): transl_table=11

SEQ ID NO: 91070 - protein, 133 aa, Agrobacterium tumefaciens str. C58; identical to SEQ ID NO: 69605

SEQ ID NO: 91071 - DNA, 423 bp, Sulfolobus tokodaii str. 7
  CDS (1)..(423): transl_table=11
atgacgagtaaagataaaattagtatgacaactgagaaagaccctgaattaggaaaattgctagagaagaaagccaaagaacttatgagccaaaagcctaaaggagaagtaattcatttagatagtaaaaactttgactctttcttagcttcgcacaaaatcgcagtagttgatttttgggcagagtggtgtgcaccatgtttaatccttgcacccataattgaggaattagcagaagattatccacaagttggatttggaaagttaaacagcgacgaaaatccagatattgccgcaagatatggtgtcatgagtctacctacagttatcttctttaaagatggtgaaccagtagatgaaattataggtgctgttccaagagaagaaatagagataagaattaagaatttattaggtgaataa

SEQ ID NO: 91072 - protein, 140 aa, Sulfolobus tokodaii str. 7
MTSKDKISMTTEKDPELGKLLEKKAKELMSQKPKGEVIHLDSKNFDSFLASHKIAVVDFWAEWCAPCLILAPIIEELAEDYPQVGFGKLNSDENPDIAARYGVMSLPTVIFFKDGEPVDEIIGAVPREEIEIRIKNLLGE

SEQ ID NO: 91073 - DNA, 324 bp, Sinorhizobium meliloti 1021
  CDS (1)..(324): transl_table=11
atggctactgtgaaagtcgatactgccaattttcagaaagaagttctgaactcggccgaaccggtcgtcgtcgacttctgggcggaatggtgcggcccgtgcaagatgattgcgccgagcctcgaagaaatcgccaccgagcttgccggcaaggtcaaggtcgtcaagctcaatatcgacgaaaaccccgagctcgcggcgcaatacggggtccgctcgatcccgacgcttgccatgttcaagggcggcgaagtcgccgacatcaaggtcggcgccgcaccgaagacggcgctcagctcgtggatttcgaacgcggtggcttga

SEQ ID NO: 91074 - protein, 107 aa, Sinorhizobium meliloti 1021
MATVKVDTANFQKEVLNSAEPVVVDFWAEWCGPCKMIAPSLEEIATELAGKVKVVKLNIDENPELAAQYGVRSIPTLAMFKGGEVADIKVGAAPKTALSSWISNAVA

SEQ ID NO: 91075 - DNA, 321 bp, Agrobacterium tumefaciens str. C58
  CDS (1)..(321): transl_table=11
atggctaccgtaaaagtcgatgccgccaacttccagtccgaagtcctcgaatccgccgaacccgtcgtggtggatttctgggccgagtggtgcggtccgtgcaagatgatcgcgccgagccttgaggaaatttcctccgagctggctggcaaggtcaaagttgcgaagctcaacatcgacgaaaacccggagctggccgctcagttcggcgttcgctcgatcccgacgcttgccatattcaagggtggcgaagtggctgatatcaaggtaggtgctgcacccaagacagcgctttccgcctggatttccagcgctgcttaa

SEQ ID NO: 91076 - protein, 106 aa, Agrobacterium tumefaciens str. C58
MATVKVDAANFQSEVLESAEPVVVDFWAEWCGPCKMIAPSLEEISSELAGKVKVAKLNIDENPELAAQFGVRSIPTLAIFKGGEVADIKVGAAPKTALSAWISSAA

SEQ ID NO: 91077 - DNA, 315 bp, Clostridium perfringens str. 13
  CDS (1)..(315): transl_table=11
atggtaaaacatataaatgatcaagattttaatacagaagtaatagaagcaagtgaagtagtagttgttgatttctgggcaacttggtgtggaccttgtaaaatgatagcaccagttatagaagaattagcaaatgaaatggaaaatgttaagtttgtaaaggttgatgttgataaaaacccaggttcagctggaaaatatcaaatacaaagcataccaactttattaatatttaaagatggaaaagttgttgatactttagttggctttagaccaaaggctgcattagttgaagctatcaaaaaatacgtttaa

SEQ ID NO: 91078 - protein, 104 aa, Clostridium perfringens str. 13
MVKHINDQDFNTEVIEASEVVVVDFWATWCGPCKMIAPVIEELANEMENVKFVKVDVDKNPGSAGKYQIQSIPTLLIFKDGKVVDTLVGFRPKAALVEAIKKYV

SEQ ID NO: 91079 - DNA, 873 bp, Schizosaccharomyces pombe 972h-
  CDS (1)..(873)
atgtcagttattgaaattagatcgtaccagcactggatctcaacgatccctaagtccggatatcttgcagttgattgctatgccgattggtgtggtccttgcaaagcaatttctcccttattttcacaattagcatcgaaatatgctagccccaaattcgtttttgctaaagtaaatgtagacgagcaacgtcaaattgcctccgggcttggcgtcaaagcaatgcctacatttgttttctttgaaaatggcaaacaaattgatatgctaactggagcaaacccacaagctttgaaggaaaaagttgctttgatttcctcaaaagccacaggaactggcgctcttgcttcttcgtcatcggcacctgtcaagggttttgctagcttgcaaggctgcattgaaaatccccaattggaatgtctaaatcaacaagatgatcacgatttgaaaagtgcatttaacagtaatccttcctcatttttagagtcggatgttgacgagcaattaatgatatacataccttttcttgaagtggtaaaggttcattctattgcaattactcctgttaagggagaaacttcgagtgctccaaaaaccatcaaattgtacatcaatcagcccaacaatctttcttttgaagatgctgagtcatttactccaactcaagtcattgaggatatagtttacgaacaagacgatcaacctacaattattccccttcgttttgttaaatttcaacgtgtcaattctctcgttatttttatttattcgaatgtcggagaagaagaaactactaagatttctcgcttagaattatttggtgagcctgttggtgattcaagtaaaggaaaactacaaaaggtcgaagcttag

SEQ ID NO: 91080 - protein, 290 aa, Schizosaccharomyces pombe 972h-
MSVIEIRSYQHWISTIPKSGYLAVDCYADWCGPCKAISPLFSQLASKYASPKFVFAKVNVDEQRQIASGLGVKAMPTFVFFENGKQIDMLTGANPQALKEKVALISSKATGTGALASSSSAPVKGFASLQGCIENPQLECLNQQDDHDLKSAFNSNPSSFLESDVDEQLMIYIPFLEVVKVHSIAITPVKGETSSAPKTIKLYINQPNNLSFEDAESFTPTQVIEDIVYEQDDQPTIIPLRFVKFQRVNSLVIFIYSNVGEEETTKISRLELFGEPVGDSSKGKLQKVEA

SEQ ID NO: 91081 - DNA, 366 bp, Schizosaccharomyces pombe 972h-
  CDS (1)..(366)
atgagatcttttgctctgcgcagaagttttactagctctcgtattttgagaaaggtgaacgcagttgaatcgtttggcgattacaatactcgaattagtgctgacaaagttaccgtcgttgatttctatgcagactggtgcggtccttgcaaatacctcaaaccgtttcttgaaaaattaagcgaacaaaatcagaaagcatcttttattgctgttaatgcagataaattttctgatattgctcaaaagaacggtgtttatgccttgcctaccatggtattgtttcgtaagggtcaagaattggacagaatcgtcggcgctgatgtgaaaactttatcttctttgttggcaaaatatcaagaatag

SEQ ID NO: 91082 - protein, 121 aa, Schizosaccharomyces pombe 972h-
MRSFALRRSFTSSRILRKVNAVESFGDYNTRISADKVTVVDFYADWCGPCKYLKPFLEKLSEQNQKASFIAVNADKFSDIAQKNGVYALPTMVLFRKGQELDRIVGADVKTLSSLLAKYQE

SEQ ID NO: 91083 - DNA, 342 bp, Xanthomonas axonopodis pv. citri str. 306
  CDS (1)..(342): transl_table=11
gtgagcgataaggttcaacatgtcggcgatgccgacttcgacacagctgtactgcaagcgggcgaaccggttctggtggatttctgggccgagtggtgcggcccatgcaagatgatcgccccggtgctggacgatctggccgacacctatcagggccgcctcaaggtcgccaaggtcaatgtggaccagaaccgtgcgctggccatcaagtaccacgtgcgctcgattccgatgctgttgctgttcaaggacgggcaggtgcaggcgacccagatcggtgccgtcggcaagggccagctgacccagatgatcgacaagaccctgggtggcgcggccgcctga

SEQ ID NO: 91084 - protein, 113 aa, Xanthomonas axonopodis pv. citri str. 306
MSDKVQHVGDADFDTAVLQAGEPVLVDFWAEWCGPCKMIAPVLDDLADTYQGRLKVAKVNVDQNRALAIKYHVRSIPMLLLFKDGQVQATQIGAVGKGQLTQMIDKTLGGAAA

SEQ ID NO: 91085 - DNA, 420 bp, Drosophila melanogaster
  CDS (1)..(420)
atggctgccatgcagaagaaggtcatcattgtggattcgaagagttactttgataagctcatcgatgatgcgggaaccaacaaatacgtacttgtcgagttcttcgccacctggtgtggtccttgcgcgatgattggtccccgcttggagcaactggcatcggattacttcggacggatgttggtccttaagattgacgttgatgagaacgaagatctggccgttcagtacgaagtcaacagcatgcccacatttctgatcatcaaaaaccgagtgacactaatccagttcgtgggcggcaatgtcgaaagggtcgtcagcacggtggagaagtttgtgggcaaggtggaggactccaaggagcacaagtcgaaagagggaggtgctagttcagctaccgtgccgaaattggaacgctaa

SEQ ID NO: 91086 - protein, 139 aa, Drosophila melanogaster
MAAMQKKVIIVDSKSYFDKLIDDAGTNKYVLVEFFATWCGPCAMIGPRLEQLASDYFGRMLVLKIDVDENEDLAVQYEVNSMPTFLIIKNRVTLIQFVGGNVERVVSTVEKFVGKVEDSKEHKSKEGGASSATVPKLER

SEQ ID NO: 91087 - DNA, 324 bp, Thermosynechococcus elongatus BP-1
  CDS (1)..(324): transl_table=11
atgtccagtgcattgtcggttacagatgccacctttgaagaagaagtattaaatagcgatattcctgtgttagtggatttctgggcaccttggtgtgggccgtgccgcatggtggcacccgttgttgatgaaatcgccaatgagtatcagggcagagtcaaggtcgtcaaggtcaatactgacgaaaactctaaggtggcgactgattttggcattcgcagtatcccgacgctgatgatttttaagggcggccaaaaggtggatattttggtcggcgcagtgccaaaaaccaaaattgaggccactcttgcacagttcctgtag

SEQ ID NO: 91088 - protein, 107 aa, Thermosynechococcus elongatus BP-1
MSSALSVTDATFEEEVLNSDIPVLVDFWAPWCGPCRMVAPVVDEIANEYQGRVKVVKVNTDENSKVATDFGIRSIPTLMIFKGGQKVDILVGAVPKTKIEATLAQFL

SEQ ID NO: 91089 - DNA, 315 bp, Oceanobacillus iheyensis HTE831
  CDS (1)..(315): transl_table=11
atggctattaagcatgtaactgatcaaaactttacagaagaaacttcaaaaggtcttgtattggctgatttttgggcaccgtggtgtggaccttgtaaaatgattgcaccagtactagaagaaattgatggtgagatggaagaaaaagtacaaattgttaaattagatgtagatgaaaatcaagaaactgcaggtaaatttggagtaatgagcatcccaacattactattattcaaagatggggatgtagtggatcaagttattggattccagccgaaagaagcattagaggatcttataaacaaacacgcgtaa

SEQ ID NO: 91090 - protein, 104 aa, Oceanobacillus iheyensis HTE831
MAIKHVTDQNFTEETSKGLVLADFWAPWCGPCKMIAPVLEEIDGEMEEKVQIVKLDVDENQETAGKFGVMSIPTLLLFKDGDVVDQVIGFQPKEALEDLINKHA

SEQ ID NO: 91091 - DNA, 315 bp, Streptococcus mutans UA159
  CDS (1)..(315): transl_table=11
atgacaaaagtagttacagatgcaacttttgaagctgaaacggctaagggacttgtacttgttgatttttgggcaacatggtgtggtccatgtcttatgcaggcgccaattttggaacagctttcagaagaattagatgaagatgaactcaaaattgttaagcttgatgtggatgaaaatcctaatacagcacaaaattttggcatcatgtcgattccaactttgctttttaaaaaggatggcgaagttgtcaaacaagttgcaggtgttcatacgaaagatcaaattaaggctattgtagccgaacttgcatag

SEQ ID NO: 91092 - protein, 104 aa, Streptococcus mutans UA159
MTKVVTDATFEAETAKGLVLVDFWATWCGPCLMQAPILEQLSEELDEDELKIVKLDVDENPNTAQNFGIMSIPTLLFKKDGEVVKQVAGVHTKDQIKAIVAELA

SEQ ID NO: 91093 - DNA, 321 bp, Drosophila melanogaster; identical to SEQ ID NO: 22277
  CDS (1)..(321)

SEQ ID NO: 91094 - protein, 106 aa, Drosophila melanogaster; identical to SEQ ID NO: 22278

SEQ ID NO: 91095 - DNA, 327 bp, Vibrio vulnificus CMCP6
  CDS (1)..(327): transl_table=11
atgagtgacaagattttgcagctgtctgacgaaggtttcgaaaacgacgttatcaacgctgcaggcccagtactagttgatttttgggcagaatggtgtggtccttgtaagatgattgccccaatcctggacgaaatcgcagaagagtacgaaggcaaactcactatcggcaaactgaatattgaccacaacgcgggcacaccacctaagtttggtattcgtggcatcccaaccctgctgcttttcaaaaacggcagcgtagctgcgacgaaagtgggcgcactgtcaaaaactcaattgaaagagtttttggatgcgaacctataa

SEQ ID NO: 91096 - protein, 108 aa, Vibrio vulnificus CMCP6
MSDKILQLSDEGFENDVINAAGPVLVDFWAEWCGPCKMIAPILDEIAEEYEGKLTIGKLNIDHNAGTPPKFGIRGIPTLLLFKNGSVAATKVGALSKTQLKEFLDANL

SEQ ID NO: 91097 - DNA, 333 bp, Lactobacillus plantarum WCFS1
  CDS (1)..(333): transl_table=11
atgatcgaaccagtcgataagacgacttttgcgacggtggctgatggtaccgcgttaactgtggttgatttttgggcggattggtgtggcccttgcaagatgcaggaaccagtgcttgaagcgttagatgaactgtacgatgggcaagtgaaatttgcttcgctcgacgttgatcaacatcaggaaattgcgcaacaatttgagattatgagtattccggcgttagtgatattcaagaatggccagcccgctgaaaaggtggttggttttcatccccaagcagcattgaagaaatatctggatcaaaaactagccgaagtgaagcctgcctaa

SEQ ID NO: 91098 - protein, 110 aa, Lactobacillus plantarum WCFS1
MIEPVDKTTFATVADGTALTVVDFWADWCGPCKMQEPVLEALDELYDGQVKFASLDVDQHQEIAQQFEIMSIPALVIFKNGQPAEKVVGFHPQAALKKYLDQKLAEVKPA

SEQ ID NO: 91099 - DNA, 315 bp, Bacteroides thetaiotaomicron VPI-5482; identical to SEQ ID NO: 22279
  CDS (1)..(315): transl_table=11

SEQ ID NO: 91100 - protein, 104 aa, Bacteroides thetaiotaomicron VPI-5482; identical to SEQ ID NO: 22280

SEQ ID NO: 91101 - DNA, 315 bp, Enterococcus faecalis V583
  CDS (1)..(315): transl_table=11
atgacacaagcaattaccgataaagattttgcaacagaaacagatgaaggattagtcttaatcgacttttgggcaacttggtgtggcccttgccgtatgcaagcacccatcttagaacaattatctgaagaatatgatgaagacgaagtgaaaatcgtcaaaatggatgtggatgaaaatcctgcaacaccagcaagttttggaatcatgagcatcccaacattgctattgaaaaaagatggcgaagttgttgaaaaagcagtcggtgttcatacaaaagaccaattgcaagcaatgattgccaaacacttataa

SEQ ID NO: 91102 - protein, 104 aa, Enterococcus faecalis V583
MTQAITDKDFATETDEGLVLIDFWATWCGPCRMQAPILEQLSEEYDEDEVKIVKMDVDENPATPASFGIMSIPTLLLKKDGEVVEKAVGVHTKDQLQAMIAKHL

SEQ ID NO: 91103 - DNA, 339 bp, Coxiella burnetii RSA 493
  CDS (1)..(339): transl_table=11
atgagcgaacatgtacatactgcttccgacgaaaactttgaaactgaagtgctgcaagccgatatgcctgtccttgtggacttttgggcagaatggtgccagccctgcaagatgattagtccggttgttgaggaaatcgcaaaggaatacgccggtcgcgttaaggtatttaaactcaatgtggatgaaaatgcgcaaacccctacaaaatacggcgtgagaggaatacccagtcttttaatctttcgtgagggcgaagtagttgataggaaagtcggtgcacttaataaatcgcaattagcggcctttttagatgagagcttgcatttttcttcataa

SEQ ID NO: 91104 - protein, 112 aa, Coxiella burnetii RSA 493
MSEHVHTASDENFETEVLQADMPVLVDFWAEWCQPCKMISPVVEEIAKEYAGRVKVFKLNVDENAQTPTKYGVRGIPSLLIFREGEVVDRKVGALNKSQLAAFLDESLHFSS

SEQ ID NO: 91105 - DNA, 327 bp, Rhodopirellula baltica SH 1
  CDS (1)..(327): transl_table=11
atggcctcagaagcagtcaaagaattcaacgacgacaatttcgattccgaagtcctcaaaagcgacagccctgtgctggttgacttttgggctccatggtgtggtccttgccgtcaaattgcacccatgatcgacgaactggcttcggaaaatcctggcgtcaagattggcaaagtcaacatcgacgataacccaggtgccgctcaaaagttcggcatcaacagcatcccaacattgttgctgttcaagaacggcgagatcgctgacaccttcgttggtgttcgcccgaaagccgctttgcaagacgccctgacttcggtcagctga

SEQ ID NO: 91106 - protein, 108 aa, Rhodopirellula baltica SH 1
MASEAVKEFNDDNFDSEVLKSDSPVLVDFWAPWCGPCRQIAPMIDELASENPGVKIGKVNIDDNPGAAQKFGINSIPTLLLFKNGEIADTFVGVRPKAALQDALTSVS

SEQ ID NO: 91107 - DNA, 318 bp, Haemophilus ducreyi 35000HP
  CDS (1)..(318): transl_table=11
atgacacatcaagtaactgatgcaacatttgaacaagaagttttaaaatcggatttacctgttttattggatttttgggcaccgtggtgtggcccttgcagaacgattgcgccatggttagatgaattagcacaagagttcgcaggacgtgctaaagtggctaaagtaaatgtagatgaaaatcaacaaatcgctgctcaatttggtattcgttccattccaacgttactactatttaaaaatggggaagtggtcgcgattcaagttggtgtattaccaaaatcacaattagttacttttattgaacaagcgctttaa

SEQ ID NO: 91108 - protein, 105 aa, Haemophilus ducreyi 35000HP
MTHQVTDATFEQEVLKSDLPVLLDFWAPWCGPCRTIAPWLDELAQEFAGRAKVAKVNVDENQQIAAQFGIRSIPTLLLFKNGEVVAIQVGVLPKSQLVTFIEQAL

SEQ ID NO: 91109 - DNA, 426 bp, Bordetella bronchiseptica RB50
  CDS (1)..(426): transl_table=11
atgacagtggtatgctttaatccttcctacacgtcgaacaagaacagcggccgcatgctccatgcacgggccgcgcagcggaatccgagaatcaccatcatgagcgagcaaatcaagaacgtcagcgacgccagcttcgaggcagatgtgctgaaatccggccagccggtgctggtggactactgggccgcctggtgtggcccctgcaagatgatcgcccccatcctcgaagaggtggcttccgaatacgccggccgcctgaccgtggccaagctgaacgtggacgaaaaccaggacacggcggccaagtacggcgtgcgcggcattccgaccctgatgctgttcaaggacggccaggccgccgccaccaaggtcggcgccctgtccaaatcgcaactgaccgcattcctggacggcgcgttgtaa

SEQ ID NO: 91110 - protein, 141 aa, Bordetella bronchiseptica RB50
MTVVCFNPSYTSNKNSGRMLHARAAQRNPRITIMSEQIKNVSDASFEADVLKSGQPVLVDYWAAWCGPCKMIAPILEEVASEYAGRLTVAKLNVDENQDTAAKYGVRGIPTLMLFKDGQAAATKVGALSKSQLTAFLDGAL

SEQ ID NO: 91111 - DNA, 315 bp, Porphyromonas gingivalis W83; identical to SEQ ID NO: 22281
  CDS (1)..(315): transl_table=11

SEQ ID NO: 91112 - protein, 104 aa, Porphyromonas gingivalis W83; identical to SEQ ID NO: 22282

SEQ ID NO: 91113 - DNA, 333 bp, Gloeobacter violaceus PCC 7421
  CDS (1)..(333): transl_table=11
atgtcagctgcagtgccggttggtgattcgaacttcaaaaccgaagttctcgacagcgaattgccagtgctggttgatttctgggctccctggtgcgggccgtgccgcatggtggcgccggtggtcgacgagattgcccagcagtacagtggcaagctcaaggtggtcaaggtcaacaccgacgaaaatccccaggtggcaagccagtacggcatccgcagcattccgacgctgatggtttttaagtccggctccaaggtggatatggtcgtcggtgccgttccgaagacgacgctggccaccaccctcgaaaagcatatcgatatcaaatag

SEQ ID NO: 91114 - protein, 110 aa, Gloeobacter violaceus PCC 7421
MSAAVPVGDSNFKTEVLDSELPVLVDFWAPWCGPCRMVAPVVDEIAQQYSGKLKVVKVNTDENPQVASQYGIRSIPTLMVFKSGSKVDMVVGAVPKTTLATTLEKHIDIK

SEQ ID NO: 91115 - DNA, 327 bp, Photorhabdus luminescens subsp. laumondii TTO1
  CDS (1)..(327): transl_table=11
atgagcgacaaaattattcatttgagtgacgctagctttgatactgacgttcttaacgcagcaggtccagttcttgtcgatttttgggctgcctggtgtggaccatgtaaaatgattgcacctattttagatgaaattgccccagaatattcaggcaaactgactattactaaattgaacattgatgacaacccggcaactgctcctaagtatggtatccgtggtattcctacactgttgctgtttaaagatggtcaggttgctgctacaaaagtgggagcactgtcaaaaactcaattgaaagaatttttggatgctaatctctga

SEQ ID NO: 91116 - protein, 108 aa, Photorhabdus luminescens subsp. laumondii TTO1
MSDKIIHLSDASFDTDVLNAAGPVLVDFWAAWCGPCKMIAPILDEIAPEYSGKLTITKLNIDDNPATAPKYGIRGIPTLLLFKDGQVAATKVGALSKTQLKEFLDANL

SEQ ID NO: 91117 - DNA, 321 bp, Rhodopseudomonas palustris CGA009
  CDS (1)..(321): transl_table=11
atggccgttggtaaggtgtcagacgccgatttcgaaaacgaggttctcaacgcccaggggcctgtggtggtggacttctgggccgagtggtgcggcccgtgccgcatgatcgcgccggcgctcgatgaaatcgccggagcgatgggcgacaaggtcaagatcgtgaagctcaacgtcgacgaaagcccggtcaccgcctcgaagtatggcgtgatgtcgatcccgaccctgatgatcttcaagggcggcgagatggcttcgcgccaggtcggcgccgcgccgaaggccaagctgcagcagtggatcagcgcagcggtctga

SEQ ID NO: 91118 - protein, 106 aa, Rhodopseudomonas palustris CGA009
MAVGKVSDADFENEVLNAQGPVVVDFWAEWCGPCRMIAPALDEIAGAMGDKVKIVKLNVDESPVTASKYGVMSIPTLMIFKGGEMASRQVGAAPKAKLQQWISAAV

SEQ ID NO: 91119 - DNA, 330 bp, Geobacter sulfurreducens PCA
  CDS (1)..(330): transl_table=11
atggccagtgacaaagtcctcacattcagtgacgataccttcgatagcgaggtgctcaagtcgcccgttccggttctcgttgatttttgggccacctggtgcgccccctgcaaggccatcgctcctgtcatcgatgccattgccgacgaatttgacggaaaagtgaaggtcggcaaggttaatgttgatgataaccccggaactccgggcaagtacggcgtgcgcggcatccctaccgttatcctcttcaaggagggcaaggtcgtggatcaggtcgtcggggccgtgcccaaagcccaacttgaggcgcttatcaaaaaagcgctgtaa

SEQ ID NO: 91120 - protein, 109 aa, Geobacter sulfurreducens PCA
MASDKVLTFSDDTFDSEVLKSPVPVLVDFWATWCAPCKAIAPVIDAIADEFDGKVKVGKVNVDDNPGTPGKYGVRGIPTVILFKEGKVVDQVVGAVPKAQLEALIKKAL

SEQ ID NO: 91121 - DNA, 309 bp, Mycoplasma mycoides subsp. mycoides SC str. PG1; identical to SEQ ID NO: 22283
  CDS (1)..(309): transl_table=4

SEQ ID NO: 91122 - protein, 102 aa, Mycoplasma mycoides subsp. mycoides SC str. PG1; identical to SEQ ID NO: 22284

SEQ ID NO: 91123 - DNA, 300 bp, Strongylocentrotus purpuratus
  CDS (1)..(300)
atggctggatccgttgtccaaattgcaaatttgggggaatataaagatttcatcaaggattctcccgctgtaatcgacttctacgcaacatggtgtggaccatgcaagggactcgcaacagaatacccggctgtgaaatttggtaaagtggatgttgatgacgcatcggaagtatcagaagagtgtggcatcagtgcgatgcctacattccagttctttaagaatggggagaaagtagcagaagtgaaaggagcaagtgaaaaagcactggtggatgccctcaaggaattaataaaatag

SEQ ID NO: 91124 - protein, 99 aa, Strongylocentrotus purpuratus
MAGSVVQIANLGEYKDFIKDSPAVIDFYATWCGPCKGLATEYPAVKFGKVDVDDASEVSEECGISAMPTFQFFKNGEKVAEVKGASEKALVDALKELIK

SEQ ID NO: 91125 - DNA, 396 bp, Strongylocentrotus purpuratus
  CDS (1)..(396)
atgttatactgtcttagagcagtagatggcgccattacagtgctactccatctcaagcacatcatcttgaggattaggaggattgcctttcctcaagattttgacaatatactcaccacgtctggggacaagctggttgttatatacttcagcgccacttggtgcggaccatgtcgatccatctcaccggagtttgaaactctttcgaaagatcctgaaatagcctccaatgtagttttctgtaaagctgatgtagacgaagcgtcagagatagcagaagaatgtgaagtccaatgtatgccgacattctgcttcttcagaggggaatcaaagatttaccagttctctggaggaaataaaggaaggctgagagaatacatcgcaaaatacaagtga

SEQ ID NO: 91126 - protein, 131 aa, Strongylocentrotus purpuratus
MLYCLRAVDGAITVLLHLKHIILRIRRIAFPQDFDNILTTSGDKLVVIYFSATWCGPCRSISPEFETLSKDPEIASNVVFCKADVDEASEIAEECEVQCMPTFCFFRGESKIYQFSGGNKGRLREYIAKYK

SEQ ID NO: 91127 - DNA, 414 bp, Nasonia vitripennis
  CDS (1)..(414)
atgcttcgtactggattcagagtagtgtacagggctgttggcactaggggatatacgagtgccgcgccagaaaaaactgtagcttcttcaagtttcaaagtacaggacagcaaggatttcacagacagagttaaaaatgcaaaagtcccagtgattgttgacttttttgcaacatggtgcaatccatgccgattgttaacaccaagaatagagcaagttgttgctgaaaaacagggtaaaatactactagccaaagttgatatcgatgaaaacacagacctcgctttggattatgaggttggctctgtacctgtacttatggttatgaaagatggtaaagtcttggaaaaaattattggattacaagatactgacaaacttagaaaatttgttagcaagcatgctgattcatag

SEQ ID NO: 91128 - protein, 137 aa, Nasonia vitripennis
MLRTGFRVVYRAVGTRGYTSAAPEKTVASSSFKVQDSKDFTDRVKNAKVPVIVDFFATWCNPCRLLTPRIEQVVAEKQGKILLAKVDIDENTDLALDYEVGSVPVLMVMKDGKVLEKIIGLQDTDKLRKFVSKHADS

SEQ ID NO: 91129 - DNA, 411 bp, Anopheles gambiae str. PEST
  CDS (1)..(411)
atgctccgtatcttccgcaatgccatactggacaaacgcatcacccgcaagacgttctccttctcagccattgcggccaagcgctacgtcataaaggatcactacgagttcgaccagaaggtgataaacagcgacaacccggtgatcgtcaacttccacgccgaatggtgtgacccgtgcaaaatacttaccccgaagatgacggaactgctggaaccgtcggaggagatcgatctggcgatcgtcgatgtggatgacaatgcggagctggtgcagacgttcgaggtgaaggcggtccccgccatccttgccttccggaacggtgtggtggtggacaaattcatcggcctggtggacgcgaacatgatcgagaatctgattggcaagctgacgaagaaaaaggccacctaa

SEQ ID NO: 91130 - protein, 136 aa, Anopheles gambiae str. PEST
MLRIFRNAILDKRITRKTFSFSAIAAKRYVIKDHYEFDQKVINSDNPVIVNFHAEWCDPCKILTPKMTELLEPSEEIDLAIVDVDDNAELVQTFEVKAVPAILAFRNGVVVDKFIGLVDANMIENLIGKLTKKKAT

SEQ ID NO: 91131 - DNA, 324 bp, Anopheles gambiae str. PEST
  CDS (1)..(324)
atggtgtacatggtgaaagattccgaggacttcaacaacaagctggaagcggccggcgaccagctcgtcgtggtcgatttcttcgccacctggtgcggcccgtgcaaggtgatcgccccgaagctggaggagttccagaacaagtacgcggacaagatcgtcgtggtgaaggtggacgtggacgagtgcgaggagctggcggcccagtacaacattgccagcatgcccaccttcctgttcatcaagcggaaggaggtggtcggccagttctccggcgcgaacgcggaaaagctggaaaacttcatccagcagcactcggcgtaa

SEQ ID NO: 91132 - protein, 107 aa, Anopheles gambiae str. PEST
MVYMVKDSEDFNNKLEAAGDQLVVVDFFATWCGPCKVIAPKLEEFQNKYADKIVVVKVDVDECEELAAQYNIASMPTFLFIKRKEVVGQFSGANAEKLENFIQQHSA

SEQ ID NO: 91133 - DNA, 324 bp, Magnaporthe grisea 70-15; identical to SEQ ID NO: 22285
  CDS (1)..(324)

SEQ ID NO: 91134 - protein, 107 aa, Magnaporthe grisea 70-15; identical to SEQ ID NO: 22286

SEQ ID NO: 91135 - DNA, 942 bp, Gibberella zeae PH-1
  CDS (1)..(942)
atgtcggaacatcttgccgtgataagctcaaagagccagttcgactcgcttctcaagtcttcgcgcatcgttgtcgctgatttctacgccgactggtgcggtccttgcaagcagatcgctcccctctacgagagcctcgccatcacactatcgcgccccaacctggtcacctttgccaagatcaacagcgacgagcaagccgagctctcccaagaatacagcgtctcaactctgcctacattcctcgtcttccgcgacggaaaagaaatcgacaaggttcagggagctgaccctaacaagcttaaggccatcatccagaaacttgtgaccgaggtcgactcccttggcgagagctctggttcaggaagcggcgatggagtcaactggaagggtgccgaagccccccgaggctacagcgacatcaccgaccaaatagagctccgagatctcgaggttctcaacgccgatgaggctgccggtggtgtccgggttcttttcgaaggctccaagccaagcggtcttggtaacggcaagggaacatccaaggactacgttcagagcggagccgacgaccagctacttctctacgtccctttccagtctatcctcacctccctccctcccaaggacgacgaagatgtgatgcgacctggcaacgttcacctgtacatcaaccgcacccacaacctcgactttagcgaagccgacgataccgaccccacgcaggcaatcgagatcggtcccgaagactggaacgctgacggaacagtcaacctgagcctgcgatacgtcaagttccagaagacatcgagtcttgtcatctacgtccagcagggtgagggcgatggagagaccgtacgtcttgacagagtgaggctcattggtgaggctggggccaagcgcgaaatgggcaagctccagaaggttggtgaggatgagtaa

SEQ ID NO: 91136 - protein, 313 aa, Gibberella zeae PH-1
MSEHLAVISSKSQFDSLLKSSRIVVADFYADWCGPCKQIAPLYESLAITLSRPNLVTFAKINSDEQAELSQEYSVSTLPTFLVFRDGKEIDKVQGADPNKLKAIIQKLVTEVDSLGESSGSGSGDGVNWKGAEAPRGYSDITDQIELRDLEVLNADEAAGGVRVLFEGSKPSGLGNGKGTSKDYVQSGADDQLLLYVPFQSILTSLPPKDDEDVMRPGNVHLYINRTHNLDFSEADDTDPTQAIEIGPEDWNADGTVNLSLRYVKFQKTSSLVIYVQQGEGDGETVRLDRVRLIGEAGAKREMGKLQKVGEDE

SEQ ID NO: 91137 - DNA, 366 bp, Gibberella zeae PH-1
  CDS (1)..(366)
atggttcaccacattacttcaaacgacgagctacagaagctcctctcgtcaacaacatacgtcgccgttgacttcttcgcagactggtgtcctccctgcaaggccatcgcccccgtctacgagcaactctccactaagcacagcgtccctgacgttttggcctttgccaaagtcaacgtggaccatgtccaggacgccgcacaacagtatggtatcactgccatgcccacctttatgttcttcaaggaaggaaagcaggtcgccgtcaatggccaggctgtgatcaagggtgctgatcccagaacgctgggagcagctgctgagaagctgggcggcctagcacaaaagcgagttgctggcgcttaa

SEQ ID NO: 91138 - protein, 121 aa, Gibberella zeae PH-1
MVHHITSNDELQKLLSSTTYVAVDFFADWCPPCKAIAPVYEQLSTKHSVPDVLAFAKVNVDHVQDAAQQYGITAMPTFMFFKEGKQVAVNGQAVIKGADPRTLGAAAEKLGGLAQKRVAGA

SEQ ID NO: 91139 - DNA, 318 bp, Apis mellifera
  CDS (1)..(318)
atggtttaccaaattaagaatgccagtgatttaaaaaatcaacttgaaaaagctggaaaccaattggttgtaattgatttctttgctatgtggtgtggtccatgcaaaatgattggacctaaagtagaagagttatcaatggaaatggaagatgttatttttttgaaagttgatgtagatgaatgcgaagatattgctggtgaatatgaaattaccagtatgcctacctttgtttttatcaaaaataacaaagtgctggaaaacttttctggtgctaattatgataaacttaaaagcacaattcagaagcacaaataa

SEQ ID NO: 91140 - protein, 105 aa, Apis mellifera
MVYQIKNASDLKNQLEKAGNQLVVIDFFAMWCGPCKMIGPKVEELSMEMEDVIFLKVDVDECEDIAGEYEITSMPTFVFIKNNKVLENFSGANYDKLKSTIQKHK

SEQ ID NO: 91141 - DNA, 411 bp, Apis mellifera; identical to SEQ ID NO: 69618
  CDS (1)..(411)

SEQ ID NO: 91142 - protein, 136 aa, Apis mellifera; identical to SEQ ID NO: 69619

SEQ ID NO: 91143 - DNA, 426 bp, Candida glabrata CBS 138; identical to SEQ ID NO: 69620
  CDS (1)..(426)

SEQ ID NO: 91144 - protein, 141 aa, Candida glabrata CBS 138; identical to SEQ ID NO: 69621

SEQ ID NO: 91145 - DNA, 312 bp, Candida glabrata CBS 138; identical to SEQ ID NO: 69622
  CDS (1)..(312)

SEQ ID NO: 91146 - protein, 103 aa, Candida glabrata CBS 138; identical to SEQ ID NO: 69623

SEQ ID NO: 91147 - DNA, 315 bp, Kluyveromyces lactis NRRL Y-1140; identical to SEQ ID NO: 69624
  CDS (1)..(315)

SEQ ID NO: 91148 - protein, 104 aa, Kluyveromyces lactis NRRL Y-1140; identical to SEQ ID NO: 69625

SEQ ID NO: 91149 - DNA, 420 bp, Kluyveromyces lactis NRRL Y-1140; identical to SEQ ID NO: 22289
  CDS (1)..(420)

SEQ ID NO: 91150 - protein, 139 aa, Kluyveromyces lactis NRRL Y-1140; identical to SEQ ID NO: 22290

SEQ ID NO: 91151 - DNA, 1011 bp, Debaryomyces hansenii CBS767; identical to SEQ ID NO: 69626
  CDS (1)..(1011)

SEQ ID NO: 91152 - protein, 336 aa, Debaryomyces hansenii CBS767; identical to SEQ ID NO: 69627

SEQ ID NO: 91153 - DNA, 312 bp, Debaryomyces hansenii CBS767; identical to SEQ ID NO: 22291
  CDS (1)..(312)

SEQ ID NO: 91154 - protein, 103 aa, Debaryomyces hansenii CBS767; identical to SEQ ID NO: 22292

SEQ ID NO: 91155 - DNA, 396 bp, Yarrowia lipolytica CLIB122
  CDS (1)..(396)
atgacaatcacagatctccactcgttgggtgaattcgaggaggccatcaagtcagaagaactgacggtaatcaagttctcgacaaagacatgcataccatgcaaaatgattgcccccgtttatgaaaagtactccaaggcttacaaaggagcgaagtactacaattgcgactctgaagagctcgtggaagtggcttccatggtacccgtcagctctgtacccaccttcgcgctctacaagaatggtgaaatcgtgctcattgtgtctggcaatggagctgaccctcggaagctgagaagtgggatccgaaagtatgccgccaaagatgagaccaagaagcctcgtcctgtgactaacggaatcaagaagagacgtagacccaagaagataacttga

SEQ ID NO: 91156 - protein, 131 aa, Yarrowia lipolytica CLIB122
MTITDLHSLGEFEEAIKSEELTVIKFSTKTCIPCKMIAPVYEKYSKAYKGAKYYNCDSEELVEVASMVPVSSVPTFALYKNGEIVLIVSGNGADPRKLRSGIRKYAAKDETKKPRPVTNGIKKRRRPKKIT

SEQ ID NO: 91157 - DNA, 600 bp, Yarrowia lipolytica CLIB122
  CDS (1)..(600)
atgaaagaactcacctccacagacgagtacttcaaggccatccaccccgccacggtgtcggtggtggacttctacgccgactggtgcgggccatgcaaggcggtggcgccgggctacgccaagctggccgagcaatacaaaaaccaggcgtcgttctacaaggtcaacgtggacaacaaccagggcgcatcgtcgcacgccggagtgtctgccatgcccacgtttggggtgttcaagagcggcaagcttctggagacggtgcggggcgccgatctaggggccgtggagcgactgatcaagaaacacggcgctgcggccaaacccgtctacgtgacccagggccatgtgctgggccagaaacccatgtccgcccaggccacgtcgtcgattcgacacgtgatccaggccattctcgcctactttgtctcactgttttcgctgctgcccctggagagcgccacgagctttgtcgaggctgcgcaggcccgacagaagggtcgcgagatgcagcgccagcgggctcctccccgggggttcgatggctcggatcgtttctctttcaacaagaaggagagtccggcaagcacctgcagtagttag

SEQ ID NO: 91158 - protein, 199 aa, Yarrowia lipolytica CLIB122
MKELTSTDEYFKAIHPATVSVVDFYADWCGPCKAVAPGYAKLAEQYKNQASFYKVNVDNNQGASSHAGVSAMPTFGVFKSGKLLETVRGADLGAVERLIKKHGAAAKPVYVTQGHVLGQKPMSAQATSSIRHVIQAILAYFVSLFSLLPLESATSFVEAAQARQKGREMQRQRAPPRGFDGSDRFSFNKKESPASTCSS

SEQ ID NO: 91159 - DNA, 975 bp, Yarrowia lipolytica CLIB122
  CDS (1)..(975)
atgacaccaaaacctcctccaacaaaacacaactcagcacaacacaccaccacaaccatgaagctacatacagtcacgtctctgggggagtttgacaaggtgctcaagtccgagctagtcattgtcgatttcttcgcagaatggtgcggaccctgcaaggtgatttcaccctttgtcgagaccctccagtccgactacaaccaggtgctatttgcaaaggtcgacgtggatcagggcaaggacattgctgccaagtacaccgtgtcttccatgcccacttttgtgtacttccacaagggcaaggaggtcaatcgggtcgttggagctgacagagccggaattactactggtctagatcagttggtttccctgaaccctgcagccgtcaagtcccttcctggagcaggaggcgccgactctgaggatgctggctccactgtcaactcggctgacaactctgccatcgcagcttttgtgcccaagaacatggagattctcaactctggtattgacttcacctcgaccgaggctctcaacattgcaaacaacggcgacgtgcgaaacgtgctgaccaacgggctgtcgggcgatcaggagtttgtctccgatacagactcgcagatgctgctcaacgtgcagctgcagaacaacgccaagatccagacgattctgctcaagaagcccgccgtcagtggtgacaaccagatcccctcgcatatcaaggtgtgggccaaccatcccaacctgtcgttcgacgacacccagtcgatcgaggcccagcatgtcggagatgtggtttttgatggtgagtgggccgagatcaagctcagatacgtgcggttccagaacgtgtcgaccatctccatgctcattgagggagaggacgaggacgagtgcactaatttggatagagtggtgctcattggatcaagcggcgaggctcgaagcggaaagctcgagaagatgcaggattag

SEQ ID NO: 91160 - protein, 324 aa, Yarrowia lipolytica CLIB122
MTPKPPPTKHNSAQHTTTTMKLHTVTSLGEFDKVLKSELVIVDFFAEWCGPCKVISPFVETLQSDYNQVLFAKVDVDQGKDIAAKYTVSSMPTFVYFHKGKEVNRVVGADRAGITTGLDQLVSLNPAAVKSLPGAGGADSEDAGSTVNSADNSAIAAFVPKNMEILNSGIDFTSTEALNIANNGDVRNVLTNGLSGDQEFVSDTDSQMLLNVQLQNNAKIQTILLKKPAVSGDNQIPSHIKVWANHPNLSFDDTQSIEAQHVGDVVFDGEWAEIKLRYVRFQNVSTISMLIEGEDEDECTNLDRVVLIGSSGEARSGKLEKMQD

SEQ ID NO: 91161 - DNA, 315 bp, Yarrowia lipolytica CLIB122; identical to SEQ ID NO: 69628
  CDS (1)..(315)

SEQ ID NO: 91162 - protein, 104 aa, Yarrowia lipolytica CLIB122; identical to SEQ ID NO: 69629

SEQ ID NO: 91163 - DNA, 333 bp, Aspergillus nidulans FGSC A4; identical to SEQ ID NO: 22429
  CDS (1)..(333)

SEQ ID NO: 91164 - protein, 110 aa, Aspergillus nidulans FGSC A4; identical to SEQ ID NO: 22430

SEQ ID NO: 91165 - DNA, 654 bp, Aspergillus nidulans FGSC A4
  CDS (1)..(654)
atggcgctcacgaccgaagaaactgcgctggtcgaaacagccactgtgacaatcaacagcatcccagtttctgaagactacagtgtcgcgagcgccgccctctcctccgatggacgcatcttcaccggtgtcaatgtataccatttcaccggcggtccctgcgcagagcttgtagtgatgggtgttgcagccgcagcaggagtgacgcatttaaaacacatcgtcgccgtggggaacaatgatcgcggggtcctgagtccatgcggccggtgtcgacaggtcttgctcgatctgcagccgggagtccgagttatcattggaaagaaaggtagcgagcaaagcgtcccccccagcgaactgctgccctgctcgtacctgtacgccgaccccgtcattttcaaggccctcgtctcttcgggacccgtcgtcgttgatttctttgctacatggtgcggaccctgcaaagccgttgctccggtcgttggaaagttcagtgagacatataccggcgtcaagttccttcaggttgatgtcgacaaggcgcgttcgatagctcaggagcatcagatccgggctatgcccacctttgtgctctacaaggacgattatcaaaccgcgatgcgcaagccaaaggcaaaccagaagagaaactga

SEQ ID NO: 91166 - protein, 217 aa, Aspergillus nidulans FGSC A4
MALTTEETALVETATVTINSIPVSEDYSVASAALSSDGRIFTGVNVYHFTGGPCAELVVMGVAAAAGVTHLKHIVAVGNNDRGVLSPCGRCRQVLLDLQPGVRVIIGKKGSEQSVPPSELLPCSYLYADPVIFKALVSSGPVVVDFFATWCGPCKAVAPVVGKFSETYTGVKFLQVDVDKARSIAQEHQIRAMPTFVLYKDDYQTAMRKPKANQKRN

SEQ ID NO: 91167 - DNA, 357 bp, Candida albicans SC5314
  CDS (1)..(357): transl_table=12
atgttgcaaaatattgaaaccaaacaacaattttcttctgctttacaaaacaagaatgacatgattgttcttgactttttcgacgaatgttcacattgtagtgacttgaatgataaattggatgaattctccgatatgtatgaagctcaaaacattaggttctataaggttaatattgaagaagatagagaattggctgaagactacaaagtttcttccattcctaccactttatttttcaaaaagggaaaagtttttgataaagttgttggacctgaaccaaatgaaatcaagaaagttcttgacaagaatttaatgggctggtcaggtcgtccactgcaatcatccagaacatga

SEQ ID NO: 91168 - protein, 118 aa, Candida albicans SC5314
MLQNIETKQQFSSALQNKNDMIVLDFFDECSHCSDLNDKLDEFSDMYEAQNIRFYKVNIEEDRELAEDYKVSSIPTTLFFKKGKVFDKVVGPEPNEIKKVLDKNLMGWSGRPSQSSRT

SEQ ID NO: 91169 - DNA, 312 bp, Candida albicans SC5314; identical to SEQ ID NO: 69630
  CDS (1)..(312): transl_table=12

SEQ ID NO: 91170 - protein, 103 aa, Candida albicans SC5314; identical to SEQ ID NO: 69631

SEQ ID NO: 91171 - DNA, 321 bp, Strongylocentrotus purpuratus
  CDS (1)..(321)
atggctggatccgttgtccaaattgcaaatttgggggaatataaagatttcatcaaggattctcccgctgtaatcgacttctacgcaacatggtgtggaccatgcaaggtgatctccccaaagtttgtgggactcgcaacagaatacccggctgtgaaatttggtaaagtggatgttgatgacgcatcggaagtatcagaagagtgtggcatcagtgcgatgcctacattccagttctttaagaatggggagaaagtagcagaagtgaaaggagcaagtgaaaaagcactggtggatgccctcaaggaattaataaaatag

SEQ ID NO: 91172 - protein, 106 aa, Strongylocentrotus purpuratus
MAGSVVQIANLGEYKDFIKDSPAVIDFYATWCGPCKVISPKFVGLATEYPAVKFGKVDVDDASEVSEECGISAMPTFQFFKNGEKVAEVKGASEKALVDALKELIK

SEQ ID NO: 91173 - DNA, 318 bp, Tribolium castaneum
  CDS (1)..(318)
atggtcacccacatcaacgataaggccgaccttgtgtcgaagctcaccgatgccggcgaccaacttgtcgtcatcgacttcttcgctacttggtgcgggccatgtaaaatgatttcgccgaaattggaagagttggctcaggaattccaaaacgtgcacattttcaaggtggatgtggacgaatgcgaagatatcgcgatggaatataatatttcgtcaatgcctacttttgttttcgtgaagaatagtcaaacgatcacgcagttcagcggcgccaactatgaaaagctcagacagttggtagtggagaacaagtag

SEQ ID NO: 91174 - protein, 105 aa, Tribolium castaneum
MVTHINDKADLVSKLTDAGDQLVVIDFFATWCGPCKMISPKLEELAQEFQNVHIFKVDVDECEDIAMEYNISSMPTFVFVKNSQTITQFSGANYEKLRQLVVENK

SEQ ID NO: 91175 - DNA, 411 bp, Tribolium castaneum
  CDS (1)..(411)
atgaattcgattttgaagcctaacgccatcagaagcctggccaaggctgtgaacgccagtcgcctaggctgcgtccgtcatggctcgtttaaggtccaggacgacaaggactttctggaaaaggtcgagaacagcaaagaaccggtgattgtggatttctttgcgacgtggtgcggcccttgcaaggcccttgaacctaggttggaaaatatcgttgccaaaagaaacggcaaaatcacgttggctaaggttgacattgattcaatgggcgaactggccgccaaatatgaggtcagtacaattccagctttagtagtttttcgcaatggcaaagtccaggaaaggctgactgggctacaggatgaggacaaactcagtctctgggtggacaaggtcttggaagcaaagtag

SEQ ID NO: 91176 - protein, 136 aa, Tribolium castaneum
MNSILKPNAIRSLAKAVNASRLGCVRHGSFKVQDDKDFLEKVENSKEPVIVDFFATWCGPCKALEPRLENIVAKRNGKITLAKVDIDSMGELAAKYEVSTIPALVVFRNGKVQERLTGLQDEDKLSLWVDKVLEAK

SEQ ID NO: 91177 - DNA, 315 bp, Leptospira interrogans serovar Copenhageni str. Fiocruz L1-130
  CDS (1)..(315): transl_table=11
atggcattggcagaagtcaacgatacaaattttaaaagtgagacatccggaggattggttctcattgattgttgggcggaatggtgtggcccttgtagaatggtggctccggttttggaagaactttccggtgaattggatgggttggtaaaaatcaaaaaactgaatgtagatgataatcaggatacagctcaaagtttagggatttcttccattccgacattgttgctttacaaagacggacaacttgtcgataaagtaattggggcacttccaaaagctcaaattaaaaattttatagaaagacataaataa

SEQ ID NO: 91178 - protein, 104 aa, Leptospira interrogans serovar Copenhageni str. Fiocruz L1-130
MALAEVNDTNFKSETSGGLVLIDCWAEWCGPCRMVAPVLEELSGELDGLVKIKKLNVDDNQDTAQSLGISSIPTLLLYKDGQLVDKVIGALPKAQIKNFIERHK

SEQ ID NO: 91179 - DNA, 324 bp, Desulfovibrio vulgaris subsp. vulgaris str. Hildenborough
  CDS (1)..(324): transl_table=11
atggctgctcagatcaccgatgccactttcgaagcctctgttctcaagtccgccattcccgtgctgatcgacttctgggctccctggtgtgggccgtgccgtgccatggggcccgtcatcgatgaacttgccgccgaatacgagggcaaggtgctcatcgtgaaaatgaacgtcgacgacaatcccgccactcccagcaagtacggcatccgcgccattcccacgctcatcctcttcaagaatggtgaagtggtggaacaggtgaccggggccgtttccaagagcagcatcaaggatatgatcgcccagaaggcactcgggtaa

SEQ ID NO: 91180 - protein, 107 aa, Desulfovibrio vulgaris subsp. vulgaris str. Hildenborough
MAAQITDATFEASVLKSAIPVLIDFWAPWCGPCRAMGPVIDELAAEYEGKVLIVKMNVDDNPATPSKYGIRAIPTLILFKNGEVVEQVTGAVSKSSIKDMIAQKALG

SEQ ID NO: 91181 - DNA, 324 bp, Bartonella henselae str. Houston-1
  CDS (1)..(324): transl_table=11
atgagctgtataaaagttgataagagcaattttgaaagtgaagttttgacttcttctacccctgttgtggttgatttttgggcagaatggtgtggtccttgtaaaatgattgctccgattttagatgaaatttcaatggaaatgcaaaatcaagtcaaaattgccaaagtgaatattgatgaaaatccggaactggctacccaatatggagtgcgctcaattcctaccttattgatgttcaaagatggaaatattgcatcaaatatggttggcgctgcttctaaaggacgtgtttctgaatggattaaagaggggcttcgttaa

SEQ ID NO: 91182 - protein, 107 aa, Bartonella henselae str. Houston-1
MSCIKVDKSNFESEVLTSSTPVVVDFWAEWCGPCKMIAPILDEISMEMQNQVKIAKVNIDENPELATQYGVRSIPTLLMFKDGNIASNMVGAASKGRVSEWIKEGLR

SEQ ID NO: 91183 - DNA, 339 bp, Acinetobacter sp. ADP1
  CDS (1)..(339): transl_table=11
ttggagcaaactatgtctgccaatattgtaaatacaaccgatgctaacttccaagcagacgtgttagatgctgaaacacctgtacttgtagatttttgggcaggctggtgtgcgccatgtaaagctatcgcacctgttttagaagatttgtctcgtgaatacgaaggtaaagtaaaaattgtaaaagttgacgtcactgcatgtgaagatacggctgtgaaatacaatattcgtaatattcctgcacttcttctattcaaagacggtaaagttgttgcacaacaagtcggtgctgcaccgcgctcaaaacttgctgcctttattgatgaaaacgtttaa

SEQ ID NO: 91184 - protein, 112 aa, Acinetobacter sp. ADP1
MEQTMSANIVNTTDANFQADVLDAETPVLVDFWAGWCAPCKAIAPVLEDLSREYEGKVKIVKVDVTACEDTAVKYNIRNIPALLLFKDGKVVAQQVGAAPRSKLAAFIDENV

SEQ ID NO: 91185 - DNA, 327 bp, Erwinia carotovora subsp. atroseptica SCRI1043
  CDS (1)..(327): transl_table=11
atgagcgataaaataattcacctgactgatgacagcttcggtacaaaagtattgcaggctgagggcgctaccctcgttgatttctgggctgagtggtgcggtccttgcaaaatgatcgctcctattctggatgaaattgctgaagaatttgaaggtaaactgacggttaccaagctgaacattgatgaaaatccggctactgcaccgaaatatggtatccgtggtattcctactctgttgctgtttaaaaacggcgaagtcgctgcgacgaaagtcggcgcgctgtccaaagggcaactgaaagagttcctgacggcgaatctgtaa

SEQ ID NO: 91186 - protein, 108 aa, Erwinia carotovora subsp. atroseptica SCRI1043
MSDKIIHLTDDSFGTKVLQAEGATLVDFWAEWCGPCKMIAPILDEIAEEFEGKLTVTKLNIDENPATAPKYGIRGIPTLLLFKNGEVAATKVGALSKGQLKEFLTANL

SEQ ID NO: 91187 - DNA, 327 bp, Yersinia pseudotuberculosis IP 32953
  CDS (1)..(327): transl_table=11
atgagcgataaaattattcacctgagtgacgacagtttcgatactgatgtgctgaaagccagcggcttggtcttagtcgatttctgggctgaatggtgtggtccgtgcaagatgattgctccgattttggatgaaatcgctgaagagtatgaaggtagactgactatcgctaaattgaacattgatgataatcagggcacagcaccaaaatacggtatccgtgggattcctacgctgctgttgttccgtgatggcgaagttgtcgccaccaaggttggtgccttgtctaaggggcaactcaaagcgttcttggatgcaaatctgtaa

SEQ ID NO: 91188 - protein, 108 aa, Yersinia pseudotuberculosis IP 32953
MSDKIIHLSDDSFDTDVLKASGLVLVDFWAEWCGPCKMIAPILDEIAEEYEGRLTIAKLNIDDNQGTAPKYGIRGIPTLLLFRDGEVVATKVGALSKGQLKAFLDANL

SEQ ID NO: 91189 - DNA, 363 bp, Legionella pneumophila subsp. pneumophila str. Philadelphia 1
  CDS (1)..(363): transl_table=11
atgccgacccagactattaacagcgctgaatttgaatcattaattaatgacaatgagatagtttttattgatttctgggctgagtggtgtgctccctgtaagcaattttcaaaagtatatgagcaagtttccgatcaatttccagctattaaatttgttaaagttaacattgaagagcaacaagagttagcagattttttcgagatccgatccatccctcatcttatggttttcaaagacagtattgttatttattctgatgctggaagcatacccgagtccactttaaaagaattggcgcaacaagcacttgatgctgatgttagtgaaatacgagctcagcttgagcagaaggataagtag

SEQ ID NO: 91190 - protein, 120 aa, Legionella pneumophila subsp. pneumophila str. Philadelphia 1
MPTQTINSAEFESLINDNEIVFIDFWAEWCAPCKQFSKVYEQVSDQFPAIKFVKVNIEEQQELADFFEIRSIPHLMVFKDSIVIYSDAGSIPESTLKELAQQALDADVSEIRAQLEQKDK

SEQ ID NO: 91191 - DNA, 330 bp, Methylococcus capsulatus str. Bath
  CDS (1)..(330): transl_table=11
gtgagcagtgacaaaatccttcatgtgaccgacgccgaattcgaagacaaggtcctcaaggcacccggaccggtgctggtggactactgggccgaatggtgcggcccgtgcaagatgatcgctcccatcctcgacgagatcgccggcgaatacgaaggccgcctgaccgtcgccaagctcaacatcgacgacaacccggcgaccccgcagcgttacggtgtgcggggcatccccaccttgatggtattcaagggcggtgaagtggtcgccagcaaggtgggcgcattgaccaaatcccagctcgcggccttcctcgaaggcaatatgtaa

SEQ ID NO: 91192 - protein, 109 aa, Methylococcus capsulatus str. Bath
MSSDKILHVTDAEFEDKVLKAPGPVLVDYWAEWCGPCKMIAPILDEIAGEYEGRLTVAKLNIDDNPATPQRYGVRGIPTLMVFKGGEVVASKVGALTKSQLAAFLEGNM

SEQ ID NO: 91193 - DNA, 327 bp, Azoarcus sp. EbN1
  CDS (1)..(327): transl_table=11
atgagcgagcatatccattacgtcaccgacggcaattttgaagccgaggtgcttcagtcgcagacccccgtgctggtcgactactgggccgaatggtgcggcccgtgcaagatgattgcgccgattctcgacgacgtcgccaaggaatacgccggcaagctgaaagtcgcgaagctcaacatcgacgaaaaccaggagacgcccgccaaattcggcgtgcggggcattccgacgctgatgctgttcaagggcggcaacgtcgaagccacgaaggtcggcgcgctgtcgaagtcccagctcactgccttcattgacagcaacctctga

SEQ ID NO: 91194 - protein, 108 aa, Azoarcus sp. EbN1
MSEHIHYVTDGNFEAEVLQSQTPVLVDYWAEWCGPCKMIAPILDDVAKEYAGKLKVAKLNIDENQETPAKFGVRGIPTLMLFKGGNVEATKVGALSKSQLTAFIDSNL

SEQ ID NO: 91195 - DNA, 348 bp, Synechococcus elongatus PCC 6301
  CDS (1)..(348): transl_table=11
gtgcgctcaaggtttggtcccacgatgtctgcagcaactgagctgaatgatcagcagtttgaatctgccgttctgaaagccccaggattggttctcgtcgatttttgggcgccttggtgcggcccttgtcgcctaattgcaccgctgatggactgggccgcccagacctatgccgatcaactcacggtctacaagctggaagtggatccgaatcccgagacggtagctcgctatcaagttcagggcattccgacgctgttgctgttccaaaacggtgaactggtagagcgcgtcgaaggtgccattggacgcgatcgcattcagaccctgatcaacgcccatctctaa

SEQ ID NO: 91196 - protein, 115 aa, Synechococcus elongatus PCC 6301
MRSRFGPTMSAATELNDQQFESAVLKAPGLVLVDFWAPWCGPCRLIAPLMDWAAQTYADQLTVYKLEVDPNPETVARYQVQGIPTLLLFQNGELVERVEGAIGRDRIQTLINAHL

SEQ ID NO: 91197 - DNA, 324 bp, Dehalococcoides ethenogenes 195
  CDS (1)..(324): transl_table=11
atggtaatggaaataaccgaccagagttttgcggccgaggtactaaaatcagataaacccgtgctggtagatttttgggcaccgtggtgcggcccctgccgcatggtagcccccataatagacaaattatctactaaatacgaaggcaagtttaaattttgcaagctgaatgtagatgaaaataaaactactgccgcccaataccgggttatgtccatacctaccctgctgtttttcaagagcggtcaggtagctgacatggtggtaggtgcagtacccgaatctgccttaagccagaagattgaccagttactccagaagtaa

SEQ ID NO: 91198 - protein, 107 aa, Dehalococcoides ethenogenes 195
MVMEITDQSFAAEVLKSDKPVLVDFWAPWCGPCRMVAPIIDKLSTKYEGKFKFCKLNVDENKTTAAQYRVMSIPTLLFFKSGQVADMVVGAVPESALSQKIDQLLQK

SEQ ID NO: 91199 - DNA, 327 bp, Psychrobacter arcticus 273-4
  CDS (1)..(327): transl_table=11
atgtcagaccttattattaataccaccgatgccaactttgaccaagacgtcctgcaatctgacgtgccagtcttagtagatttttgggcaacgtggtgtggtccttgtaaagccatcgcacctattttagaagatttagcaactgagtaccaaggtaaagttaaaatcgttaaagttgacgttgataacaacccacaagcagcaagtcgttttggtatccgtaacattcctaccctatttgtctttaaaggtggtgaaaaagtagattcagtaatgggcctacagccaaaagctgaattggcaaaagtgttagataagcatttgtaa

SEQ ID NO: 91200 - protein, 108 aa, Psychrobacter arcticus 273-4
MSDLIINTTDANFDQDVLQSDVPVLVDFWATWCGPCKAIAPILEDLATEYQGKVKIVKVDVDNNPQAASRFGIRNIPTLFVFKGGEKVDSVMGLQPKAELAKVLDKHL

SEQ ID NO: 91201 - DNA, 324 bp, Prochlorococcus marinus str. NATL2A
  CDS (1)..(324): transl_table=11
atgtccacagcttctgcagtaactgattcctctttcgaacaagaagtcctccagagcgatgttcctgttttggttgatttttgggcaccttggtgcggaccatgcagaatggttgctccaattgtcgaagagatctcaaaagactttgaaggcaaaataaaagtttacaaattgaataccgatgagaatcctaatgttgctagtcagtatgggataagaagcatcccaacgctgatgatctttaaaggaggtcagaaagtagataccgttgtgggagcagtccctaaagccaccctctcaggaacaatttccaaacatctctaa

SEQ ID NO: 91202 - protein, 107 aa, Prochlorococcus marinus str. NATL2A
MSTASAVTDSSFEQEVLQSDVPVLVDFWAPWCGPCRMVAPIVEEISKDFEGKIKVYKLNTDENPNVASQYGIRSIPTLMIFKGGQKVDTVVGAVPKATLSGTISKHL

SEQ ID NO: 91203 - DNA, 333 bp, Ehrlichia canis str. Jake
  CDS (1)..(333): transl_table=11
atggtatcagtaatgatcgagcaaattagtgatagtgatttccacagtaaagttatatcttgcaatgaagacatactaattttagtagatttttgggctccatggtgtggaccttgcaaaactttagaaccacaacttgaaaagttagcacagcagtacgctgaacaggtgaagatatacaagttgagcattgaagataaccaagatgttgctattcaatatggagttagtgcagtaccaactactttgatgtttaaaaacggaaaaaaactatcacaagttattggagctgacattgcaaagataataaatgaactaaacaaccacatttaa

SEQ ID NO: 91204 - protein, 110 aa, Ehrlichia canis str. Jake
MVSVMIEQISDSDFHSKVISCNEDILILVDFWAPWCGPCKTLEPQLEKLAQQYAEQVKIYKLSIEDNQDVAIQYGVSAVPTTLMFKNGKKLSQVIGADIAKIINELNNHI

SEQ ID NO: 91205 - DNA, 429 bp, Thiobacillus denitrificans ATCC 25259
  CDS (1)..(429): transl_table=11
atggaactcgcctgcccccactgcctcgccgtcaaccgcgtgcccgacgagcgcctcgccgagtcgccgaagtgcggcaagtgcggcgccgtgctcctgccggcaaagccactcgacctgacggccgacagcttcgaccgcttcatcgcacgcgccggcctgccggttctcgtcgacttctgggccgagtggtgcggcccatgcaagatgatggcgcccgtgttccagcaggtcgcagccgagatggcgacgcgggtgcgcttcgccaaggtcgacaccgaggccgagccgcaggtctcgatgcgccatcacatcaagggcatcccgagcctgatcctgttccgcaacggcgccgaggccgcgcgcacgtcgggcgcgatggacggccatgcgctgaaacgctggctcgcggcgcaagggattcgatag

SEQ ID NO: 91206 - protein, 142 aa, Thiobacillus denitrificans ATCC 25259
MELACPHCLAVNRVPDERLAESPKCGKCGAVLLPAKPLDLTADSFDRFIARAGLPVLVDFWAEWCGPCKMMAPVFQQVAAEMATRVRFAKVDTEAEPQVSMRHHIKGIPSLILFRNGAEAARTSGAMDGHALKRWLAAQGIR

SEQ ID NO: 91207 - DNA, 327 bp, Anabaena variabilis ATCC 29413
  CDS (1)..(327): transl_table=11
atgcctactgatacagttgcttacgttcaagaaaatgaatttgatgctgttttaagtgaagataaagtcgttgtcgttgactttacggctacttggtgtggcccatgtcgtcttgttagtccgttaatggatcaacttgctgatgagtacaaaggtcgcgttaaaatagttaaggtagacgtagacaacaataaacctctgttcaagaaatttggacttcgcagcattccagcagtgttaatttttaaagatggtgagttagcagaaaagattgtgggagtttctccttatgagcaattcagtgcagctgtagaaaagcttctttag

SEQ ID NO: 91208 - protein, 108 aa, Anabaena variabilis ATCC 29413
MPTDTVAYVQENEFDAVLSEDKVVVVDFTATWCGPCRLVSPLMDQLADEYKGRVKIVKVDVDNNKPLFKKFGLRSIPAVLIFKDGELAEKIVGVSPYEQFSAAVEKLL

SEQ ID NO: 91209 - DNA, 327 bp, Burkholderia sp. 383
  CDS (1)..(327): transl_table=11
atgagcgaacagatcaaacacatcagcgacgcatcgttcgaacaggacgtcgtcaagtccgacaagcccgtgctcgtcgatttctgggccgaatggtgcggcccgtgcaagatgatcgccccgatcctcgacgaagtcgcgaaggattacggcgacaagctgcagatcgcgaagatcaacgtcgacgacaaccaggcaacgcccgcgaagttcggcgtgcgcggcatcccgacgctgatcctgttcaagaacggcgcggccgccgcgcagaaggtcggcgcgctgtcgaagtcgcagctcaccgcattcctggacagccacctgtaa

SEQ ID NO: 91210 - protein, 108 aa, Burkholderia sp. 383
MSEQIKHISDASFEQDVVKSDKPVLVDFWAEWCGPCKMIAPILDEVAKDYGDKLQIAKINVDDNQATPAKFGVRGIPTLILFKNGAAAAQKVGALSKSQLTAFLDSHL

SEQ ID NO: 91211 - DNA, 321 bp, Novosphingobium aromaticivorans DSM 12444
  CDS (1)..(321): transl_table=11
atgccgaccaaagccgtcaccgacgccagcttcgccagcgatgtcctgggcagcagcaagcccgtgctcgtcgatttctgggcggactggtgcggcccctgcaagatgatcgccccggcgctcgaggagatcgccgaggagcttggcgacaaggtcgagatcgccaaggtcgacatcatggaaaacacggacaccgccagcaagttcggcgtccagtcgatcccgctgctgatcctcttcaaggacggtcagcccgtggcgcagaagcttggcgcagcgccgaagagccagctcaagggctggctggaaagcgttctctga

SEQ ID NO: 91212 - protein, 106 aa, Novosphingobium aromaticivorans DSM 12444
MPTKAVTDASFASDVLGSSKPVLVDFWADWCGPCKMIAPALEEIAEELGDKVEIAKVDIMENTDTASKFGVQSIPLLILFKDGQPVAQKLGAAPKSQLKGWLESVL

SEQ ID NO: 91213 - DNA, 327 bp, Saccharophagus degradans 2-40
  CDS (1)..(327): transl_table=11
atgagtgaagcaatcgtacaagtaagcgatgctagctttgagcaggacgtattgtcctccgatatacctgtattagttgactactgggcagcgtggtgtggtccatgcaaaatgatcgcccccgttcttgacgagctagcaaaagaatacgaaggcaaaattaaaatttgcaaaatggatgtagacgccaacaaagaaacaccggctaaatacaacattcgcggcattcctactttgattatgttcaaaggaggcaacgcagaaggcactaaagttggcgctttatctaaagctcaacttaaagagtttatcgacgcgagcctataa

SEQ ID NO: 91214 - protein, 108 aa, Saccharophagus degradans 2-40
MSEAIVQVSDASFEQDVLSSDIPVLVDYWAAWCGPCKMIAPVLDELAKEYEGKIKICKMDVDANKETPAKYNIRGIPTLIMFKGGNAEGTKVGALSKAQLKEFIDASL

SEQ ID NO: 91215 - DNA, 327 bp, Ralstonia metallidurans CH34
  CDS (1)..(327): transl_table=11
atgagcgaacaaatcaaatatgtgagcgacgcttcgttcgatgccgacgtgctcaagtccgacaagcccgtgctgctcgacttctgggccgaatggtgcggtccttgcaagatgatcgccccgatcctggacgaagtcgcgaaggactacggcgacaaggtgcaggtcgccaaaatcaacgtggatgaaaaccagcaagtgccggccaagttcggcattcgcggcatcccgacgctgatcctgttcaagaacggccaagtggccgcgcagaaggttggcgcgctgtcgaagtcgcagctgaccgcgttcctggacagccagctgtaa

SEQ ID NO: 91216 - protein, 108 aa, Ralstonia metallidurans CH34
MSEQIKYVSDASFDADVLKSDKPVLLDFWAEWCGPCKMIAPILDEVAKDYGDKVQVAKINVDENQQVPAKFGIRGIPTLILFKNGQVAAQKVGALSKSQLTAFLDSQL

SEQ ID NO: 91217 - DNA, 321 bp, Silicibacter sp. TM1040
  CDS (1)..(321): transl_table=11
atgtccaccgtagccgttaccgacgccaccttcgacgccgaagtcaagaattccgatgtccccgttgtggtggacttctgggccgaatggtgtggcccgtgcaaacagatcggccccgctctggaagagctggcagccgagtatggcgacaaggtaaaaatcgccaaggttgatgtcgacagcaacccgaatgccgctgctgccatgggtgtgcgcggcattccagctctgttcgtgttcaaggatggtcaggtggtttccaaccgcgccggcgccgctcccaaggccgcgctcaagagctggatcgacgaatccatctga

SEQ ID NO: 91218 - protein, 106 aa, Silicibacter sp. TM1040
MSTVAVTDATFDAEVKNSDVPVVVDFWAEWCGPCKQIGPALEELAAEYGDKVKIAKVDVDSNPNAAAAMGVRGIPALFVFKDGQVVSNRAGAAPKAALKSWIDESI

SEQ ID NO: 91219 - DNA, 333 bp, Myxococcus xanthus DK 1622
  CDS (1)..(333): transl_table=11
atggcaggcgcggacgtgacgaacatcggggatggcgatttcaagcagcaggtcctggactcccaggagcccgtgctggtggatttctgggcgacgtggtgcgcgccgtgccgcgccatcgcgccctccatcgaagcgctggcctcgcagtacaaggggcaggtgaagttcgccaagctcaacatcgatgagaaccaggacacgccgcaggagtacggcatccgttccatccccaccctgctcctgttcaagggcggccgcgtggtggagcagattgtcggcgcggtgcccaaggcccgcatcgaagaggcggtgaagaaggccctgacgtag

SEQ ID NO: 91220 - protein, 110 aa, Myxococcus xanthus DK 1622
MAGADVTNIGDGDFKQQVLDSQEPVLVDFWATWCAPCRAIAPSIEALASQYKGQVKFAKLNIDENQDTPQEYGIRSIPTLLLFKGGRVVEQIVGAVPKARIEEAVKKALT

SEQ ID NO: 91221 - DNA, 324 bp, Mesorhizobium sp. BNC1
  CDS (1)..(324): transl_table=11
atggccacggtgaaagtcgatagcggcaattttcaatccgatgttctgcaggcctgcgagcccgtggtggtggatttctgggcagaatggtgcggcccctgcaagatgatcgcgcctgccctggaagagatttcatcggaaatgcaaggcaaggtgaaagtcgccaagctcaatatcgacgagaaccccgaacttgccgcacggtatggcgtgcgctcgatccccacgctcatgctgttcaagaatggcgaagtggcggatatgaaggttggagcagccccgaagacggctttgtcggcttggatcggcggttccatcgcataa

SEQ ID NO: 91222 - protein, 107 aa, Mesorhizobium sp. BNC1
MATVKVDSGNFQSDVLQACEPVVVDFWAEWCGPCKMIAPALEEISSEMQGKVKVAKLNIDENPELAARYGVRSIPTLMLFKNGEVADMKVGAAPKTALSAWIGGSIA

SEQ ID NO: 91223 - DNA, 330 bp, Trichodesmium erythraeum IMS101
  CDS (1)..(330): transl_table=11
atgtcaaatacaaatccagtaactgatgctagtttcaaggaagaggtgcttgagagtaatattccagtgttagtagatttctgggcaccttggtgcgggccatgcaggatggttgctcctgtagttgaagatatatcaaagcaatatgaaggacaagtcaaagtagtgaaattaaatactgacgagaatcctaatgtagcaagccagtatgggattcgtagtattcctaccttgatgatatttaagggaggggaaagagttgatatggttgtgggtgccgttcctaagactacattagctaatactttagacaaatacattgaaaaatga

SEQ ID NO: 91224 - protein, 109 aa, Trichodesmium erythraeum IMS101
MSNTNPVTDASFKEEVLESNIPVLVDFWAPWCGPCRMVAPVVEDISKQYEGQVKVVKLNTDENPNVASQYGIRSIPTLMIFKGGERVDMVVGAVPKTTLANTLDKYIEK

SEQ ID NO: 91225 - DNA, 327 bp, Shewanella sp. MR-4
  CDS (1)..(327): transl_table=11
atgagcgataaaattatatacctgagcgacgacagcttcgaaaacgacgtattaaaggccgatttaccagtattggtagacttctgggctgaatggtgtggtccatgcaaaatgatcgcgccaatccttgacgacgttgccgaagagtacgcaggtcgtgtaactatcgctaaactaaacgttgaccaaaacaacgtttctccagcgaaatatggcgttcgtggtatcccaactttactgttgttcaagaacggtgaattagctgcgaccaaagttggcgcactgtctaaaactcaattaaaagagtttatcgacgcacaaatctaa

SEQ ID NO: 91226 - protein, 108 aa, Shewanella sp. MR-4
MSDKIIYLSDDSFENDVLKADLPVLVDFWAEWCGPCKMIAPILDDVAEEYAGRVTIAKLNVDQNNVSPAKYGVRGIPTLLLFKNGELAATKVGALSKTQLKEFIDAQI

SEQ ID NO: 91227 - DNA, 321 bp, Rhizobium leguminosarum bv. viciae 3841
  CDS (1)..(321): transl_table=11
atggctaccgtgaaagtcgatatcaataacttccagtcggaagttctggaatccgcagaacccgtcgtcgtcgatttctgggccgaatggtgcggcccgtgcaagatgattgctccgagcctcgaagaaatcgccgtcgagatggaaggcaaggtcaaggtcgccaagctgaatatcgatgagaatccggaactcgccgcacagtttggtgtgcgctccattccgacccttgcaatcttcaagggcggcgaagttgccgatatctcggtcggcgcaaagccgaagacggctctttcgaactggatttcgagcgctgcctga

SEQ ID NO: 91228 - protein, 106 aa, Rhizobium leguminosarum bv. viciae 3841
MATVKVDINNFQSEVLESAEPVVVDFWAEWCGPCKMIAPSLEEIAVEMEGKVKVAKLNIDENPELAAQFGVRSIPTLAIFKGGEVADISVGAKPKTALSNWISSAA

SEQ ID NO: 91229 - DNA, 354 bp, Mycobacterium avium 104
  CDS (1)..(354): transl_table=11
atgaccgacgccgaaaaggccatcgccacaatagaagtctccgacgcatcgttttccaccgatgtgttggccagcaataagcctgtgctggttgacttttgggcgacatggtgtggtccctgcaagatggttgcgccggtgctcgaggaaatcgccagcgagcgcggcgatcacctcaccgtcgccaagctcgacgtcgacgccaacccggaaaccgcccaaaacttccaggtggtctccattcccaccctgatcctgttcaaggacggccagcccgtgaagcggatcgtcggcgccaagggcaaggcggcgctgctgcgtgagctttccgacgcggttcccaacctcggctga

SEQ ID NO: 91230 - protein, 117 aa, Mycobacterium avium 104
MTDAEKAIATIEVSDASFSTDVLASNKPVLVDFWATWCGPCKMVAPVLEEIASERGDHLTVAKLDVDANPETAQNFQVVSIPTLILFKDGQPVKRIVGAKGKAALLRELSDAVPNLG

SEQ ID NO: 91231 - DNA, 381 bp, Nocardioides sp. JS614
  CDS (1)..(381): transl_table=11
atgaccaccaccacgctgactgccgcgcagttcgaggagaccgtgaccgggaacgacatcgtcctggtcgacttctgggcctcctggtgcggcccgtgccgccagttcgcccccgtcttcgaggccgcgtcggagaagcaccccgacgtcgtgttcggcaaggtcgacaccgaggccgagcgcgagctcgccgcggccgcgcagatcacctcgatcccgacgctgatggccttccgcgagggcgtgctcgtcttcgcccagccgggcgccctgccggcgacctcgctggagcaggtgatcggcgccgtccgcgagctcgacatggacgacgtccgcgcccagctcgccgcccagagccaggaccaggaggagaaccagtga

SEQ ID NO: 91232 - protein, 126 aa, Nocardioides sp. JS614
MTTTTLTAAQFEETVTGNDIVLVDFWASWCGPCRQFAPVFEAASEKHPDVVFGKVDTEAERELAAAAQITSIPTLMAFREGVLVFAQPGALPATSLEQVIGAVRELDMDDVRAQLAAQSQDQEENQ

SEQ ID NO: 91233 - DNA, 324 bp, Nostoc punctiforme PCC 73102
  CDS (1)..(324): transl_table=11
atgtcaacagccgcacaagttaccgattctagtttcaagcaagaagtactcgacagcgatgtacccgttttagttgacttttgggcaccctggtgcggaccatgccgtatggtagctcctgttgtcgatgaaatctccgaacagtacaaaggtcaaatcaaggtcgtcaaagtcaacacggatgaaaatcctcaagttgctagtcagtacggcatccgcagtattcctacattaatgatttttaaagatggacaaaaagtagatatggtggtaggtgctgtacctaaaagtacattagcttccactttagaaaagtatctttga

SEQ ID NO: 91234 - protein, 107 aa, Nostoc punctiforme PCC 73102
MSTAAQVTDSSFKQEVLDSDVPVLVDFWAPWCGPCRMVAPVVDEISEQYKGQIKVVKVNTDENPQVASQYGIRSIPTLMIFKDGQKVDMVVGAVPKSTLASTLEKYL

SEQ ID NO: 91235 - DNA, 375 bp, Bifidobacterium longum DJO10A
  CDS (1)..(375): transl_table=11
atggcaaccaccgccatcacctccgccgatttcgagaagaccatcaccgacaacgaaatcgtgttcgttgacttctgggccacctggtgcggcccgtgccgcgcgttcggcccgattttcgaggcggcctccaacgagccggagaacgcgaacatcgccttcgtcaaggttgatatcgacgccaaccaggatctggcccaggccgccggcatccaggcggtgcccacactgatgatcgccaagcagggcgaggtcatcttccagcaggccggcgcgctgcaggccgccgatctcgacgatctgatcgcccaggccaaggcactcgatctggccgccgccaaggccgcccagtccggtgccgaccagcaggcctga

SEQ ID NO: 91236 - protein, 124 aa, Bifidobacterium longum DJO10A
MATTAITSADFEKTITDNEIVFVDFWATWCGPCRAFGPIFEAASNEPENANIAFVKVDIDANQDLAQAAGIQAVPTLMIAKQGEVIFQQAGALQAADLDDLIAQAKALDLAAAKAAQSGADQQA

SEQ ID NO: 91237 - DNA, 318 bp, Actinobacillus pleuropneumoniae serovar 1 str. 4074
  CDS (1)..(318): transl_table=11
atgactttacaagttactgacgcaacttttgaacaagaagtattaaaatcggacgtaccggtattattagacttttgggcgccgtggtgcggtccttgccgtatggtggctccaatcttagacgaattatcggaagagttcgcgggtcgtgcgaaaattgctaaagtgaacgtggacgagaaccaacaaattccggcacaattcggtattcgttcaatcccgacgttaatccttttcaaaaacggtgaagtggttgcaactcaagtcggcgcattaccgaaatcacaattaagcgcatttgtcgaacaagcgctttaa

SEQ ID NO: 91238 - protein, 105 aa, Actinobacillus pleuropneumoniae serovar 1 str. 4074
MTLQVTDATFEQEVLKSDVPVLLDFWAPWCGPCRMVAPILDELSEEFAGRAKIAKVNVDENQQIPAQFGIRSIPTLILFKNGEVVATQVGALPKSQLSAFVEQAL

SEQ ID NO: 91239 - DNA, 324 bp, Crocosphaera watsonii WH 8501
  CDS (1)..(324): transl_table=11
atgtcagctgcagttcaagttacagatggtacttttaaagcagatgttttagacagcgacgttcccgttctcgtggatttttgggcgccttggtgtggtccttgtcgtatggtcgctcccgttgtagaggaaatagcagaccaatacgccggtcaggttaaggttgttaagctcaacacggacgaaaatcctaacactgctagtcaatatggcattcgtagtatccccactctgatgatcttcaagggaggtcaacgagtggatatggttgtgggtgctgttcctaaaacaaccctcgcttctactttggaaaagtatctttaa

SEQ ID NO: 91240 - protein, 107 aa, Crocosphaera watsonii WH 8501
MSAAVQVTDGTFKADVLDSDVPVLVDFWAPWCGPCRMVAPVVEEIADQYAGQVKVVKLNTDENPNTASQYGIRSIPTLMIFKGGQRVDMVVGAVPKTTLASTLEKYL

SEQ ID NO: 91241 - DNA, 321 bp, Roseovarius nubinhibens ISM
  CDS (1)..(321): transl_table=11
atggccaccgtagccgttaccgacgacacgttcgacgccgaagtgaaaaattcagacatccccgtcgtggtggatttctgggccgaatggtgcggcccctgcaaacagatcggcccggctctggaagagatcgccgccgagatgggtggcaaggtgaaaatcgccaaggtcgatgtcgacagcaacccgaactccgccgctcagatgggcgtgcgcggcattcctgcgctgttcatcttcaagaatggcgaagtggtctcgaaccgcgctggcgccgcccccaaggccgcactccagagctggatcgaagagtcgatctaa

SEQ ID NO: 91242 - protein, 106 aa, Roseovarius nubinhibens ISM
MATVAVTDDTFDAEVKNSDIPVVVDFWAEWCGPCKQIGPALEEIAAEMGGKVKIAKVDVDSNPNSAAQMGVRGIPALFIFKNGEVVSNRAGAAPKAALQSWIEESI

SEQ ID NO: 91243 - DNA, 357 bp, Erythrobacter sp. NAP1
  CDS (1)..(357): transl_table=11
atgaagggcgaagacccactttcaggagaagccattatggcaaccgtcaacgtcaccgatgagagcttcaagagcgacgtgctcgagagcgacaagcccgttctggtcgatttctgggccgattggtgcggcccgtgcaagatgattgcacccgcactcgaagagatcagcaacgaactcggcgagcaggtcaccatcgccaagatggacattatggaaaacaccggaatccccgctgaaatgggtgttcagtcgatcccgctgatggtcctattcaagaatggcgaagcggttgctcgcaaggtcggagccgctcccaaaagccagctcaaggactggctcgaaagcgagatctaa

SEQ ID NO: 91244 - protein, 118 aa, Erythrobacter sp. NAP1
MKGEDPLSGEAIMATVNVTDESFKSDVLESDKPVLVDFWADWCGPCKMIAPALEEISNELGEQVTIAKMDIMENTGIPAEMGVQSIPLMVLFKNGEAVARKVGAAPKSQLKDWLESEI

SEQ ID NO: 91245 - DNA, 327 bp, Pseudoalteromonas tunicata D2
  CDS (1)..(327): transl_table=11
atgagcgacaaaataatccaattaaccgatgatagtttcgaaactgacgtattaaaagctgacaaaccagtgcttgttgacttttgggctgagtggtgtggtccttgtaaaatgatcgcccctattttagatgacgttgcaagtgaatatgctgatcgcgttgttgttggtaagctaaacatcgaccaaaactctgcaacaccaccaaaatttggtattcgtggcatcccaacattattgttatttaaagatggccaagttgctgcaactaaagttggtgcattatctaaaactcaactaattgaatttttagaaaataacatctaa

SEQ ID NO: 91246 - protein, 108 aa, Pseudoalteromonas tunicata D2
MSDKIIQLTDDSFETDVLKADKPVLVDFWAEWCGPCKMIAPILDDVASEYADRVVVGKLNIDQNSATPPKFGIRGIPTLLLFKDGQVAATKVGALSKTQLIEFLENNI

SEQ ID NO: 91247 - DNA, 321 bp, Xanthobacter autotrophicus Py2
  CDS (1)..(321): transl_table=11
atgtcggtcgagaaggtttcggatcagaattttgagcaggacgtgcttcagtccagcgcgccggtcatcgtggacttctgggccgagtggtgcggcccctgccgcatggtcgcccccatcctcgaggaagtctctggcgagatgggcgagaagatccgtatcgtgaagctgaacgtggacgagaatcctgccaccgcttccaagtacggcatcatgtccatccccaccctgctgctgttcaaggacggcaagatcgcctcccgccaggtcggcgccgcccccaaggcgaagctggtgcagtggatcaacggcgccatctga

SEQ ID NO: 91248 - protein, 106 aa, Xanthobacter autotrophicus Py2
MSVEKVSDQNFEQDVLQSSAPVIVDFWAEWCGPCRMVAPILEEVSGEMGEKIRIVKLNVDENPATASKYGIMSIPTLLLFKDGKIASRQVGAAPKAKLVQWINGAI

SEQ ID NO: 91249 - DNA, 327 bp, marine gamma proteobacterium HTCC2207
  CDS (1)..(327): transl_table=11
atgagcgacgctatcgttcacacaacagattctagctttgaaagcgatgtattacagtcagatattccagcactggtagatttttgggcggcctggtgtggtccctgcaaaatgatcgccccactgctcgacgaactctccactgaatatgcaggacgcgtaaagatctgcaaagtagatgtagatgctagtccagagacagcggcaaaatttaatgttcgcggcattccaacactgctggtgtttaaaaatggcacagtagaagcaacaaaagtaggcgctctatccaaagcccaactggtcgaatttgtcgacagcattttgtaa

SEQ ID NO: 91250 - protein, 108 aa, marine gamma proteobacterium HTCC2207
MSDAIVHTTDSSFESDVLQSDIPALVDFWAAWCGPCKMIAPLLDELSTEYAGRVKICKVDVDASPETAAKFNVRGIPTLLVFKNGTVEATKVGALSKAQLVEFVDSIL

SEQ ID NO: 91251 - DNA, 330 bp, delta proteobacterium MLMS-1
  CDS (1)..(330): transl_table=11
atggccagtgacaagctagtacaagtttccgatgccgattttgacagccaggtattacagagcgccgagccggtgctggtggatttctgggccccctggtgcggcccctgcaaggccatcggcccggtggtggaggagttggccgacgaatatgccggcaaggccaaaatcgccaagatgaacgtcgatgacaaccccgccacccccggcaaatacggtatccgggcgatccccaccctgatcctgttcaaaggcggcgaggtggtggatcaggtcaccggcgccgttggcaaaccccagcttaccgccctgatcgacaagggaatgtaa

SEQ ID NO: 91252 - protein, 109 aa, delta proteobacterium MLMS-1
MASDKLVQVSDADFDSQVLQSAEPVLVDFWAPWCGPCKAIGPVVEELADEYAGKAKIAKMNVDDNPATPGKYGIRAIPTLILFKGGEVVDQVTGAVGKPQLTALIDKGM

SEQ ID NO: 91253 - DNA, 354 bp, Rickettsiella grylli
  CDS (1)..(354): transl_table=11
atgaataattcatctatcgtgacgctgaatgatgcgtcttttgaatcagaagtattacaatttaacgcaacaccgatactcgttgatttttgggcagaatggtgtggcccctgcaaagccatttcacctattttagataaactttctgaaaaatatcgtgggaaaataaagattggaaaattaaatgttgacgaaaaccctaaaacaccggcaaaatacggggtgcgtggcattcctacattaattctttttaaagatggaaaagccgtagaaacaaaagtgggtgccttattagaatcacagttagaatcatttttagagaaacacctaacgaacccaggtacttctacttaa

SEQ ID NO: 91254 - protein, 117 aa, Rickettsiella grylli
MNNSSIVTLNDASFESEVLQFNATPILVDFWAEWCGPCKAISPILDKLSEKYRGKIKIGKLNVDENPKTPAKYGVRGIPTLILFKDGKAVETKVGALLESQLESFLEKHLTNPGTST

SEQ ID NO: 91255 - DNA, 354 bp, Medicago truncatula; identical to SEQ ID NO: 22307
  CDS (1)..(354)

SEQ ID NO: 91256 - protein, 117 aa, Medicago truncatula; identical to SEQ ID NO: 22308

SEQ ID NO: 91257 - DNA, 363 bp, Medicago truncatula; identical to SEQ ID NO: 22309
  CDS (1)..(363)

SEQ ID NO: 91258 - protein, 120 aa, Medicago truncatula; identical to SEQ ID NO: 22310

SEQ ID NO: 91259 - DNA, 405 bp, Medicago truncatula; identical to SEQ ID NO: 22311
  CDS (1)..(405)

SEQ ID NO: 91260 - protein, 134 aa, Medicago truncatula; identical to SEQ ID NO: 22312

SEQ ID NO: 91261 - DNA, 327 bp, Aspergillus niger
  CDS (1)..(327)
atgtctcacaaggttcacgacatcacctctaaggccgagttcgccgagaaggttaccaactccaccgacgccatcgtccttgactgcttcgctacctggtgcggtccttgcaaggctatctcccccaaggtcgaggagttcagcaacacctaccccaacgccaagttctacaagatcgacgtcgacgaactgtccgaggttgctgccgagctcggtatccgtgccatgcccactttcctgctcttcaaggacggcaagaagttcgacgacctcaccggtgccaaccccaagggtctggagcagaagatccaggctctgcttgcataa

SEQ ID NO: 91262 - protein, 108 aa, Aspergillus niger
MSHKVHDITSKAEFAEKVTNSTDAIVLDCFATWCGPCKAISPKVEEFSNTYPNAKFYKIDVDELSEVAAELGIRAMPTFLLFKDGKKFDDLTGANPKGLEQKIQALLA

SEQ ID NO: 91263 - DNA, 327 bp, Aspergillus niger
  CDS (1)..(327)
atgtctcacggaaaggttattgaggttgataaccctgttatcttcaaggcgcttacctccaacggtcccgtggtcgtcgacttcttcgcaacctggtgcggtccgtgcaaggccgtcgcgccagtggtcggcaagctcagcgaaacctacaccaatgtgcgcttcattcaggtcgacgttgataaggtccgttcggtggcacaggaactggaggtgcgcgctatgcccactttcgtcctgtacaaggatggccagctgcaggagaagcgcgtcgtgggtggaaacatgaaggagctggaggcagccatcaaggaaattactgcataa

SEQ ID NO: 91264 - protein, 108 aa, Aspergillus niger
MSHGKVIEVDNPVIFKALTSNGPVVVDFFATWCGPCKAVAPVVGKLSETYTNVRFIQVDVDKVRSVAQELEVRAMPTFVLYKDGQLQEKRVVGGNMKELEAAIKEITA

SEQ ID NO: 91265 - DNA, 1068 bp, Aspergillus niger
  CDS (1)..(1068)
atgtcgacactcgtgcaaatcaactcacgcgagcaattcagctctcttttgagctcctccacctttgttgtcgccgacttctacgcagattggtgcggaccatgcaaagccatcgccccagcatacgagcagctagcttcgcagctctcacgcccgaacaagatcacctttacgaaggtcaacgttgacaagaaccaagacatcgcaaggcagtatgggattacagcaatgcccaccttcgtcctcttcgaacgcggccgcccaacctccaccgtccgcggcgccaacgccaaagagctcaacgacctagtccgcaagctcgccacggaagccgaaaaagcgcccgagggcaacgacgccggctccagcagcggcgtaggctggatcggcgccccggctcccaagaactacagcgacatctcagaccaatacgacccgaagggcctggagctactgaaccgggcgagcgagttcggcacggccaagaccctcttcgatagctcgaagccatcctccttgaacaacgccaagggcaaggccggggcggcaccggattgggtggagagtgatacggacgagcagctgatgctgtttatcccgttccagtctacgctgaaggtgcattcgttgcagattacgtcgcttccgccatcggcggacgaggaggttgaggatgaggacgagcggccgatgcgtcctcgtacagtgtcgttgtatacgaatcggtcgcatgtgctgggattcgatgaggcagatgatatccctgctgtgcagacggttacgattcagccggaggattgggatccgaagacgggtacggcgaaggtagatttgcggttcgtcaagttccagagcgttacgtcgttggtgattttctttgtggatggagatggggatagtgagaagctgcgggttgatcgggtgcgcatttttggagaggcaggtgagaagagagagatgggcaagttggagaagattggtgatgagccggagaaaccatcactatgctcctacatggacagtagacacattcacacttataatgacattcatattcaataccaataa

SEQ ID NO: 91266 - protein, 355 aa, Aspergillus niger
MSTLVQINSREQFSSLLSSSTFVVADFYADWCGPCKAIAPAYEQLASQLSRPNKITFTKVNVDKNQDIARQYGITAMPTFVLFERGRPTSTVRGANAKELNDLVRKLATEAEKAPEGNDAGSSSGVGWIGAPAPKNYSDISDQYDPKGLELLNRASEFGTAKTLFDSSKPSSLNNAKGKAGAAPDWVESDTDEQLMLFIPFQSTLKVHSLQITSLPPSADEEVEDEDERPMRPRTVSLYTNRSHVLGFDEADDIPAVQTVTIQPEDWDPKTGTAKVDLRFVKFQSVTSLVIFFVDGDGDSEKLRVDRVRIFGEAGEKREMGKLEKIGDEPEKPSLCSYMDSRHIHTYNDIHIQYQ

SEQ ID NO: 91267 - DNA, 321 bp, Aspergillus niger
  CDS (1)..(321)
atggctgtcactgctatcgaaagtatctctgacttcctcaccctcatcaactcgggagatgtggtgatcatcgacttctgggctacatggtgtggtccttgcaaaatgattagtcctttctttgaacagctggcctcccggcccgagttcagcgccatcaagttcgccaaggtcgacgtcgatacacaggaggatatttctcaagaatgtggaattagagccatgccgacctttatagtattcaaagatggccaaaagctggacgatatggcgggagctcaccccggtggcctgcaaggtcttgttcagaagtatgcgtga

SEQ ID NO: 91268 - protein, 106 aa, Aspergillus niger
MAVTAIESISDFLTLINSGDVVIIDFWATWCGPCKMISPFFEQLASRPEFSAIKFAKVDVDTQEDISQECGIRAMPTFIVFKDGQKLDDMAGAHPGGLQGLVQKYA

SEQ ID NO: 91269 - DNA, 354 bp, Eucalyptus grandis; identical to SEQ ID NO: 22329
  CDS (1)..(354)

SEQ ID NO: 91270 - protein, 117 aa, Eucalyptus grandis; identical to SEQ ID NO: 22330

SEQ ID NO: 91271 - DNA, 354 bp, Cryphonectria parasitica; identical to SEQ ID NO: 69666
  CDS (1)..(354)

SEQ ID NO: 91272 - protein, 117 aa, Cryphonectria parasitica; identical to SEQ ID NO: 69667

SEQ ID NO: 91273 - DNA, 672 bp, Curvularia lunata
  CDS (145)..(483)
gcacgaggaaactcggagaaacgctgcctcatctgccatcacaaatacactcatcagcttttgcactctcccctcaaccccacctcgaccaccaacctttaccgtccactcttcaccccgcgcttcttttcaaacaccgccagaatgagcgaagaaaccaagcagggcgttcacaacctcgccaacaaggcccaattcgaggctgctatcaacgacaaggagaccctcatggtcctcgactgcttcgcgacatggtgtggtccttgcaaggtgattgctccccaagttgtcaagctctctgagaagtaccccaacgcccgcttcttcaagctcgacgtcgatgacgttcccgacgtcgcccaggaactcggtatccgcgctatgcccaccttccttttgttcaagggcggcgacaagatcagcgaggttgttggtgccaaccccaaggcacttgaggccgccatccagtccaactacgagtaggagacatctgtcccaacacatttggactttttcttagaaagcacaaccgatctagtctgactagctcggtccctacattgcatgcatttgcgttgtgcaaggtggattgaatagcgatctaaatagggaatgcgcatcgccacagcatttttctgaatacaaaaatatctcacaaaaaaaaaaaaaaaa

SEQ ID NO: 91274 - protein, 112 aa, Curvularia lunata; identical to SEQ ID NO: 69669

SEQ ID NO: 91275 - DNA, 600 bp, Aspergillus fumigatus
  CDS (78)..(404)
ccctcgcaacccttctcattaatccggtagcaatccgcctcatctacaaccgtttcttctccagccccgccgcaaccatgtcccatggcaaagttatagctgtcgataatcccatcatctacaaagcgcttacctcgtccggccctgtcgtcgtcgatttcttcgccacgtggtgcggtccttgccgggcggtagcgcctaaggtgggagagcttagcgagaagtactccaatgtgcgatttatccaggtcgatgtcgataaggtgcgctctgtggcgcacgagatgaatatccgggcgatgccgacgtttgtgctgtataaggatggtcagcctctggagaagagggttgttggtgggaatgtgagggagttggaggagatgattaagagtatttctgcttaacggcgtgctcttgcccacaccatcataaatggatgcatcatgcttcaattgagcgatatcgacgacgcaatgcaggcggaactgttctctaggactgaaatcacgtattccaatacggccgacagaaacgggcctatatatccattcagtctgctctaatgagggaatttcaaataatacatagcctagaaagatg

SEQ ID NO: 91276 - protein, 108 aa, Aspergillus fumigatus; identical to SEQ ID NO: 69671

SEQ ID NO: 91277 - DNA, 372 bp, Solanum berthaultii; identical to SEQ ID NO: 22337
  CDS (1)..(372)

SEQ ID NO: 91278 - protein, 123 aa, Solanum berthaultii; identical to SEQ ID NO: 22338

SEQ ID NO: 91279 - DNA, 324 bp, Aspergillus oryzae; identical to SEQ ID NO: 69674
  CDS (1)..(324)

SEQ ID NO: 91280 - protein, 107 aa, Aspergillus oryzae; identical to SEQ ID NO: 69675

SEQ ID NO: 91281 - DNA, 333 bp, Aspergillus oryzae
  CDS (1)..(333)
atgtccattgaattacaacaactaatccccaacctctatagccctgtcatcttcaaggccctcacctcttccggccccgtcgtcgttgacttcttcgctacctggtgcggtccctgcaaggccgtcgcgcccgtcgtcggaaagcttagtgaaacctacgagaacgtacgcttcattcaggtggacgtcgataagaaccgtcaggtcgcacaagatatgaaagtgagggctatgccgacgttcattgtgttcaaggatggcaagccccatggagagccgattgtgggcggaaacatgaaggccctggaggatagaatcaaagaagttgcttag

SEQ ID NO: 91282 - protein, 110 aa, Aspergillus oryzae
MSIELQQLIPNLYSPVIFKALTSSGPVVVDFFATWCGPCKAVAPVVGKLSETYENVRFIQVDVDKNRQVAQDMKVRAMPTFIVFKDGKPHGEPIVGGNMKALEDRIKEVA

SEQ ID NO: 91283 - DNA, 333 bp, Aspergillus oryzae; identical to SEQ ID NO: 22339
  CDS (1)..(333)

SEQ ID NO: 91284 - protein, 110 aa, Aspergillus oryzae; identical to SEQ ID NO: 22340

SEQ ID NO: 91285 - DNA, 975 bp, Aspergillus oryzae
  CDS (1)..(975)
atgtcgagccccgttcatatctcctccaaggagcagttcagcaccctgctgacgaagtctcgctttgttgtcgcggacttctacgcagactggtgcggaccatgcaaagccatcgcccctgcctatgagcagctggcagcccagctgtcacgcccgaaccgaatcaccttcaccaagatcaacgtcgatcaccaacaggaccttgctaaggcctacggagtgacagccatgcccaccttcatcgtgttcgagcgcggccgtccaacctccaccgtcaaaggcgccgacccccagaagctgtcggaggtggtccgcaaactcgcatcggaggccagcaaacccgacgacggcggcgagggctcatcaggcagctccgacgcagattggatcgggctggccgcaccgaaaggctacgccgacatcacggaccagtacgatcccaagggcctggagctgctgaaccgggacagcgagttcggaacggcgaagacactcttcgagacttcgaagccgtcggcgctgaacaacggcaagggaaaggctaaggattgggtcgagagcgataccgatgaacagcttatgctctttgttccgttccagtcgacgctcaaggtgcattcgttgcagattacttcgttgcctcccagtgatggtgatgagcttcccatgcgcccgcagacgatccatctctacacgaaccgctcgcatgtcctgggctttgacgaggcggagggtatcgatcctgtgcagacggtgactatccagcctgaagattgggataagaagaccggaacggccaagattgatttgcggtttgtcaaattccagagggttacgtcgttgatcatgttctttgtggatggggatggggacagtgaaaagctgcgcgtggaccgtatccgtatctttggtgaggcaggcgaaaagagagagatgggcaagctggagaagattggtgatgagcctggtgaataa

SEQ ID NO: 91286 - protein, 324 aa, Aspergillus oryzae
MSSPVHISSKEQFSTLLTKSRFVVADFYADWCGPCKAIAPAYEQLAAQLSRPNRITFTKINVDHQQDLAKAYGVTAMPTFIVFERGRPTSTVKGADPQKLSEVVRKLASEASKPDDGGEGSSGSSDADWIGLAAPKGYADITDQYDPKGLELLNRDSEFGTAKTLFETSKPSALNNGKGKAKDWVESDTDEQLMLFVPFQSTLKVHSLQITSLPPSDGDELPMRPQTIHLYTNRSHVLGFDEAEGIDPVQTVTIQPEDWDKKTGTAKIDLRFVKFQRVTSLIMFFVDGDGDSEKLRVDRIRIFGEAGEKREMGKLEKIGDEPGE

SEQ ID NO: 91287 - DNA, 327 bp, Aspergillus oryzae; identical to SEQ ID NO: 22341
  CDS (1)..(327)

SEQ ID NO: 91288 - protein, 108 aa, Aspergillus oryzae; identical to SEQ ID NO: 22342

SEQ ID NO: 91289 - DNA, 330 bp, Aspergillus oryzae; identical to SEQ ID NO: 22343
  CDS (1)..(330)

SEQ ID NO: 91290 - protein, 109 aa, Aspergillus oryzae; identical to SEQ ID NO: 22344

SEQ ID NO: 91291 - DNA, 318 bp, Brevibacillus choshinensis
  CDS (1)..(318): transl_table=11
atggcaatcgtaaatggtactgaccaaaacttttcccaggaagtagagcaaggcggtacagtcctggttgacttctgggctccatggtgcggcccttgcaaaatgatcgctcccgttttggaacaaatggatagcgaagtgggctccaagctcaaaatcgtgaaagtaaacgtggatgacaacccagattctgctggtcgcttcggcgtaatgtccatccctaccctgatcgttttcaaagacggtcagccagttgacaaagtcatcggcttccaaccaaaagaagctttgatggcaactgttggcaaacacctgtaa

SEQ ID NO: 91292 - protein, 105 aa, Brevibacillus choshinensis
MAIVNGTDQNFSQEVEQGGTVLVDFWAPWCGPCKMIAPVLEQMDSEVGSKLKIVKVNVDDNPDSAGRFGVMSIPTLIVFKDGQPVDKVIGFQPKEALMATVGKHL

SEQ ID NO: 91293 - DNA, 327 bp, Chlamys farreri; identical to SEQ ID NO: 69682
  CDS (1)..(327)

SEQ ID NO: 91294 - protein, 108 aa, Chlamys farreri; identical to SEQ ID NO: 69683

SEQ ID NO: 91295 - DNA, 699 bp, Nicotiana alata
  CDS (137)..(595)
ccacgcgtccgggaaaatcgaattcacaataggagctgcgcgtaatataaaagcagtgcttttattaccgtctcagtagtttcttccctattttgactactttgtgcgtaaggagagagagagagtgaagaatccaatgggatcgtatctttcaagtttgctcggtggaggcgcggcggaagcggcagaggcagaatcaggatcgtcgtcagaaccgtcgcgtgtgattgcttttcattcttccaatcggtggcaacttcacttcaattcctccaagcaattaaataaactgatagttgtggattttgcggctacatggtgtgggccctgcaaaatgatggagccggttattaacgccatgtctgccaagtataccgacgttgacttcgtcaaaatcgacgtcgatgagctctcagatgtagcacaagagtttggagtacaagctatgccaacatttttgctgctgaagcaaggaaaggaagtagagagagtggttggggctaagaaagatgagctcgagaaaaagattctcaagcacagggaagctcctaaatttgctgctagtaattatcgaactaaatttcatgtccaataaattaacagaaaagaaaagcatcatttttactttactaccggattgggatgaaccgaatattgttgaattgctttgggggaataaaaaaaaaaaaaaaaaaaaaa

SEQ ID NO: 91296 - protein, 152 aa, Nicotiana alata; identical to SEQ ID NO: 22352

SEQ ID NO: 91297 - DNA, 556 bp, Zea mays
  CDS (1)..(369)
atggcgtccgagcagggagtcgtgatcgcgtgccacagcaaggctgagtttgacgcccacatgaccaaggcccaggaagccggcaagctggtggtcatcgacttcactgccgcctggtgcggtccatgccgcgccatcgccccactgttcgtcgaacacgccaagaagttcactcaggtcgtgttcctgaaggtggacgtggacgaagtgaaggaagtcaccgcggcctacgaggtcgaggcgatgccgaccttccacttcgtcaagaacggcaagacggtcgcgaccatcgtgggtgccaagaaggacgagctcctggccctgatcgagaagcatgccgcgcctgcgcctgcgtctgcgtctgcctaaaggagatcagatcagtcgtcgccgtcaataagggccagcacgtatggctgtagatgttgtcgttatcagttctggctttgtcgtttgtgggcgattgtgaactagtagtatgtttgtttctatccgattcggaggcgatacttaaccatggatacttgttgtgcgttcaaaaaaaaaaaaaaaaaaa

SEQ ID NO: 91298 - protein, 122 aa, Zea mays; identical to SEQ ID NO: 22354

SEQ ID NO: 91299 - DNA, 948 bp, Cryptococcus neoformans
  CDS (1)..(948)
atggctggtggtattcaaaacattacatccgcagcagagtttgacggtatcgtccgttcattacccccctcacgtttgctcgtcgcagacttctatgcccaatggtgtggaccttgccacgccatcgcgcctgtattagagcaactggctggcgcttataagcatgttacgtttgttgaatcccggcagaaaattgacgtagatcaacaaagagagcttgcctcaaggttcaggataactgctatgcccactttcaaactcttgaaaggcggtagagaggttgaccagctgcgaggcgcctcccctcctcagctcagccaattggtctctcggcacgcggggactgcgcccccgcccacagcgaccgctagctccggctccaaatcgcaagtagctacaggtgaaataacggaatctctcctcaagcaggtcatatcaaagggactcaactgtctcaatgaagccaaagaacatccactatcttctatcctcggacctgaaaagggtcctcgaggcaactcctaccttgaatcggatgttgatcctgagctccttatatctataccttttcaagatgccgttaagctgaaagccatctcaatcttttccggtatcagcccttctcaagcacccaaaacagtgaagctgtttattaaccagcccaacatcggcttcgatgatgcggaaaacgaggcgcctgcccaagaattgattttgaccccagagcaagtcaaaggagacagaattccattgcgatacgtgaggtttcagaacgtgagaagcttgcatatcttggtaaaggacaatcaggaggacgaggagaccaccagaattgactcaattgacgtgtatggtgctcagggtgaaaaactcgacgccggtgtcacttcacagtcttctgctggtaccggcagtatgctcgagaagctcttagcttcgggtaaataa

SEQ ID NO: 91300 - protein, 315 aa, Cryptococcus neoformans
MAGGIQNITSAAEFDGIVRSLPPSRLLVADFYAQWCGPCHAIAPVLEQLAGAYKHVTFVESRQKIDVDQQRELASRFRITAMPTFKLLKGGREVDQLRGASPPQLSQLVSRHAGTAPPPTATASSGSKSQVATGEITESLLKQVISKGLNCLNEAKEHPLSSILGPEKGPRGNSYLESDVDPELLISIPFQDAVKLKAISIFSGISPSQAPKTVKLFINQPNIGFDDAENEAPAQELILTPEQVKGDRIPLRYVRFQNVRSLHILVKDNQEDEETTRIDSIDVYGAQGEKLDAGVTSQSSAGTGSMLEKLLASGK

SEQ ID NO: 91301 - DNA, 324 bp, Ixodes scapularis
  CDS (1)..(324)
  misc_feature (69)..(69): y is t or c
atggtccttcaaatcgtcgagagcaaggaggacttcgaaaagaagctggaagaggccggcgacaagctygtggtggtggacttctttgccacgtggtgcggcccttgcaagatggtggagcccttcctgaagcaacagtccgaaattctcaaggatgttgtcatcttcctcaaggttgatgtggacgagaatgaagagattacgcaggagtacgagattgcgtgcatgccaaccttcctcttcatcaagaacaaaaccaagttggacgaaatctccggagccaacgaagagtccatcaaggaaatgttggacaagcacaagtaa

SEQ ID NO: 91302 - protein, 107 aa, Ixodes scapularis
MVLQIVESKEDFEKKLEEAGDKLVVVDFFATWCGPCKMVEPFLKQQSEILKDVVIFLKVDVDENEEITQEYEIACMPTFLFIKNKTKLDEISGANEESIKEMLDKHK

SEQ ID NO: 91303 - DNA, 703 bp, Plantago major
  CDS (106)..(534)
cggcacgaggcaaaaacattttctgcgttgattctaggcagactcacaatcaaccaatcaatcaatcaatcttctctcttccaaatctctcaaaatccaaaccgaatgggctcgtttctctcttccgtgatcggaatcggaccggccgatgcggcggagacacctgccggagactcatcggagccttcgcgcgtcatggcgttccactcgtcgcaacgctggcagctccacttcaactcctccaagcagttaaacaaactgatggttgtggatttcacggcgacttggtgtggaccttgcaagttcatggcgcctgttttcgctgaactttctaccaagtacagtgatgttgattttgtcaaaatcgacgtcgatgagctcgctgatgtggcgcgggagtttggtgtgcaggcgatgccaacattcatgttactaaagcaaggaaaacaagttggtaccgttgtgggagctaagaaagatgaactggagaagaagatcctcgaacacagggaagcccctagatttgctgcatagttttattctttgacccactcaattggatgaatgactgtaaactgcgttttcttttcaccagtgcaaattgtgtgttgtccatagtgatgaattaatggttctctccatgtaactttataattcatcaataaatacattgtgtcttgaagcttaaaaaaaaaaaaaaaaa

SEQ ID NO: 91304 - protein, 142 aa, Plantago major; identical to SEQ ID NO: 22358

SEQ ID NO: 91305 - DNA, 408 bp, Glycine max; identical to SEQ ID NO: 22359
  CDS (1)..(408)

SEQ ID NO: 91306 - protein, 135 aa, Glycine max; identical to SEQ ID NO: 22360

SEQ ID NO: 91307 - DNA, 333 bp, Paxillus involutus
  CDS (1)..(333)
atgcccgctgaagatatcaagtccaaggctcatttcgacgagctcatcaacagcgggaagaccatctttatcgacttccatgctacctggtgtggaccatgcaaggtcatttcgccactcttccaaaagctttccaacgagcaccagggagacaatgttgcattctacaaggtcgatatcgacgatcaggctgagatcgcccaggaagtcgccatcacagcgatgcccacgttcaaggtgtacaaggatggagcgctcgtcggcaacttaatcggcgcgaaccaatctcggttgaccgagctggtcggggagcatgccccaaagacagtgtaa

SEQ ID NO: 91308 - protein, 110 aa, Paxillus involutus
MPAEDIKSKAHFDELINSGKTIFIDFHATWCGPCKVISPLFQKLSNEHQGDNVAFYKVDIDDQAEIAQEVAITAMPTFKVYKDGALVGNLIGANQSRLTELVGEHAPKTV

SEQ ID NO: 91309 - DNA, 628 bp, Capsicum annuum
  CDS (64)..(438)
ggcacgggatttgtttggtgttttctgttttttgaatttcgaattttccgaaaatctgtgagaatggctgctacttcatctgaagaaggacaagtttttggttgccacaacgttgaggagtgggatcagcacttcaagaagggtgtcgagactaagaaattggtggtggtggattttaccgcatcctggtgcggtccttgccgttttattgccccaattcttgctgacattgctaagaagatgccccatgtcatattcctcaaggttgatgttgatgaactaaagactgttgcagaggaatggaatgtggatgctatgccaacatttgtcttctttaaagatggcgaagaagtggatagggttgttggtgcccagaaagaggagttgcaggcggccatacttaagcatgttggtgctcctgctactgtgacagcttgagccataatcaaggatatgatattctggtgtttagtattgtccttttgtaataagtctggatggctgtgtgttttattatccactatctctctcttgtttttgtgaacccttttggtgcttgaattctgatatttgtgcagatggccttactggtgtaaggttatatgctcatttctatgaaaaaaaaaaa

SEQ ID NO: 91310 - protein, 124 aa, Capsicum annuum; identical to SEQ ID NO: 22362

SEQ ID NO: 91311 - DNA, 351 bp, Paracoccidioides brasiliensis; identical to SEQ ID NO: 22363
  CDS (1)..(351)

SEQ ID NO: 91312 - protein, 116 aa, Paracoccidioides brasiliensis; identical to SEQ ID NO: 22364

SEQ ID NO: 91313 - DNA, 372 bp, Ipomoea batatas; identical to SEQ ID NO: 22365
  CDS (1)..(372)

SEQ ID NO: 91314 - protein, 123 aa, Ipomoea batatas; identical to SEQ ID NO: 22366

SEQ ID NO: 91315 - DNA, 327 bp, Ipomoea batatas
  CDS (1)..(327)
atggaatcagaggaggggcaagttatcggctgccacaccgtcgaccagtggaaagaacacttcgagaaagccagagccagcggcaaactgacagtggtagattttactgcttcttggtgcgggccttgccgttttattgctccaattctggcagatatggcaaagaagacgccacatgtgatatttctcaaggtggacgtggatgagcttaagtctgtggctgaggactacaaggtggaggccatgccaacttttgtcttcctgaaagaaggaaacgaggttgatagggttgtggggccaagaaagaagaactgctttgttgcataa

SEQ ID NO: 91316 - protein, 108 aa, Ipomoea batatas
MESEEGQVIGCHTVDQWKEHFEKARASGKLTVVDFTASWCGPCRFIAPILADMAKKTPHVIFLKVDVDELKSVAEDYKVEAMPTFVFLKEGNEVDRVVGPRKKNCFVA

SEQ ID NO: 91317 - DNA, 369 bp, Hordeum vulgare var; identical to SEQ ID NO: 22371
  CDS (1)..(369)

SEQ ID NO: 91318 - protein, 122 aa, Hordeum vulgare var; identical to SEQ ID NO: 22372

SEQ ID NO: 91319 - DNA, 372 bp, Citrus paradisi; identical to SEQ ID NO: 22375
  CDS (1)..(372)

SEQ ID NO: 91320 - protein, 123 aa, Citrus paradisi; identical to SEQ ID NO: 22376

SEQ ID NO: 91321 - DNA, 330 bp, Chlamydomonas reinhardtii
  CDS (1)..(330)
atgggcggtcggattatccaggtgaagagcgcggaggagtggacaagccatatgcgggaatgccgcgcattcggaggcaaatcctatctcgtggacttcacggcatcgtggtgcggaccctgccaaaaaatcgccccgctctatgagaagtacagcgccgagaacccaaacatcacattcctcaaggtggacgtcgacgaactggcggacgtggcgggcgagtgcgacgtcaaggccatgcccactttcatcggctacttcaacggcgagcaggtggacacagtggtgggcgccgacgacgccaagctgcgtgagctcatcgccacgtga

SEQ ID NO: 91322 - protein, 109 aa, Chlamydomonas reinhardtii
MGGRIIQVKSAEEWTSHMRECRAFGGKSYLVDFTASWCGPCQKIAPLYEKYSAENPNITFLKVDVDELADVAGECDVKAMPTFIGYFNGEQVDTVVGADDAKLRELIAT

SEQ ID NO: 91323 - DNA, 565 bp, Pisum sativum
  CDS (36)..(428)
gtagttatcaagcaagcaagtcaacgaacctatcaatgggctcaattctctcttccctcatcggcggcgaaccagctgccgccttagaatcctccgatcacgccgtcaaaacattccactcatccgcacgctggcagctccacttcaacgaaatcaaagactcgcctcgtctcgttgtgattgatttctctgctacgtggtgtggaccgtgtaaaatgatggaaccgattgtttatgccatggctaacgaattcacggacgttgaattcatcaagatcgacgttgacgaattatcggatgtggcgcaggagtttaaggtgcaggctatgccgacgtttttgttgttgaagaatggggaagaggtggataagattgttggtgccaaaaaagatgaactcaaaaacaagattaaaaaatacagagcttagtacttattttattttcaacaataaagagaaaattgaacatgatgttattatgatggtacaattgtaaaattttaactggttgaatgatgtttatgtatttgtttgaaaaaaaaaaaaaaaaaaaaaaaaaaaaaaaa

SEQ ID NO: 91324 - protein, 130 aa, Pisum sativum; identical to SEQ ID NO: 22380

SEQ ID NO: 91325 - DNA, 342 bp, Pisum sativum; identical to SEQ ID NO: 22381
  CDS (1)..(342)

SEQ ID NO: 91326 - protein, 113 aa, Pisum sativum; identical to SEQ ID NO: 22382

SEQ ID NO: 91327 - DNA, 360 bp, Arabidopsis thaliana; identical to SEQ ID NO: 22399
  CDS (1)..(360)

SEQ ID NO: 91328 - protein, 119 aa, Arabidopsis thaliana; identical to SEQ ID NO: 22400

SEQ ID NO: 91329 - DNA, 345 bp, Populus tremula x Populus tremuloides; identical to SEQ ID NO: 69742
  CDS (1)..(345)

SEQ ID NO: 91330 - protein, 114 aa, Populus tremula x Populus tremuloides; identical to SEQ ID NO: 69743

SEQ ID NO: 91331 - DNA, 381 bp, Podospora anserina; identical to SEQ ID NO: 69744
  CDS (1)..(381)

SEQ ID NO: 91332 - protein, 126 aa, Podospora anserina; identical to SEQ ID NO: 69745

SEQ ID NO: 91333 - DNA, 411 bp, Prunus persica; identical to SEQ ID NO: 22403
  CDS (1)..(411)

SEQ ID NO: 91334 - protein, 136 aa, Prunus persica; identical to SEQ ID NO: 22404

SEQ ID NO: 91335 - DNA, 357 bp, Pisum sativum; identical to SEQ ID NO: 22405
  CDS (1)..(357)

SEQ ID NO: 91336 - protein, 118 aa, Pisum sativum; identical to SEQ ID NO: 22406

SEQ ID NO: 91337 - DNA, 315 bp, Branchiostoma belcheri; identical to SEQ ID NO: 69750
  CDS (1)..(315)

SEQ ID NO: 91338 - protein, 104 aa, Branchiostoma belcheri; identical to SEQ ID NO: 69751

SEQ ID NO: 91339 - DNA, 321 bp, Aedes aegypti
  CDS (1)..(321)
atggtgtacattgttaaggatgctgctgacttcgacagcaagctggaatctgccggcgacaagctcgtcgtggtggactttttcgccacctggtgcggcccctgcaaggtgattgcccccaagctggaggaattccagaacaagtacgccgagaaggtgctcatcatcaaggtcgacgtggacgagtgcgaagatctggccgccaagtacgaaatctccagtatgcccaccttcctgttcatcaagggcaagaaagtcgtgtaccagttctccggtgccaacgaccagaagctggagatgtacatcttgaagcacgcctag

SEQ ID NO: 91340 - protein, 106 aa, Aedes aegypti
MVYIVKDAADFDSKLESAGDKLVVVDFFATWCGPCKVIAPKLEEFQNKYAEKVLIIKVDVDECEDLAAKYEISSMPTFLFIKGKKVVYQFSGANDQKLEMYILKHA

SEQ ID NO: 91341 - DNA, 324 bp, Neurospora crassa; identical to SEQ ID NO: 22409
  CDS (1)..(324)

SEQ ID NO: 91342 - protein, 107 aa, Neurospora crassa; identical to SEQ ID NO: 22410

SEQ ID NO: 91343 - DNA, 396 bp, Phalaris coerulescens; identical to SEQ ID NO: 22415
  CDS (1)..(396)

SEQ ID NO: 91344 - protein, 131 aa, Phalaris coerulescens; identical to SEQ ID NO: 22416

SEQ ID NO: 91345 - DNA, 396 bp, Lolium perenne; identical to SEQ ID NO: 22417
  CDS (1)..(396)

SEQ ID NO: 91346 - protein, 131 aa, Lolium perenne; identical to SEQ ID NO: 22418

SEQ ID NO: 91347 - DNA, 396 bp, Hordeum bulbosum; identical to SEQ ID NO: 22421
  CDS (1)..(396)

SEQ ID NO: 91348 - protein, 131 aa, Hordeum bulbosum; identical to SEQ ID NO: 22422

SEQ ID NO: 91349 - DNA, 321 bp, Manduca sexta; identical to SEQ ID NO: 69766
  CDS (1)..(321)

SEQ ID NO: 91350 - protein, 106 aa, Manduca sexta; identical to SEQ ID NO: 69767

SEQ ID NO: 91351 - DNA, 324 bp, Drosophila melanogaster
  CDS (1)..(324)
atggcatccgtacgcaccatgaacgactatcacaagcgcatcgaggcggccgacgacaagctaatcgtgctggatttctatgcgacatggtgtggtccctgcaaggaaatggagagcaccgtcaaatcgctggccagaaaatactccagcaaggcggtggtgctcaagatcgatgtggacaaattcgaggagctgacggagcgctacaaggtgcgcagcatgccaacgtttgtctttttgcgccaaaatcgacgcctggcctcctttgccggcgccgacgagcacaagctgaccaacatgatggccaagctggtgaaggcgtaa

SEQ ID NO: 91352 - protein, 107 aa, Drosophila melanogaster
MASVRTMNDYHKRIEAADDKLIVLDFYATWCGPCKEMESTVKSLARKYSSKAVVLKIDVDKFEELTERYKVRSMPTFVFLRQNRRLASFAGADEHKLTNMMAKLVKA

SEQ ID NO: 91353 - DNA, 345 bp, Drosophila melanogaster; identical to SEQ ID NO: 22425
  CDS (1)..(345)

SEQ ID NO: 91354 - protein, 114 aa, Drosophila melanogaster; identical to SEQ ID NO: 22426

SEQ ID NO: 91355 - DNA, 509 bp, Chlamydia pneumoniae
  CDS (101)..(409): transl_table=11
gattcaggttctagtgagcttatgctcatggaagttcaagtcttcttagctgcaagaaaataacagggacagtaattcgatttttcgagaagggaaacttatggtaaagatcatatcaagtgaaaattttgactcttttattgcatcggggctcgttctcgttgatttctttgcagaatggtgtggcccctgtcggatgctcactcctatcttagaaaatcttgctgcggaacttcctcatgtcactattggaaaaatcaatatagatgagaacagcaagcctgcagaaacgtacgaagtcagctctattcctacgcttattctttttaaggatgggaacgaggtggctcgggtcgtaggtcttaaggataaagaattcctaaccaatcttatcaataagcacgcttaaaaagacgctgcaatattaaaccgtaggattcttttgcaatgctacggttttctgccttaccacttcatataaaacgatccctacactggtagctaaattt

SEQ ID NO: 91356 - protein, 102 aa, Chlamydia pneumoniae
MVKIISSENFDSFIASGLVLVDFFAEWCGPCRMLTPILENLAAELPHVTIGKINIDENSKPAETYEVSSIPTLILFKDGNEVARVVGLKDKEFLTNLINKHA

SEQ ID NO: 91357 - DNA, 463 bp, Coprinus comatus
  CDS (28)..(348)
cttcaaatctcccccacttcattaaacatggtccaagttatatccaacctcgatgagttcaacaagctcaccaacagcgggaagatcatcatcattgatttctgggctacatggtgtggtccttgccgtgtcattagtcccatcttcgagaagttctcagaaaaatacggtgccaataacatcgtcttcgcaaaggtggatgtagacactgcctccgatatctctgaggaagcaaaaatccgtgctatgcccactttccaggtttataaggatggtcagaagatcgatgagctcgttggtgctaacccaactgcacttgagtcccttgtccagaagtctttagcgtgatcgttgaggattttgtcctagactttattccgtttccctattttgtttgaaaagatgttccattagttattcgttaaatagtgtctacgggattaaactaaataattaagcgatt

SEQ ID NO: 91358 - protein, 106 aa, Coprinus comatus; identical to SEQ ID NO: 22428

SEQ ID NO: 91359 - DNA, 700 bp, Fusarium culmorum
  CDS (55)..(420)
atcaaaaaagccacatctaaaatcagatcaataccacccaacacattacgcaaaatggttcaccacattacttcaaacgacgagctacagaagctcctctcatcaacaacatacgtcgtcgttgacttcttcgcagactggtgtcctccctgcaaggccatcgcccccgtctacgagcaactctccaccaagcacagcgtccccgacgttttggcctttgccaaagtcaacgtggaccatgtccaggacgccgcacaacaatatggtatcactgccatgcccacctttatgttcttcaaggaaggaaagcaggttgccgtcaacggccaggccgtgatcaagggtgctgatcccagaacgctgggagcggcagctgagaagctgggcggtctagcacaaaagcgagttgctggcgcttaaggaaatgagaggtttaaaagtacggccgggaatagaaaggacaaaaagaaagagagttcggagaatttactccagggttcattgcgacatttgtcatggcacctaaattagaggcattttgtgtgcctgcatttgggagttaaggttagagttttcgacaggaatggggttgcacgtggaggaaatgaaggatcaacggtactggcttagatgaccgggatcgagaacaagctacgggatataagacatgactgtttgcggaaaaaaaaaaaaaaaaaaa

SEQ ID NO: 91360 - protein, 121 aa, Fusarium culmorum
MVHHITSNDELQKLLSSTTYVVVDFFADWCPPCKAIAPVYEQLSTKHSVPDVLAFAKVNVDHVQDAAQQYGITAMPTFMFFKEGKQVAVNGQAVIKGADPRTLGAAAEKLGGLAQKRVAGA

SEQ ID NO: 91361 - DNA, 321 bp, Helicobacter pylori J99
  CDS (1)..(321): transl_table=11
atgagtcactatattgaattaactgaagaaaattttgaaagcaccattaaaaaaggggttgcgttagtggatttttgggcaccatggtgtggtccttgtaagatgctatcccctgtgattgatgaattagctagcgaatatgaaggtaaggctaagatttgtaaagttaataccgatgagcaagaagaattgagcgcgaaatttggtattaggagcattcctacgcttttattcacaaaagatggcgaagttgtccatcagttggtgggcgtgcaaactaaagtcgctttaaaagagcaattgaacaagcttttaggctag

SEQ ID NO: 91362 - protein, 106 aa, Helicobacter pylori J99
MSHYIELTEENFESTIKKGVALVDFWAPWCGPCKMLSPVIDELASEYEGKAKICKVNTDEQEELSAKFGIRSIPTLLFTKDGEVVHQLVGVQTKVALKEQLNKLLG

SEQ ID NO: 91363 - DNA, 351 bp, Mycobacterium bovis; identical to SEQ ID NO: 69778
  CDS (1)..(351): transl_table=11

SEQ ID NO: 91364 - protein, 116 aa, Mycobacterium bovis; identical to SEQ ID NO: 69779

SEQ ID NO: 91365 - DNA, 384 bp, Neurospora crassa
  CDS (1)..(384)
atgtcggacggcgtcaagcacatcaactcggcccaggagtttgcgaacctcctcaacacaacccagtacgtcgtcgctgacttctacgccgactggtgcgggccttgcaaggccattgcgcccatgtatgcccagtttgcgaagaccttctccatccccaacttcctcgcctttgccaagatcaacgtcgatagcgtccagcaggttgctcagcactaccgtgtctccgccatgcccaccttcctcttcttcaagaacggcaagcaggtcgccgtcaacggttccgtcatgatccagggcgccgatgtcaacagtctgcgggccgctgccgagaagatgggccgtctggcaaaggagaaggccgctgccgctggctcgtcgtga

SEQ ID NO: 91366 - protein, 127 aa, Neurospora crassa
MSDGVKHINSAQEFANLLNTTQYVVADFYADWCGPCKAIAPMYAQFAKTFSIPNFLAFAKINVDSVQQVAQHYRVSAMPTFLFFKNGKQVAVNGSVMIQGADVNSLRAAAEKMGRLAKEKAAAAGSS

SEQ ID NO: 91367 - DNA, 327 bp, Pseudomonas aeruginosa
  CDS (1)..(327): transl_table=11
atgagcgaacatatcgtcaacgttactgatgccagcttcgagcaggacgtgctgaaggccgacggccctgtgctggtggactactgggccgagtggtgcggtccgtgcaagatgatcgcgccggtgctggacgaagtcgccagggactatcagggcaagctgaaggtctgcaagctgaacatcgacgagaaccaggataccccgccgaaatacggcgtgcgtggcatccctaccctgatgctgttcaaggacggcaatgtcgaggcgaccaaggtcggcgcactgtccaagtcgcagctggcggccttcctcgacgccaatatctga

SEQ ID NO: 91368 - protein, 108 aa, Pseudomonas aeruginosa
MSEHIVNVTDASFEQDVLKADGPVLVDYWAEWCGPCKMIAPVLDEVARDYQGKLKVCKLNIDENQDTPPKYGVRGIPTLMLFKDGNVEATKVGALSKSQLAAFLDANI

SEQ ID NO: 91369 - DNA, 464 bp, Rhodobacter sphaeroides
  CDS (57)..(377): transl_table=11
ccggcagggggccatccttactttccaagcaagcctacggatcaggagaattgaatatgtccaccgttcccgtgacggacgccaccttcgacaccgaggtgcgcaagtccgacgtgcccgtcgtcgtcgatttctgggccgaatggtgcggcccctgccggcagatcggcccggcgctcgaggagctctcgaaggaatatgccggcaaggtgaagatcgtgaaggtcaatgtcgacgagaaccccgagagcccggcgatgctgggcgttcgcggcatcccggcgctgttcctgttcaagaacggtcaggtcgtgtcgaacaaggtcggcgctgcgccgaaggccgcgctggccacctggatcgcttcggcgctctgagatcctctgccatagcagagaccggacggggcgccttcgggcgcccttttccttgagcaagcgaccgaccgcgacgggcgaggatcc

SEQ ID NO: 91370 - protein, 106 aa, Rhodobacter sphaeroides
MSTVPVTDATFDTEVRKSDVPVVVDFWAEWCGPCRQIGPALEELSKEYAGKVKIVKVNVDENPESPAMLGVRGIPALFLFKNGQVVSNKVGAAPKAALATWIASAL

SEQ ID NO: 91371 - DNA, 312 bp, Schizosaccharomyces pombe; identical to SEQ ID NO: 69780
  CDS (1)..(312)

SEQ ID NO: 91372 - protein, 103 aa, Schizosaccharomyces pombe; identical to SEQ ID NO: 69781

SEQ ID NO: 91373 - DNA, 315 bp, Staphylococcus epidermidis
  CDS (1)..(315): transl_table=11
atggcaatcgtaaaagtaactgattctgattttgatagcaaaattgaatctggtgttaaattagttgatttctgggcgacttggtgtggaccttgtaaaatgattgcaccagttttagaagaactagcaggagactatgatggtaaagctgacatcttaaaattagatgttgacgaaaacccatcaactgcagcgaaatatgaagtaatgagtatcccaactttaattgtatttaaagatggcgaaccagttgataaagttgtaggtttccaacctaaagaaaacttggcagaagtattagataaacatctataa

SEQ ID NO: 91374 - protein, 104 aa, Staphylococcus epidermidis
MAIVKVTDSDFDSKIESGVKLVDFWATWCGPCKMIAPVLEELAGDYDGKADILKLDVDENPSTAAKYEVMSIPTLIVFKDGEPVDKVVGFQPKENLAEVLDKHL

SEQ ID NO: 91375 - DNA, 384 bp, Saccharomyces cerevisiae; identical to SEQ ID NO: 69786
  CDS (1)..(384)

SEQ ID NO: 91376 - protein, 127 aa, Saccharomyces cerevisiae; identical to SEQ ID NO: 69787

SEQ ID NO: 91377 - DNA, 580 bp, Brassica napus
  CDS (14)..(373)
cagattagaagaaatggctgcagaagagggacaagtgatcggttgccacgagattgatgtatgggccgtgcagctcgacacagccaaacaatccaacaagctgattgtgatagatttcactgcttcatggtgcccaccatgccgcatgattgctccagttttcgcagatctggccaagaagttcatgtcaagtgccatcttcttcaaggtggacgtcgatgaactgcagaatgtagctcaagagtttggtgtggaggcaatgccgacctttgttctcatcaaagacggaaatgttgttgataaggtcgttggtgcaaggaaggaagatcttcatgccacaatagccaagcatactggtgttgctactgcttaaagttggttatgagacaataataagctccagttagttttattttaagtttcgctaatagtaatggggatactgtagatgtagaagaataatgtagtggtcaagtgatctctgactcttttgagtctgcaagactgcaacaatattataatacatcataagaccattgcctttaaaaaaaaaaaaaaaaaaaaaaaaaaaaaaaaaaaa

SEQ ID NO: 91378 - protein, 119 aa, Brassica napus; identical to SEQ ID NO: 22448

SEQ ID NO: 91379 - DNA, 357 bp, Nicotiana tabacum; identical to SEQ ID NO: 22449
  CDS (1)..(357)

SEQ ID NO: 91380 - protein, 118 aa, Nicotiana tabacum; identical to SEQ ID NO: 22450

SEQ ID NO: 91381 - DNA, 360 bp, Arabidopsis thaliana; identical to SEQ ID NO: 22453
  CDS (1)..(360)

SEQ ID NO: 91382 - protein, 119 aa, Arabidopsis thaliana; identical to SEQ ID NO: 22454

SEQ ID NO: 91383 - DNA, 351 bp, Fagopyrum esculentum; identical to SEQ ID NO: 22461
  CDS (1)..(351)

SEQ ID NO: 91384 - protein, 116 aa, Fagopyrum esculentum; identical to SEQ ID NO: 22462

SEQ ID NO: 91385 - DNA, 526 bp, Oryza sativa
  CDS (83)..(451)
ttcggcaccgagaaaaaatcctattcaaatcgaaacccctctctttgatctcgtcgccgaggaattaggaggagagagagcaatggccgccgaggagggagtcgtgatcgcctgccacaacaaggacgagttcgacgcccagatgaccaaggccaaggaggccggcaaagtggtcataattgacttcactgcttcctggtgtggcccttgccgcttcatcgccccagtgttcgctgaatacgccaaaaagttccctggtgctgtcttcctgaaggttgatgttgatgagctgaaggaagttgctgaaaagtacaatgttgaggcaatgccgaccttcctattcatcaaggatggtgctgaggctgacaaggtcgttggcgccaggaaggatgacctccagaacaccatcgtgaagcacgtcggtgccactgctgcatctgcttctgcctaagaattctcgcaggcgcaagttatcaaataagggccagcacctggcgttgtagtaggtattagcgttagtcatcgt

SEQ ID NO: 91386 - protein, 122 aa, Oryza sativa; identical to SEQ ID NO: 22464

SEQ ID NO: 91387 - DNA, 378 bp, Picea mariana; identical to SEQ ID NO: 69808
  CDS (1)..(378)

SEQ ID NO: 91388 - protein, 125 aa, Picea mariana; identical to SEQ ID NO: 69809

SEQ ID NO: 91389 - DNA, 603 bp, Ricinus communis
  CDS (23)..(379)
gaaagaattgagagggatagaaatggcagcagaagaagggcaagtgatcgggtgccacactgttgaggcatggaatgagcaattgcagaagggaaatgataccaagggactgatcgttgttgattttactgcttcatggtgtggaccatgccgtttcattgctcccttcttggctgagctggccaagaaactgccaaatgttaccttcctgaaggtggatgtggatgaactgaagactgttgctcacgagtgggctgtggagtcaatgccaacctttatgttcctgaaggaggggaagattatggacaaggtggttggagcaaagaaagacgaactgcagcaaactatagcgaaacacatggctactgcttccacttaaattggaaaatctccatgcggcttcactgtttacgttagtaattttgtgtttttcaaaataactaagactggtgctgtctaccacgtgttgaacctcgtagagtagtgtcaagcaatagaattctgttactgggactagttttgctttattatctttgtgtggaaaggaagatttctctgctgcatgcaaatttatgtttggctgacaaaaaaaaaaaaaaaaaa

SEQ ID NO: 91390 - protein, 118 aa, Ricinus communis; identical to SEQ ID NO: 22466

SEQ ID NO: 91391 - DNA, 384 bp, Triticum aestivum; identical to SEQ ID NO: 22467
  CDS (1)..(384)

SEQ ID NO: 91392 - protein, 127 aa, Triticum aestivum; identical to SEQ ID NO: 22468

SEQ ID NO: 91393 - DNA, 357 bp, Arabidopsis thaliana; identical to SEQ ID NO: 22469
  CDS (1)..(357)

SEQ ID NO: 91394 - protein, 118 aa, Arabidopsis thaliana; identical to SEQ ID NO: 22470

SEQ ID NO: 91395 - DNA, 396 bp, Oryza sativa; identical to SEQ ID NO: 22471
  CDS (1)..(396)

SEQ ID NO: 91396 - protein, 131 aa, Oryza sativa; identical to SEQ ID NO: 22472

SEQ ID NO: 91397 - DNA, 564 bp, Oryza sativa; identical to SEQ ID NO: 69816
  CDS (1)..(564)

SEQ ID NO: 91398 - protein, 187 aa, Oryza sativa; identical to SEQ ID NO: 69817

SEQ ID NO: 91399 - DNA, 522 bp, Oryza sativa; identical to SEQ ID NO: 69586
  CDS (1)..(522)

SEQ ID NO: 91400 - protein, 173 aa, Oryza sativa; identical to SEQ ID NO: 69587

SEQ ID NO: 91401 - DNA, 543 bp, Oryza sativa; identical to SEQ ID NO: 69832
  CDS (1)..(543)

SEQ ID NO: 91402 - protein, 180 aa, Oryza sativa; identical to SEQ ID NO: 69833

SEQ ID NO: 91403 - DNA, 402 bp, Oryza sativa; identical to SEQ ID NO: 22265
  CDS (1)..(402)

SEQ ID NO: 91404 - protein, 133 aa, Oryza sativa; identical to SEQ ID NO: 22266

SEQ ID NO: 91405 - DNA, 543 bp, Oryza sativa; identical to SEQ ID NO: 45777
  CDS (1)..(543)

SEQ ID NO: 91406 - protein, 180 aa, Oryza sativa; identical to SEQ ID NO: 45778

SEQ ID NO: 91407 - DNA, 399 bp, Oryza sativa; identical to SEQ ID NO: 22475
  CDS (1)..(399)

SEQ ID NO: 91408 - protein, 132 aa, Oryza sativa; identical to SEQ ID NO: 22476

SEQ ID NO: 91409 - DNA, 408 bp, Oryza sativa; identical to SEQ ID NO: 22477
  CDS (1)..(408)

SEQ ID NO: 91410 - protein, 135 aa, Oryza sativa; identical to SEQ ID NO: 22478

SEQ ID NO: 91411 - DNA, 525 bp, Oryza sativa
  CDS (1)..(525)
atggctctggctcaccgactctgccgtcttcctcgcctcctccccctcgccgccgccgccgccgcctccaaaccctacctccccggaaaacctagccccgcgcctcctcctcccctctcctccccgccgccgtttccctctctctcccgcctcttctccaccaccccctcctcctcaggtgattccagcatggtggtggtcggatcggcggagtccttcaccagcatcatgtccaaggtggaagcggagaagcttccggccgtgttctactacacggcggtatggtgcgggccttgtagagcgatggcacccgtgatttcaaaactgagcagccggtaccccaagatacctatctacaaagttgacattgacatggatggtgttggaagcaaactaagtgatctaaaaatattctctgtgccaacattccatttctactaccaaggtcggaagacaggtgaggtggttggtgctaatgcgacaaaacttgaatcaaccatggaaagtcttcacaagcaactatag

SEQ ID NO: 91412 - protein, 174 aa, Oryza sativa
MALAHRLCRLPRLLPLAAAAAASKPYLPGKPSPAPPPPLSSPPPFPSLSRLFSTTPSSSGDSSMVVVGSAESFTSIMSKVEAEKLPAVFYYTAVWCGPCRAMAPVISKLSSRYPKIPIYKVDIDMDGVGSKLSDLKIFSVPTFHFYYQGRKTGEVVGANATKLESTMESLHKQL

SEQ ID NO: 91413 - DNA, 417 bp, Oryza sativa; identical to SEQ ID NO: 22479
  CDS (1)..(417)

SEQ ID NO: 91414 - protein, 138 aa, Oryza sativa; identical to SEQ ID NO: 22480

SEQ ID NO: 91415 - DNA, 570 bp, Oryza sativa
  CDS (1)..(570)
atggccatggccgcggccgcctccctcctgccggcgagcgccgccccaaccctccccggacgcgccttccgcccgccccgcaactccaccccgacggcctccctctcctgcgatggcggctcccgctgccgcggcgtcggcctcggcgtcatcctcggtgggtgtcgcgcgcaaggcgttcgacggaatgccgcagccgagacctacgtcccaggctccggcaagtacatcgccccggactacctcgtgaagaaggtgacggccaaggaactggaggagctggtgaggggggagaggaaggtgcccctcatcgtggatttctacgcgacgtggtgcggaccctgcgtcctcatggcccaggacatcgagatgcttgcagttgaatatgaaaacaatgccctgtttgtgaaggtggatactgatgatgaatatgaacttgcaagagatatgcaggtaagaggacttccaacactgtatttcttcagtccagatcaaagcaaagacgccctaaggactgagggactgattcctattgatatgatcagaaatatcattgataatgaattgtga

SEQ ID NO: 91416 - protein, 189 aa, Oryza sativa
MAMAAAASLLPASAAPTLPGRAFRPPRNSTPTASLSCDGGSRCRGVGLGVILGGCRAQGVRRNAAAETYVPGSGKYIAPDYLVKKVTAKELEELVRGERKVPLIVDFYATWCGPCVLMAQDIEMLAVEYENNALFVKVDTDDEYELARDMQVRGLPTLYFFSPDQSKDALRTEGLIPIDMIRNIIDNEL

SEQ ID NO: 91417 - DNA, 387 bp, Zea mays; identical to SEQ ID NO: 22603
  CDS (1)..(387)

SEQ ID NO: 91418 - protein, 128 aa, Zea mays; identical to SEQ ID NO: 22604

SEQ ID NO: 91419 - DNA, 549 bp, Zea mays; identical to SEQ ID NO: 45781
  CDS (1)..(549)

SEQ ID NO: 91420 - protein, 182 aa, Zea mays; identical to SEQ ID NO: 45782

SEQ ID NO: 91421 - DNA, 390 bp, Zea mays
  CDS (1)..(390)
atggagatccagcaccaccgggggctgggcaactccaaggttgtcaaggtgcagagcgaggaggcgtgggatctgttcaccgatcaagcgagcaacgaaggccggcccgttgttgcccatttcggagcgtcatggtgcgtgacgtccctgtccatgaactacaagtttgaggagctggcgcagacccaccccgaggtcttgttcctctacgtggacgtcgacgatgtccagagtgtttcatccaggtacggagtgaaggccatgccgacgttcttcctcatcaagagcaaggaggtggtggggaagatcgtcggggcgaacccagacgaggtgaagaagctggtggatgcttccgccgaacccttggagactcagatagtcgtggagtag

SEQ ID NO: 91422 - protein, 129 aa, Zea mays; identical to SEQ ID NO: 22596

SEQ ID NO: 91423 - DNA, 432 bp, Zea mays; identical to SEQ ID NO: 69966
  CDS (1)..(432)

SEQ ID NO: 91424 - protein, 143 aa, Zea mays; identical to SEQ ID NO: 69967

SEQ ID NO: 91425 - DNA, 372 bp, Brassica napus
  CDS (1)..(372)
atgggaactgtaatatcaaatctgctgggggcagatgaagggaatgaatccgagcatagtggcgtcactaagttgagctcatcagctcagtggcagcttcacttcaacgggatgaaagattcgaaccagctgctggtgattgacttcttcgcaagctggtgtgggccttgtaagttcatcgagcccgcgttcagacacatggctgtcaagttcactgatgttagcttcgtcaaggaggtggctagagagttcaacgtgaatgcgatgccaacttttgtgctggtgaaaaatggtaaagaggttgacaggatagttggaaccaaacaagctgaacttgagaataaagttaccaaacacagggggggacagtga

SEQ ID NO: 91426 - protein, 123 aa, Brassica napus
MGTVISNLLGADEGNESEHSGVTKLSSSAQWQLHFNGMKDSNQLLVIDFFASWCGPCKFIEPAFRHMAVKFTDVSFVKEVAREFNVNAMPTFVLVKNGKEVDRIVGTKQAELENKVTKHRGGQ

SEQ ID NO: 91427 - DNA, 387 bp, Brassica napus; identical to SEQ ID NO: 22507
  CDS (1)..(387)

SEQ ID NO: 91428 - protein, 128 aa, Brassica napus; identical to SEQ ID NO: 22508

SEQ ID NO: 91429 - DNA, 372 bp, Brassica napus; identical to SEQ ID NO: 22493
  CDS (1)..(372)

SEQ ID NO: 91430 - protein, 123 aa, Brassica napus; identical to SEQ ID NO: 22494

SEQ ID NO: 91431 - DNA, 546 bp, Brassica napus
  CDS (1)..(546)
atggctgctttcacctgtacctctcgtcctcccgtttccctccgttcggagtcaagaatcgcttcctctccatcagcttcactctctgctcggcggatgttcgccgtctcgcctgactcagcaggattgagaatccgtctttcccagtctccctcctcgttgacctcgaaggttcctcgaccacgaagaggcatcgtctgtgaggctcaggaaaccactacagatatagtttcaatagtcaacgacacaacatgggactctctagttctcaaggcggacgggcctgtactggtcgacttttgggcaccatggtgtggaccttgcaaaatgattgacccgctcgtgaacgaactagcaaaagagtacaccgggaaggtcaagttctacaaactgaacaccgacgactctccttcaaccccaagcaagtacaatgttagaagcatcccaacgatcatgatctttgtcaatggggagaagaaggatgcaatcataggtgcagtgcccagatctacgctcgcgtctagcattgataaattcttgcaatga

SEQ ID NO: 91432 - protein, 181 aa, Brassica napus
MAAFTCTSRPPVSLRSESRIASSPSASLSARRMFAVSPDSAGLRIRLSQSPSSLTSKVPRPRRGIVCEAQETTTDIVSIVNDTTWDSLVLKADGPVLVDFWAPWCGPCKMIDPLVNELAKEYTGKVKFYKLNTDDSPSTPSKYNVRSIPTIMIFVNGEKKDAIIGAVPRSTLASSIDKFLQ

SEQ ID NO: 91433 - DNA, 456 bp, Brassica napus; identical to SEQ ID NO: 22495
  CDS (1)..(456)

SEQ ID NO: 91434 - protein, 151 aa, Brassica napus; identical to SEQ ID NO: 22496

SEQ ID NO: 91435 - DNA, 354 bp, Brassica napus; identical to SEQ ID NO: 22497
  CDS (1)..(354)

SEQ ID NO: 91436 - protein, 117 aa, Brassica napus; identical to SEQ ID NO: 22498

SEQ ID NO: 91437 - DNA, 543 bp, Brassica napus
  CDS (1)..(543)
atggattgtatcgtctccagctcgacggttcttatccgatcacatctcactccaattcgctcagcttcctccgtatccgccaaacctctgagctcagcacaggtcacatccttcgctgctaaccgccacacactctcgttcaagtccgattacaaaagaatcagagcattctccactagcgcgtctacgataagatgcggcggaatcaaggagataggggagagtgagtttaccagcacggttcttgaatcggaccggccggttctggttaatttcgtcgccacgtggtgcggtccctgcaagttggtctatccagccacggaagctttatctcaggagtatggtgacaggttgacgattgtgaagattgatcacgacgcgaatccgaatttgatagcagagtacaaggtttatggtttaccgcattttatactctttaaggacggtaaggaagttgcaggtagcagaagggaaggtgcgattactaaagctaagcttaaggagtacattgatggtctcttgacctctatatcccctgcttaa

SEQ ID NO: 91438 - protein, 180 aa, Brassica napus
MDCIVSSSTVLIRSHLTPIRSASSVSAKPLSSAQVTSFAANRHTLSFKSDYKRIRAFSTSASTIRCGGIKEIGESEFTSTVLESDRPVLVNFVATWCGPCKLVYPATEALSQEYGDRLTIVKIDHDANPNLIAEYKVYGLPHFILFKDGKEVAGSRREGAITKAKLKEYIDGLLTSISPA

SEQ ID NO: 91439 - DNA, 546 bp, Brassica napus; identical to SEQ ID NO: 45783
  CDS (1)..(546)

SEQ ID NO: 91440 - protein, 181 aa, Brassica napus; identical to SEQ ID NO: 45784

SEQ ID NO: 91441 - DNA, 381 bp, Brassica napus; identical to SEQ ID NO: 22483
  CDS (1)..(381)

SEQ ID NO: 91442 - protein, 126 aa, Brassica napus; identical to SEQ ID NO: 22484

SEQ ID NO: 91443 - DNA, 360 bp, Brassica napus; identical to SEQ ID NO: 69858
  CDS (1)..(360)

SEQ ID NO: 91444 - protein, 119 aa, Brassica napus; identical to SEQ ID NO: 69859

SEQ ID NO: 91445 - DNA, 579 bp, Brassica napus; identical to SEQ ID NO: 69860
  CDS (1)..(579)

SEQ ID NO: 91446 - protein, 192 aa, Brassica napus; identical to SEQ ID NO: 69861

SEQ ID NO: 91447 - DNA, 546 bp, Brassica napus; identical to SEQ ID NO: 22499
  CDS (1)..(546)

SEQ ID NO: 91448 - protein, 181 aa, Brassica napus; identical to SEQ ID NO: 22500

SEQ ID NO: 91449 - DNA, 558 bp, Brassica napus
  CDS (1)..(558)
atggctgctgctttcacctgtacctctctccctccgctctctctccgttcagagacgaaagccgcagcatcctcctcactctcagctcgccggctcttcgccgtgtcgccggaatcaggaggattgagaatccgtctttctcagtcgccgtcctcgttgacctcgattcaacctagggttcctcgattacgaagaggcgtcgtcgtcgtctgcgaagctcaggaaaccacgactgacatagtttcaatagtgaacgactcgacgtgggattctctggttctcaaggcagacggccctgtacttgtcgacttctgggcaccatggtgtggaccttgcaaaatgattgacccgctcgtgaatgagctagcacaacagtacaccgggaaggtcaagttctacaaactaaacaccgacgactctccttcaaccccaagccagtacaatgttagaagcatcccaacgatcatgatctttgtcgatggcgagaagaaggacgcaatcataggtgcagtgcccaaatccacactcacgtctagcattgacaagttcttgcaatga

SEQ ID NO: 91450 - protein, 185 aa, Brassica napus
MAAAFTCTSLPPLSLRSETKAAASSSLSARRLFAVSPESGGLRIRLSQSPSSLTSIQPRVPRLRRGVVVVCEAQETTTDIVSIVNDSTWDSLVLKADGPVLVDFWAPWCGPCKMIDPLVNELAQQYTGKVKFYKLNTDDSPSTPSQYNVRSIPTIMIFVDGEKKDAIIGAVPKSTLTSSIDKFLQ

SEQ ID NO: 91451 - DNA, 540 bp, Brassica napus; identical to SEQ ID NO: 22501
  CDS (1)..(540)

SEQ ID NO: 91452 - protein, 179 aa, Brassica napus; identical to SEQ ID NO: 22502

SEQ ID NO: 91453 - DNA, 543 bp, Brassica napus
  CDS (1)..(543)
atgcctctctctctccgtctcgctccatctcctacggctttagcttcaaccaccggtggatatggtcctgttaagaagcagtgccgcatcccttactccggcgtcgccaccacgaggattggtttcttctcattggattatggaaaaagggtagaatcctctgtggtgaggtgtagcttagagacagtgaatgtaaatgttggtcaagtgaaggaagtggataaggacaccttctggcccatcgttaaagccgctggtgaaaagattattgtacttgacatgtacactcaatggtgtggaccatgtaaagtgattgcacctaagtacaaagctttatcagagaagtacgaggacgttgtatttcttaagcttgactgcaaccctgaaaacaggccattagtaaaggagctaggattaagagtggttccaactttcaaaatctttaaggataataaagtcgtcaaggaagttactggtgccaaatatgataatctggttgaagcaattgaaacagccaggtctgctggtggttcttcgggatga

SEQ ID NO: 91454 - protein, 180 aa, Brassica napus
MPLSLRLAPSPTALASTTGGYGPVKKQCRIPYSGVATTRIGFFSLDYGKRVESSVVRCSLETVNVNVGQVKEVDKDTFWPIVKAAGEKIIVLDMYTQWCGPCKVIAPKYKALSEKYEDVVFLKLDCNPENRPLVKELGLRVVPTFKIFKDNKVVKEVTGAKYDNLVEAIETARSAGGSSG

SEQ ID NO: 91455 - DNA, 423 bp, Brassica napus; identical to SEQ ID NO: 22503
  CDS (1)..(423)

SEQ ID NO: 91456 - protein, 140 aa, Brassica napus; identical to SEQ ID NO: 22504

SEQ ID NO: 91457 - DNA, 564 bp, Brassica napus; identical to SEQ ID NO: 22505
  CDS (1)..(564)

SEQ ID NO: 91458 - protein, 187 aa, Brassica napus; identical to SEQ ID NO: 22506

SEQ ID NO: 91459 - DNA, 540 bp, Brassica napus
  CDS (1)..(540)
atggctgcttttgcgtgcactactcgtccgccgatttctctccggtcagagatgaggatcgcatcctcaacgaaagtttcactctccactcgacaaatgttctccgtgggaggattgaggactcgcgtctctctatcatcggtctccaagaattctagcgcttctcgattacgacgacgaggagggttcatcatctgtgaagctcaggacactgctacagggattccaatggtgaacgattcaacgtgggagtcactagtactcaaggctgatgagcctgttgttgtggacttttgggcaccatggtgtggaccctgcaaaatgattgatcccattgtcaacgaactagcacagcagtacactgggaagatcaagttcttcaaactaaacactgacgattctccggcgaccccgggaaagtacggtgttagaagcataccaaccatcatgatcttcgttaagggagagaagaaggatacaatcatcggtgcagtgcctaaaaccacattagcaacaagcattgataaattcttgcagtga

SEQ ID NO: 91460 - protein, 179 aa, Brassica napus
MAAFACTTRPPISLRSEMRIASSTKVSLSTRQMFSVGGLRTRVSLSSVSKNSSASRLRRRGGFIICEAQDTATGIPMVNDSTWESLVLKADEPVVVDFWAPWCGPCKMIDPIVNELAQQYTGKIKFFKLNTDDSPATPGKYGVRSIPTIMIFVKGEKKDTIIGAVPKTTLATSIDKFLQ

SEQ ID NO: 91461 - DNA, 549 bp, Brassica napus
  CDS (1)..(549)
atggattgtatcgtctccagctcgacggttcttatccgatcacatctcactccaattcgctcagcttcctccgtatccgccaaacctctaagctcagcaaaagtcgcatccttcgcgtctaaccgccacatactctcgttcaagtccggtggtaaaagaaacagaacactctccaccaacgcttcgagttctacgataaggtgcggtggaattaaagagatcggagagagcgagtttaccagcacggttcttgaatcggaccggccggttctggttaatttcgtcgccacgtggtgcggtccctgcaagttggtctatccagccacggaagctttatctcaggagtatggtgacaggttgacgattgtgaagattgaccacgacgcgaatcctaatttgatagcagagtacaaggtttatggtttaccgcattttatactctttaaggatggtaaggaagttgctggtagcagaagggaaggtgcgattactaaagctaagcttaaggagtacattgatggtctcttgacctctatatcccctgcttaa

SEQ ID NO: 91462 - protein, 182 aa, Brassica napus
MDCIVSSSTVLIRSHLTPIRSASSVSAKPLSSAKVASFASNRHILSFKSGGKRNRTLSTNASSSTIRCGGIKEIGESEFTSTVLESDRPVLVNFVATWCGPCKLVYPATEALSQEYGDRLTIVKIDHDANPNLIAEYKVYGLPHFILFKDGKEVAGSRREGAITKAKLKEYIDGLLTSISPA

SEQ ID NO: 91463 - DNA, 456 bp, Brassica napus; identical to SEQ ID NO: 22509
  CDS (1)..(456)

SEQ ID NO: 91464 - protein, 151 aa, Brassica napus; identical to SEQ ID NO: 22510

SEQ ID NO: 91465 - DNA, 552 bp, Brassica napus
  CDS (1)..(552)
atgcctctgtctctgcgtctcgctccatctcctacggctttatctccgacaaccggcggatttagtcctgcgaaaaagcagtgtcgtatcccttcttactccggcgtggcgacgacgacgaggaggattggtttgtgctcattggattatgtgaaaaggggagactcctctgtggtgaggtgtagcttagagaccgtgaatgtcagtgttggtcaagtgacggaagtggataaggataccttctggcccatcgttaaagccgccggtgaaaagattgtggtacttgacatgtacactcaatggtgtggtccatgtaaagtgattgctcccaagtacaaagctttatcagagaagtatgaggacgttgtgtttctaaagcttgactgcaaccctgaaaacaggccgttagtaaaggagttaggattaagagtggttccaactttcaaaatctttaaggataataaagtcgtcaaggaagttaccggtgccaaatatgataatctggtcgaagccattgaaacggccaggtctgctgctggttcttcggggtga

SEQ ID NO: 91466 - protein, 183 aa, Brassica napus
MPLSLRLAPSPTALSPTTGGFSPAKKQCRIPSYSGVATTTRRIGLCSLDYVKRGDSSVVRCSLETVNVSVGQVTEVDKDTFWPIVKAAGEKIVVLDMYTQWCGPCKVIAPKYKALSEKYEDVVFLKLDCNPENRPLVKELGLRVVPTFKIFKDNKVVKEVTGAKYDNLVEAIETARSAAGSSG

SEQ ID NO: 91467 - DNA, 564 bp, Brassica napus; identical to SEQ ID NO: 22511
  CDS (1)..(564)

SEQ ID NO: 91468 - protein, 187 aa, Brassica napus; identical to SEQ ID NO: 22512

SEQ ID NO: 91469 - DNA, 540 bp, Brassica napus
  CDS (1)..(540)
atggctgctttcgcgtgtactactcgtccgccgatttctctccggtcagagatgatgatcgcatcctcaacgaaagtttcactctctactcgacaaatgttctccgtgggaggattgaggactcgcgtctctctatcatcggtctccaagaattctagggcttctcgattacgacgacgaggagggatcatcatctgtgaagctcaggacactgctacagggattccaatggtgaacgattcaacatgggagtctctagtactcaaggctgatgagcctgttgttgtggacttttgggcaccatggtgtggaccctgcaaaatgattgatcccattgtcaacgaactagcacagcagtacactgggaagatcaagttcttcaaactaaacactgacgattctccggcgaccccgggaaagtacggtgtgagaagcataccaaccatcatgatcttcgttaagggagagaagaaggatacaatcatcggtgcagtgcctaaaaccacattagcaacaagcattgataaattcttgcagtga

SEQ ID NO: 91470 - protein, 179 aa, Brassica napus
MAAFACTTRPPISLRSEMMIASSTKVSLSTRQMFSVGGLRTRVSLSSVSKNSRASRLRRRGGIIICEAQDTATGIPMVNDSTWESLVLKADEPVVVDFWAPWCGPCKMIDPIVNELAQQYTGKIKFFKLNTDDSPATPGKYGVRSIPTIMIFVKGEKKDTIIGAVPKTTLATSIDKFLQ

SEQ ID NO: 91471 - DNA, 354 bp, Brassica napus; identical to SEQ ID NO: 22513
  CDS (1)..(354)

SEQ ID NO: 91472 - protein, 117 aa, Brassica napus; identical to SEQ ID NO: 22514

SEQ ID NO: 91473 - DNA, 519 bp, Brassica napus
  CDS (1)..(519)
atggcggctacttctctctcaccatctacaatcccatctctgaatcggaaagactcgtccactgtttccgctttcactccgcgctctatctccgccgtcaaattccagttcccacttcgccggattcgaaccggagacttaaacctctcctcgctatcttcatcaactcgatccactccccgcgctattgaagcaaagaagcagacgtacgactcgttcgatgacctccttgtgaactctgacaagcctgttcttgtcgacttctacgcgacctggtgtggtccctgtcagttcatggttccgattctcagcgaagtgagtgaaacattgaaagacaagatccaggtggtgaagattgataccgagaagtacccgagtattgctaataaatacaagatcgaggcgcttcctacgcttatcttattcaaagatggggagccttgtgaccgatttgagggtgctttggcggcgaatcaacttgttcaatggattgaagattctcttgaagtgaagacttag

SEQ ID NO: 91474 - protein, 172 aa, Brassica napus
MAATSLSPSTIPSLNRKDSSTVSAFTPRSISAVKFQFPLRRIRTGDLNLSSLSSSTRSTPRAIEAKKQTYDSFDDLLVNSDKPVLVDFYATWCGPCQFMVPILSEVSETLKDKIQVVKIDTEKYPSIANKYKIEALPTLILFKDGEPCDRFEGALAANQLVQWIEDSLEVKT

SEQ ID NO: 91475 - DNA, 546 bp, Brassica napus; identical to SEQ ID NO: 22515
  CDS (1)..(546)

SEQ ID NO: 91476 - protein, 181 aa, Brassica napus; identical to SEQ ID NO: 22516

SEQ ID NO: 91477 - DNA, 543 bp, Brassica napus
  CDS (1)..(543)
atggattgtattgtctccagctcgacggttcttatccgatcacatctcactccaattcgctcagcttcctccgtatccgccaaacctctgagctcagcacaggtcacatccttcgctgctaaccgccacacactctcgttcaagtccgattacaaaagaatcagagcattctccactagcgcgtctacgataagatgcggcggaatcaaggagataggggagagtgagtttaccagcacggttcttgaatcggaccggccggttctggttaatttcgtcgccacgtggtgcggtccctgcaagttggtctatccagccacggaagctttatctcaggagtatggtgacaggttgacgattgtgaagattgatcacgacgcgaatccgaatttgatagcagagtacaaggtttatggtttaccgcattttatactctttaaggacggtaaggaagttgcaggtagcagaagggaaggtgcgattactaaagctaagcttaaggagtacattgatggtctcttgacctctatatccgttgcttaa

SEQ ID NO: 91478 - protein, 180 aa, Brassica napus
MDCIVSSSTVLIRSHLTPIRSASSVSAKPLSSAQVTSFAANRHTLSFKSDYKRIRAFSTSASTIRCGGIKEIGESEFTSTVLESDRPVLVNFVATWCGPCKLVYPATEALSQEYGDRLTIVKIDHDANPNLIAEYKVYGLPHFILFKDGKEVAGSRREGAITKAKLKEYIDGLLTSISVA

SEQ ID NO: 91479 - DNA, 540 bp, Brassica napus; identical to SEQ ID NO: 22517
  CDS (1)..(540)

SEQ ID NO: 91480 - protein, 179 aa, Brassica napus; identical to SEQ ID NO: 22518

SEQ ID NO: 91481 - DNA, 402 bp, Brassica napus; identical to SEQ ID NO: 22519
  CDS (1)..(402)

SEQ ID NO: 91482 - protein, 133 aa, Brassica napus; identical to SEQ ID NO: 22520

SEQ ID NO: 91483 - DNA, 561 bp, Brassica napus; identical to SEQ ID NO: 22521
  CDS (1)..(561)

SEQ ID NO: 91484 - protein, 186 aa, Brassica napus; identical to SEQ ID NO: 22522

SEQ ID NO: 91485 - DNA, 372 bp, Brassica napus; identical to SEQ ID NO: 22441
  CDS (1)..(372)

SEQ ID NO: 91486 - protein, 123 aa, Brassica napus; identical to SEQ ID NO: 22442

SEQ ID NO: 91487 - DNA, 345 bp, Brassica napus; identical to SEQ ID NO: 22523
  CDS (1)..(345)

SEQ ID NO: 91488 - protein, 114 aa, Brassica napus; identical to SEQ ID NO: 22524

SEQ ID NO: 91489 - DNA, 579 bp, Brassica napus; identical to SEQ ID NO: 69876
  CDS (1)..(579)

SEQ ID NO: 91490 - protein, 192 aa, Brassica napus; identical to SEQ ID NO: 69877

SEQ ID NO: 91491 - DNA, 522 bp, Zea mays
  CDS (1)..(522)
atggccttcctcctcgccgtcgccgtctccgtcgcagcgcctgcgtcgtggccttccccggtcgccaccgtcgccccgccccgcctcgccctccgccgaggcctcccgccgacgtggcgcgcagttcgagccctcccgcgttcccgtggcgccgtcgtggtgtgccaggcccagggcggccaggacactgcaatccaagttcctgatgtgagcaaatccacatggcaatcacttgtggtggagagcgagcttcccgtccttgttgagttctgggcttcatggtgcggaccgtgtaagatgatagaccccatcgttggcaagctctcaaaggagtacgaaggaaagctgaaatgttacaagctaaacactgacgagaaccctgacatcgcaacccaattcggcatccggagcatccccaccatgatgatattcaagaacggtgagaagaaggactcggtgattggagccgtgccagaaagcaccctcgtcacctgcattgataagtatgttggtgggaggtga

SEQ ID NO: 91492 - protein, 173 aa, Zea mays
MAFLLAVAVSVAAPASWPSPVATVAPPRLALRRGLPPTWRAVRALPRSRGAVVVCQAQGGQDTAIQVPDVSKSTWQSLVVESELPVLVEFWASWCGPCKMIDPIVGKLSKEYEGKLKCYKLNTDENPDIATQFGIRSIPTMMIFKNGEKKDSVIGAVPESTLVTCIDKYVGGR

SEQ ID NO: 91493 - DNA, 372 bp, Glycine max; identical to SEQ ID NO: 22535
  CDS (1)..(372)

SEQ ID NO: 91494 - protein, 123 aa, Glycine max; identical to SEQ ID NO: 22536

SEQ ID NO: 91495 - DNA, 360 bp, Glycine max; identical to SEQ ID NO: 22525
  CDS (1)..(360)

SEQ ID NO: 91496 - protein, 119 aa, Glycine max; identical to SEQ ID NO: 22526

SEQ ID NO: 91497 - DNA, 366 bp, Glycine max; identical to SEQ ID NO: 69880
  CDS (1)..(366)

SEQ ID NO: 91498 - protein, 121 aa, Glycine max; identical to SEQ ID NO: 69881

SEQ ID NO: 91499 - DNA, 381 bp, Glycine max; identical to SEQ ID NO: 22527
  CDS (1)..(381)

SEQ ID NO: 91500 - protein, 126 aa, Glycine max; identical to SEQ ID NO: 22528

SEQ ID NO: 91501 - DNA, 546 bp, Glycine max; identical to SEQ ID NO: 69886
  CDS (1)..(546)

SEQ ID NO: 91502 - protein, 181 aa, Glycine max; identical to SEQ ID NO: 69887

SEQ ID NO: 91503 - DNA, 363 bp, Glycine max; identical to SEQ ID NO: 22547
  CDS (1)..(363)

SEQ ID NO: 91504 - protein, 120 aa, Glycine max; identical to SEQ ID NO: 22548

SEQ ID NO: 91505 - DNA, 528 bp, Glycine max
  CDS (1)..(528)
atggcggtctccgtttccgcgtcctccgcgattgcttctttgaactccgaactctccacgcgcttgccaccctcactcgcctccgcatcttcttccgccaagcaatcctttctgcaattcccgtcgtgcacgcgccttcttcggattagcactccacgcgctcccgctccatcgcgacctcgattccttcctctggttcaagcgaagaaacaaacctataactcgtttgacgatttgcttgccaattctgagaaacctgtgttggttgacttctatgcaacctggtgtggtccttgtcaatttatggttcccatactcaatgaagtaagcactcggcttaaggataagatacaggtggtgaagattgatactgagaagtatcctagcattgctgacaaatacagaattgaggccttgccgactttcatcatgtttaaggatggagaaccttatgatcgctttgagggagcattgactgcagatcagctcattgaacgcatagaagccggcctcaaggttaagcaataa

SEQ ID NO: 91506 - protein, 175 aa, Glycine max
MAVSVSASSAIASLNSELSTRLPPSLASASSSAKQSFLQFPSCTRLLRISTPRAPAPSRPRFLPLVQAKKQTYNSFDDLLANSEKPVLVDFYATWCGPCQFMVPILNEVSTRLKDKIQVVKIDTEKYPSIADKYRIEALPTFIMFKDGEPYDRFEGALTADQLIERIEAGLKVKQ

SEQ ID NO: 91507 - DNA, 354 bp, Glycine max; identical to SEQ ID NO: 22531
  CDS (1)..(354)

SEQ ID NO: 91508 - protein, 117 aa, Glycine max; identical to SEQ ID NO: 22532

SEQ ID NO: 91509 - DNA, 546 bp, Glycine max; identical to SEQ ID NO: 69830
  CDS (1)..(546)

SEQ ID NO: 91510 - protein, 181 aa, Glycine max; identical to SEQ ID NO: 69831

SEQ ID NO: 91511 - DNA, 546 bp, Glycine max
  CDS (1)..(546)
atggctctgaatctttgtatctcacctaactgtaaatgggtttcatctcctgcttccttagatagtgcatcttctttgagatcttcacttggttcttgttttggtaacataaacattgctagtgtgagtttaagcactagtagaagtttgagtttgaggaggagtgggagtgttagtgtaagatctagtttggaaactacggggcccacagtcacagtgggacaggtcactgaggttaacaaggataccttctggccgatcgttaaggctgccggggataaaaccgttgtccttgacatgtacacacaatggtgtggcccttgcaaagtgatggctccaaagtttcaagaattatctgaaaagtatctggatgttgtctttctaaagcttgattgcaaccaagacaacaggcccttggcaatagagctgggaattaaagtggttcccactttcaaaattctgaaggacaacaaggttgtaaaagaagttactggagctaaatacgatgatttggttgatgccatagacaaagttcgatctagctaa

SEQ ID NO: 91512 - protein, 181 aa, Glycine max
MALNLCISPNCKWVSSPASLDSASSLRSSLGSCFGNINIASVSLSTSRSLSLRRSGSVSVRSSLETTGPTVTVGQVTEVNKDTFWPIVKAAGDKTVVLDMYTQWCGPCKVMAPKFQELSEKYLDVVFLKLDCNQDNRPLAIELGIKVVPTFKILKDNKVVKEVTGAKYDDLVDAIDKVRSS

SEQ ID NO: 91513 - DNA, 417 bp, Glycine max; identical to SEQ ID NO: 22533
  CDS (1)..(417)

SEQ ID NO: 91514 - protein, 138 aa, Glycine max; identical to SEQ ID NO: 22534

SEQ ID NO: 91515 - DNA, 540 bp, Glycine max
  CDS (1)..(540)
atggctctgaatctttgtatctcacctaagtttaaatgggttccttccttagatagtgcttcctattctttgagaccttcacttgggtcttgttttggtaacataaacattgctagtgtgagtctaagtactactagaagtttgagtttgaggaggagtgggagtgttagtgtaagatctagtttagaaactgcggggcccacagtcacagtgggacaggtcactgaggttaacaaggacaccttctggccgatcgttaaggctgccggggataaaaccgttgtccttgacatgtacacacaatggtgtggcccttgcaaagtgatggctccaaagtttcaagaattatctgaaaagtatctggatgttgtctttctaaagcttgattgcaaccaagacaacaggcccttggcaatagagctgggaattaaagtggttcccactttcaaaattctgaaggacaacaaggttgtaaaagaagttactggagctaaatacgatgatttggttgatgccattgacaaagttcgatctagctaa

SEQ ID NO: 91516 - protein, 179 aa, Glycine max
MALNLCISPKFKWVPSLDSASYSLRPSLGSCFGNINIASVSLSTTRSLSLRRSGSVSVRSSLETAGPTVTVGQVTEVNKDTFWPIVKAAGDKTVVLDMYTQWCGPCKVMAPKFQELSEKYLDVVFLKLDCNQDNRPLAIELGIKVVPTFKILKDNKVVKEVTGAKYDDLVDAIDKVRSS

SEQ ID NO: 91517 - DNA, 528 bp, Glycine max
  CDS (1)..(528)
atggcggtctccgtttccgcgtcctccgcgattgcttctttgaactccgaacgctccacgcgcttggcaccctcactcgtctccgcatcttcttccgccaagcaatcctcgctgcaattcacgtcgcccacgcgccttcttcggattagtactccacgcgctcccgctccttcgcgacctcgattccttcctctggttcaagcgaagaaacaaacctataactcgtttgaagatttgcttgccaattctgaaaagcctgtgttggttgacttctatgcaacctggtgtggtccttgtcaattcatggttcccatactcaatgaagttagcactcggcttcaggataagatacaggtggtgaagattgatactgagaagtatccaaccattgctgacaaatacagaattgaggcgttgccgactttcatcatgtttaaggatggagatccttatgatcgctttgagggagcattgactgcagatcagctcattgaacgcattgaagctggcctcaaggttaagcaataa

SEQ ID NO: 91518 - protein, 175 aa, Glycine max
MAVSVSASSAIASLNSERSTRLAPSLVSASSSAKQSSLQFTSPTRLLRISTPRAPAPSRPRFLPLVQAKKQTYNSFEDLLANSEKPVLVDFYATWCGPCQFMVPILNEVSTRLQDKIQVVKIDTEKYPTIADKYRIEALPTFIMFKDGDPYDRFEGALTADQLIERIEAGLKVKQ

SEQ ID NO: 91519 - DNA, 363 bp, Glycine max; identical to SEQ ID NO: 22553
  CDS (1)..(363)

SEQ ID NO: 91520 - protein, 120 aa, Glycine max; identical to SEQ ID NO: 22554

SEQ ID NO: 91521 - DNA, 354 bp, Glycine max; identical to SEQ ID NO: 22551
  CDS (1)..(354)

SEQ ID NO: 91522 - protein, 117 aa, Glycine max; identical to SEQ ID NO: 22552

SEQ ID NO: 91523 - DNA, 510 bp, Glycine max; identical to SEQ ID NO: 69900
  CDS (1)..(510)

SEQ ID NO: 91524 - protein, 169 aa, Glycine max; identical to SEQ ID NO: 69901

SEQ ID NO: 91525 - DNA, 375 bp, Glycine max; identical to SEQ ID NO: 22537
  CDS (1)..(375)

SEQ ID NO: 91526 - protein, 124 aa, Glycine max; identical to SEQ ID NO: 22538

SEQ ID NO: 91527 - DNA, 423 bp, Glycine max; identical to SEQ ID NO: 22539
  CDS (1)..(423)

SEQ ID NO: 91528 - protein, 140 aa, Glycine max; identical to SEQ ID NO: 22540

SEQ ID NO: 91529 - DNA, 414 bp, Glycine max; identical to SEQ ID NO: 22541
  CDS (1)..(414)

SEQ ID NO: 91530 - protein, 137 aa, Glycine max; identical to SEQ ID NO: 22542

SEQ ID NO: 91531 - DNA, 420 bp, Glycine max; identical to SEQ ID NO: 22543
  CDS (1)..(420)

SEQ ID NO: 91532 - protein, 139 aa, Glycine max; identical to SEQ ID NO: 22544

SEQ ID NO: 91533 - DNA, 423 bp, Glycine max; identical to SEQ ID NO: 22545
  CDS (1)..(423)

SEQ ID NO: 91534 - protein, 140 aa, Glycine max; identical to SEQ ID NO: 22546

SEQ ID NO: 91535 - DNA, 510 bp, Glycine max
  CDS (1)..(510)
atggcttcattttctatcacctcctcgcctcccacccttcacaaagccactatcaccgacccttcttcttcttcttcccacgccttccctcaccgttctcccttcgttttacgcatgccccaccaaccccatcgccctcaaactcctcttgttttgcccaagattcaatctttgcgcaacgaaactagagctattccagttaccaaagacctgtgggataattcaattctgaaaagtgaaatcccagtccttgttatattctatgcaaattggtgcggcccgtgcaggatggttcaccggataatagatgagatcgcaacagagtatgctgggaaactcaaatgttttatagtcaacacagacactgacatgcaaattgctgaggactatgaaattaaggctgtaccagtggttttgatgtttaaaaatggcaagaaatgtgattctgtaattggtaccatgccaaaggagttttatgtggctgctatagagggggtgctcaagccctaa

SEQ ID NO: 91536 - protein, 169 aa, Glycine max
MASFSITSSPPTLHKATITDPSSSSSHAFPHRSPFVLRMPHQPHRPQTPLVLPKIQSLRNETRAIPVTKDLWDNSILKSEIPVLVIFYANWCGPCRMVHRIIDEIATEYAGKLKCFIVNTDTDMQIAEDYEIKAVPVVLMFKNGKKCDSVIGTMPKEFYVAAIEGVLKP

SEQ ID NO: 91537 - DNA, 414 bp, Glycine max; identical to SEQ ID NO: 22549
  CDS (1)..(414)

SEQ ID NO: 91538 - protein, 137 aa, Glycine max; identical to SEQ ID NO: 22550

SEQ ID NO: 91539 - DNA, 528 bp, Glycine max; identical to SEQ ID NO: 69916
  CDS (1)..(528)

SEQ ID NO: 91540 - protein, 175 aa, Glycine max; identical to SEQ ID NO: 69917

SEQ ID NO: 91541 - DNA, 546 bp, Glycine max
  CDS (1)..(546)
atggatgccatgacactgtcactcccgctccctccggttccggtctgtacagtgcccgcgtctgcatcaacctcgtcctctgtttctctcactcactcctggtcggccacggccaggcagaggctctcctctcacagaacaagacccattttccggaattattcctctgcggttccaaaacttacagtggtgacatgcggtgcggctgtgacggagatcaacgagacccaattcaaagacacggttctgaaggctaaccgtccggttcttgttgagttcgtcgctacttggtgcggtccttgccgtctcatctccccctctatggaatccctcgctaaggaatatgaagacagattaacggttgtaaagattgatcatgatgccaacccacggctaattgaagagtataaagtttatggactaccaacattaatactcttcaagaacgggcaagaagttccagaaagcagaagggaaggtgcaattacaaaagtgaaacttaaagagtacgtggatgctctattggaatcgatatcagtttcatag

SEQ ID NO: 91542 - protein, 181 aa, Glycine max
MDAMTLSLPLPPVPVCTVPASASTSSSVSLTHSWSATARQRLSSHRTRPIFRNYSSAVPKLTVVTCGAAVTEINETQFKDTVLKANRPVLVEFVATWCGPCRLISPSMESLAKEYEDRLTVVKIDHDANPRLIEEYKVYGLPTLILFKNGQEVPESRREGAITKVKLKEYVDALLESISVS

SEQ ID NO: 91543 - DNA, 417 bp, Glycine max; identical to SEQ ID NO: 22555
  CDS (1)..(417)

SEQ ID NO: 91544 - protein, 138 aa, Glycine max; identical to SEQ ID NO: 22556

SEQ ID NO: 91545 - DNA, 549 bp, Glycine max; identical to SEQ ID NO: 69842
  CDS (1)..(549)

SEQ ID NO: 91546 - protein, 182 aa, Glycine max; identical to SEQ ID NO: 69843

SEQ ID NO: 91547 - DNA, 402 bp, Glycine max; identical to SEQ ID NO: 22529
  CDS (1)..(402)

SEQ ID NO: 91548 - protein, 133 aa, Glycine max; identical to SEQ ID NO: 22530

SEQ ID NO: 91549 - DNA, 420 bp, Glycine max; identical to SEQ ID NO: 22557
  CDS (1)..(420)

SEQ ID NO: 91550 - protein, 139 aa, Glycine max; identical to SEQ ID NO: 22558

SEQ ID NO: 91551 - DNA, 366 bp, Glycine max
  CDS (1)..(366)
atggccatggcatatgttgctagatcatcggagtcatctcaagtgcttaatttccattccactgctaaatggaatgctcactttgatgccttgaaacaaactaacaaactgatggtggttgatttcactgcttcatggtgtggaccttgcaaactcatggacccagttatccaagagtttgctacaaaatacagagatgtcgagtttgtgaagattgatgtggatgagttaatggaggtatctcaacattaccaagtacagggaatgccaactttcatgctgattaagaaaggcaacgtggctgataaagtggtgggagtaagaaaggaggagctacaaaggttgattgaacaacaccgaaaataa

SEQ ID NO: 91552 - protein, 121 aa, Glycine max; identical to SEQ ID NO: 69899

SEQ ID NO: 91553 - DNA, 405 bp, Glycine max; identical to SEQ ID NO: 22559
  CDS (1)..(405)

SEQ ID NO: 91554 - protein, 134 aa, Glycine max; identical to SEQ ID NO: 22560

SEQ ID NO: 91555 - DNA, 366 bp, Helianthus annuus; identical to SEQ ID NO: 69926
  CDS (1)..(366)

SEQ ID NO: 91556 - protein, 121 aa, Helianthus annuus; identical to SEQ ID NO: 69927

SEQ ID NO: 91557 - DNA, 570 bp, Hordeum vulgare; identical to SEQ ID NO: 69928
  CDS (1)..(570)

SEQ ID NO: 91558 - protein, 189 aa, Hordeum vulgare; identical to SEQ ID NO: 69929

SEQ ID NO: 91559 - DNA, 396 bp, Hordeum vulgare; identical to SEQ ID NO: 22561
  CDS (1)..(396)

SEQ ID NO: 91560 - protein, 131 aa, Hordeum vulgare; identical to SEQ ID NO: 22562

SEQ ID NO: 91561 - DNA, 369 bp, Hordeum vulgare; identical to SEQ ID NO: 22563
  CDS (1)..(369)

SEQ ID NO: 91562 - protein, 122 aa, Hordeum vulgare; identical to SEQ ID NO: 22564

SEQ ID NO: 91563 - DNA, 372 bp, Linum usitatissimum; identical to SEQ ID NO: 22565
  CDS (1)..(372)

SEQ ID NO: 91564 - protein, 123 aa, Linum usitatissimum; identical to SEQ ID NO: 22566

SEQ ID NO: 91565 - DNA, 363 bp, Linum usitatissimum; identical to SEQ ID NO: 22567
  CDS (1)..(363)

SEQ ID NO: 91566 - protein, 120 aa, Linum usitatissimum; identical to SEQ ID NO: 22568

SEQ ID NO: 91567 - DNA, 357 bp, Zea mays; identical to SEQ ID NO: 22569
  CDS (1)..(357)

SEQ ID NO: 91568 - protein, 118 aa, Zea mays; identical to SEQ ID NO: 22570

SEQ ID NO: 91569 - DNA, 534 bp, Zea mays; identical to SEQ ID NO: 69940
  CDS (1)..(534)

SEQ ID NO: 91570 - protein, 177 aa, Zea mays; identical to SEQ ID NO: 69941

SEQ ID NO: 91571 - DNA, 549 bp, Zea mays; identical to SEQ ID NO: 69942
  CDS (1)..(549)

SEQ ID NO: 91572 - protein, 182 aa, Zea mays; identical to SEQ ID NO: 69943

SEQ ID NO: 91573 - DNA, 396 bp, Zea mays; identical to SEQ ID NO: 22571
  CDS (1)..(396)

SEQ ID NO: 91574 - protein, 131 aa, Zea mays; identical to SEQ ID NO: 22572

SEQ ID NO: 91575 - DNA, 405 bp, Zea mays; identical to SEQ ID NO: 22573
  CDS (1)..(405)

SEQ ID NO: 91576 - protein, 134 aa, Zea mays; identical to SEQ ID NO: 22574

SEQ ID NO: 91577 - DNA, 363 bp, Zea mays; identical to SEQ ID NO: 69946
  CDS (1)..(363)

SEQ ID NO: 91578 - protein, 120 aa, Zea mays; identical to SEQ ID NO: 69947

SEQ ID NO: 91579 - DNA, 570 bp, Triticum aestivum; identical to SEQ ID NO: 69948
  CDS (1)..(570)

SEQ ID NO: 91580 - protein, 189 aa, Triticum aestivum; identical to SEQ ID NO: 69949

SEQ ID NO: 91581 - DNA, 381 bp, Triticum aestivum; identical to SEQ ID NO: 22575
  CDS (1)..(381)

SEQ ID NO: 91582 - protein, 126 aa, Triticum aestivum; identical to SEQ ID NO: 22576

SEQ ID NO: 91583 - DNA, 396 bp, Triticum aestivum
  CDS (1)..(396)
atggggggctgtgtgggcaagggtcgtagcattgtggaagaaaagcttgatttcaaaggtggaaatgtgcatgtcataacaaccaaagaggactgggaccagaagattgaagaagcaaacaaggatgggaaaattgttgtagcaaacttcagtgcttcgtggtgtgggccatgccgtgtcattgcacctgtttatgccgagatgtccaagacttatcctcaactcatgttcttgacaattgatgttgatgacctaatggatttcagctcaacatgggacatccgtgcaaccccgacgttcttcttcctcaaaaacggccagcagatcgacaagctcgtcggcgccaacaaacctgagctcgagaagaaagtacaagctcttggtgatggcagttga

SEQ ID NO: 91584 - protein, 131 aa, Triticum aestivum; identical to SEQ ID NO: 22378

SEQ ID NO: 91585 - DNA, 297 bp, Triticum aestivum
  CDS (1)..(297)
atgcagatcgaggaggccaacgccgccaagaagctggtggtggttgacttcactgcatcatggtgtggaccatgccgcatcatggctccagttttcgctgatctcgccaagaagttcccaaatgctgttttcctcaaggtcgatgtcgatgaactgaagcccattgcggagcaattcagcgttgaggccatgccaaccttcctgttcattaaggaaggagatgtcaaggacagggttgtgggagctatcaaggaggaactgacgaacaaggttgggctacacgcggcggcccagtaa

SEQ ID NO: 91586 - protein, 98 aa, Triticum aestivum
MQIEEANAAKKLVVVDFTASWCGPCRIMAPVFADLAKKFPNAVFLKVDVDELKPIAEQFSVEAMPTFLFIKEGDVKDRVVGAIKEELTNKVGLHAAAQ

SEQ ID NO: 91587 - DNA, 357 bp, Triticum aestivum; identical to SEQ ID NO: 22577
  CDS (1)..(357)

SEQ ID NO: 91588 - protein, 118 aa, Triticum aestivum; identical to SEQ ID NO: 22578

SEQ ID NO: 91589 - DNA, 396 bp, Triticum aestivum; identical to SEQ ID NO: 22579
  CDS (1)..(396)

SEQ ID NO: 91590 - protein, 131 aa, Triticum aestivum; identical to SEQ ID NO: 22580

SEQ ID NO: 91591 - DNA, 381 bp, Triticum aestivum; identical to SEQ ID NO: 22581
  CDS (1)..(381)

SEQ ID NO: 91592 - protein, 126 aa, Triticum aestivum; identical to SEQ ID NO: 22582

SEQ ID NO: 91593 - DNA, 357 bp, Triticum aestivum; identical to SEQ ID NO: 22583
  CDS (1)..(357)

SEQ ID NO: 91594 - protein, 118 aa, Triticum aestivum; identical to SEQ ID NO: 22584

SEQ ID NO: 91595 - DNA, 528 bp, Glycine max; identical to SEQ ID NO: 69960
  CDS (1)..(528)

SEQ ID NO: 91596 - protein, 175 aa, Glycine max; identical to SEQ ID NO: 69961

SEQ ID NO: 91597 - DNA, 549 bp, Zea mays; identical to SEQ ID NO: 45787
  CDS (1)..(549)

SEQ ID NO: 91598 - protein, 182 aa, Zea mays; identical to SEQ ID NO: 45788

SEQ ID NO: 91599 - DNA, 402 bp, Zea mays; identical to SEQ ID NO: 22395
  CDS (1)..(402)

SEQ ID NO: 91600 - protein, 133 aa, Zea mays; identical to SEQ ID NO: 22396

SEQ ID NO: 91601 - DNA, 534 bp, Zea mays; identical to SEQ ID NO: 69962
  CDS (1)..(534)

SEQ ID NO: 91602 - protein, 177 aa, Zea mays; identical to SEQ ID NO: 69963

SEQ ID NO: 91603 - DNA, 366 bp, Zea mays; identical to SEQ ID NO: 69964
  CDS (1)..(366)

SEQ ID NO: 91604 - protein, 121 aa, Zea mays; identical to SEQ ID NO: 69965

SEQ ID NO: 91605 - DNA, 522 bp, Zea mays
  CDS (1)..(522)
atggccttccgcctcgccgtcgccgtctccgtcgcagcgcctgcgtcgtggccttccccggtcgccaccgtcgccccgccccgcctcgccctccgccgaggcctcccgccgacgtggcgcgcagttcgagccctcccgcgttcccgtggcgccgtcgtggtgtgccaggcccagggcggccaggacactgcaatccaagttcctgatgtgagcaaatccacatggcaatcacttgtggtggagagcgagcttcccgtccttgttgagttctgggcttcatggtgcggaccgtgtaagatgatagaccccatcgttggcaagctctcaaaggagtacgaaggaaagctgaaatgttacaagctaaacaccgacgagaaccctgacatcgcaacccaattcggcatccggagcatccccaccatgatgatattcaagaacggtgagaagaaggactcggtgattggagccgtgccagaaagcaccctcgtcacctgcattgacaagtatgttggtgggaggtga

SEQ ID NO: 91606 - protein, 173 aa, Zea mays
MAFRLAVAVSVAAPASWPSPVATVAPPRLALRRGLPPTWRAVRALPRSRGAVVVCQAQGGQDTAIQVPDVSKSTWQSLVVESELPVLVEFWASWCGPCKMIDPIVGKLSKEYEGKLKCYKLNTDENPDIATQFGIRSIPTMMIFKNGEKKDSVIGAVPESTLVTCIDKYVGGR

SEQ ID NO: 91607 - DNA, 570 bp, Zea mays
  CDS (1)..(570)
atggcgctcctcgcgccgagcccgcgcgcgctccgcgtgcgggagaccgcggcggcggcgctcccgcactcatcggcgaccgctgcatgctcgaccgtcggcggcggggcagccaggcgggcgctgtggctgtgggacaacggcggcgggaccgggacggggaggaggaaggaccaccgggagagagtccggccggaggcgtactgctgggacgtgtccaggccggtggagatggaggagatcgacagcatcgagaagctcgatgatgcgctcaggtggtccgtcgagaacaaccagcccgtcgtcatcgactggatggcaggttggtgtcggaaatgcatctacctgatgcccagaatggagaagatggcaggagaatatcctgaagtgaggttttacttcatcgatgtcaataaagttccacaggcggtggtgaaaagaggaaatgtaactagaatgcccactattcagctatggaaggatggagagtggaaagcggaagtaataggaggccacaaagcttgtcttgtgatggatgaggttagagaaatgatcgagaataacaagtga

SEQ ID NO: 91608 - protein, 189 aa, Zea mays
MALLAPSPRALRVRETAAAALPHSSATAACSTVGGGAARRALWLWDNGGGTGTGRRKDHRERVRPEAYCWDVSRPVEMEEIDSIEKLDDALRWSVENNQPVVIDWMAGWCRKCIYLMPRMEKMAGEYPEVRFYFIDVNKVPQAVVKRGNVTRMPTIQLWKDGEWKAEVIGGHKACLVMDEVREMIENNK

SEQ ID NO: 91609 - DNA, 567 bp, Zea mays
  CDS (1)..(567)
atggcgctcctcgcgccgagcccgcgcgcgctctgcgtgcgggaggccgcggcggcgtcgccgcacccgcactcgttggcgaccgccgcctgctcgaccgttggcggcggggtggctgggcgggcgctgtggctgtggaacggcggcggaacggggaggaggaggagggagcgccgggagagggtccgggcggaggcatacttctgggacgtgtccaagccggtggagatggaggagatcgacagcatggagaagctcgacgacgcgctcaggtggtccgtcgagaacaaccagcccatcatcatcgactggatggcaagttggtgtcggaaatgcatatacctggtgcccagaatggagaagatagcaggagaatatcctggagtcaggttttacttcgtcgatgtcaacaaagttccacaggcggtggtgaaaagaggaaatgtaactaaaatgcccactattcagctctggaaggacggagagtggaaagcagaagtaataggtggtcacaaagcttggcttgtgatggatgaggtcagagaaatgatccagaagaacaagtga

SEQ ID NO: 91610 - protein, 188 aa, Zea mays
MALLAPSPRALCVREAAAASPHPHSLATAACSTVGGGVAGRALWLWNGGGTGRRRRERRERVRAEAYFWDVSKPVEMEEIDSMEKLDDALRWSVENNQPIIIDWMASWCRKCIYLVPRMEKIAGEYPGVRFYFVDVNKVPQAVVKRGNVTKMPTIQLWKDGEWKAEVIGGHKAWLVMDEVREMIQKNK

SEQ ID NO: 91611 - DNA, 567 bp, Zea mays
  CDS (1)..(567)
atggccgccgtcgccgctctttcctgccccgcgcctccgcgtgtgttccgctgcgccaagacgctgcctgctccctccgccgccacatccagccgcggaagggtaggctacggctcctcctacgcccgccggtggcagtgccgccgctggacccaccggccggacgctacgacgacgcggatcaggcgggcaacgccgcgccgcacggcggtggtgagggtgaactgcgcctactctccccgcgctgaaacaatcactgcatgctcttggaatgaatatgtgatctgcagtgatgtacctgtgcttattgagttttgggcctcctggtgtggaccttgcagaatggtcacacggattgtcgatgagatagcacaagaatattctgggagaataaaatgctacaagcttgacactgatgattacccacaggttgctacagcttacagcatcgagaggattccaactgttttactctttaaggatggagagaaaatacatagtattaccgggacactgccaaaggctgtttatgtgaaagccattgagaaatctatttcagaacaatga

SEQ ID NO: 91612 - protein, 188 aa, Zea mays
MAAVAALSCPAPPRVFRCAKTLPAPSAATSSRGRVGYGSSYARRWQCRRWTHRPDATTTRIRRATPRRTAVVRVNCAYSPRAETITACSWNEYVICSDVPVLIEFWASWCGPCRMVTRIVDEIAQEYSGRIKCYKLDTDDYPQVATAYSIERIPTVLLFKDGEKIHSITGTLPKAVYVKAIEKSISEQ

SEQ ID NO: 91613 - DNA, 606 bp, Zea mays; identical to SEQ ID NO: 69968
  CDS (1)..(606)

SEQ ID NO: 91614 - protein, 201 aa, Zea mays; identical to SEQ ID NO: 69969

SEQ ID NO: 91615 - DNA, 369 bp, Zea mays; identical to SEQ ID NO: 22597
  CDS (1)..(369)

SEQ ID NO: 91616 - protein, 122 aa, Zea mays; identical to SEQ ID NO: 22598

SEQ ID NO: 91617 - DNA, 399 bp, Zea mays; identical to SEQ ID NO: 22591
  CDS (1)..(399)

SEQ ID NO: 91618 - protein, 132 aa, Zea mays; identical to SEQ ID NO: 22592

SEQ ID NO: 91619 - DNA, 522 bp, Zea mays
  CDS (1)..(522)
atggcctcccgcctcgccgtcgccgtcgccgtcgccgcgcccgcgtcgtctccttccccggtcgccaccgtcgccccgccccgcgtcgccctccgccgaggcctcccgccgacgtggcacgctctccgcgccctccctcgatcccgtggcgcagccgtcgtgtgccaggcccagggcggccaggacaccgccatccaagttcctgatgtgagcaaatccacatggcaatcacttgtggtggagagcgagcttcccgtcctcgttcagttctgggcctcatggtgtggaccgtgtaagatgatagaccccatcgttggcaagctctcgaaggagtacgaaggaaagctgaagtgttacaagctaaacactgacgagaaccctgacatcgcgacccaattcggcattcggagcatccccaccatgatgatattcaagaatggtgagaagaaggacgcggtgattggagccgtgccagagagcaccctggtcacctgcatcgacaagtacgttggtgggaggtga

SEQ ID NO: 91620 - protein, 173 aa, Zea mays
MASRLAVAVAVAAPASSPSPVATVAPPRVALRRGLPPTWHALRALPRSRGAAVVCQAQGGQDTAIQVPDVSKSTWQSLVVESELPVLVQFWASWCGPCKMIDPIVGKLSKEYEGKLKCYKLNTDENPDIATQFGIRSIPTMMIFKNGEKKDAVIGAVPESTLVTCIDKYVGGR

SEQ ID NO: 91621 - DNA, 570 bp, Zea mays
  CDS (1)..(570)
atggcgctcctcgcgccgagcccgcgcgcgctccgcgtgcgggagaccgcggcggcggcgctcccgcactcatcggcgaccgctgcatgctcgaccgtcggcggcggggcggccaggcgggcgctgtggctgtgggacaacggcggcgggaccgggacggggaggaggaaggagcaccgggagagagtccggccggaggcgtactgctgggacgtgtccaggccggtggagatggaggagatcgacagcatcgagaagctcgatgatgcgctcaggtggtccgtcgagaacaaccagcccgtcgtcatcgactggatggcaggttggtgtcggaaatgcatctacctgatgcccagaatggagaagatggcaggagaatatcctgaagtgaggttttacttcatcgatgtcaataaagttccacagggggtggtgaaaagaggaaatgtaactagaatgcccactattcagctatggaaggatggagagtggaaagcggaagtaataggaggccacaaagcttgtcttgtgatggatgaggttagagaaatgatcgagaataacaagtga

SEQ ID NO: 91622 - protein, 189 aa, Zea mays
MALLAPSPRALRVRETAAAALPHSSATAACSTVGGGAARRALWLWDNGGGTGTGRRKEHRERVRPEAYCWDVSRPVEMEEIDSIEKLDDALRWSVENNQPVVIDWMAGWCRKCIYLMPRMEKMAGEYPEVRFYFIDVNKVPQGVVKRGNVTRMPTIQLWKDGEWKAEVIGGHKACLVMDEVREMIENNK

SEQ ID NO: 91623 - DNA, 432 bp, Zea mays; identical to SEQ ID NO: 22491
  CDS (1)..(432)

SEQ ID NO: 91624 - protein, 143 aa, Zea mays; identical to SEQ ID NO: 22492

SEQ ID NO: 91625 - DNA, 432 bp, Zea mays; identical to SEQ ID NO: 22587
  CDS (1)..(432)

SEQ ID NO: 91626 - protein, 143 aa, Zea mays; identical to SEQ ID NO: 22588

SEQ ID NO: 91627 - DNA, 606 bp, Zea mays; identical to SEQ ID NO: 69974
  CDS (1)..(606)

SEQ ID NO: 91628 - protein, 201 aa, Zea mays; identical to SEQ ID NO: 69975

SEQ ID NO: 91629 - DNA, 567 bp, Zea mays
  CDS (1)..(567)
atggccgccgtcgccgctctttcctgccccgcgcctccgcgtgtgttccgctgcgccaagacgctgcctgctccctccgccgccacatccagccgcggaagggtcggctacggctcctcctacgcccgccggtggcagtgccgccgctggacccaccggccggacgctacgacgacgcggatcaggcgggcaacgccgcgccgcacggcggtggtgagggtgaactgcgcctactctccccgcgctgaaacaatcactgcatgctcttggaatgaatatgtgatttgcagtgatgtacctgtgcttattgagttttgggcctcctggtgtggaccttgcagaatggtcacacggattgtcgatgagatagcacaagaatatgttgggagaataaaatgctataagcttgacaccgatgattacccacaggttgctacagcttacagcatcgagaggattccaactgttttactctttaaggatggagagaaaatacatagtattaccgggacactgccaaaggctgtttatgtgaaagccattgagaaatctatttcagaacaatga

SEQ ID NO: 91630 - protein, 188 aa, Zea mays
MAAVAALSCPAPPRVFRCAKTLPAPSAATSSRGRVGYGSSYARRWQCRRWTHRPDATTTRIRRATPRRTAVVRVNCAYSPRAETITACSWNEYVICSDVPVLIEFWASWCGPCRMVTRIVDEIAQEYVGRIKCYKLDTDDYPQVATAYSIERIPTVLLFKDGEKIHSITGTLPKAVYVKAIEKSISEQ

SEQ ID NO: 91631 - DNA, 504 bp, Zea mays; identical to SEQ ID NO: 69846
  CDS (1)..(504)

SEQ ID NO: 91632 - protein, 167 aa, Zea mays; identical to SEQ ID NO: 69847

SEQ ID NO: 91633 - DNA, 567 bp, Zea mays
  CDS (1)..(567)
atggccgccgtcgccgctctttcctgccccgcgcctccgcgtgggctccgctgcgccaagacgctgcctgctccctccgccgccacatccagtcgcggaagggtaggctacggctcctcctacgcccgtcggtggcagtgccgccgctgggcccaccggccggacgctgcgacgacgcggatcaggcgggcaacgccgcgccgcacggcggtggtgagggtgaactgcgcctactctccccgcgctgaaacaatcactgcatgctcttggaatgaatatgtgatctgcagtgatgtacctgtgcttattgagttttgggcctcctggtgtggaccttgcagaatggtcacacggattgtcgatgagatagcacaagaatattctgggagaataaaatgctacaagcttgacactgatgattacccacaggttgctacagcttacagcatcgagaggattccaactgttttactctttaaggatggagagaaaatacatagtattaccgggacactgccaaaggctgtttatgtgaaagccattgagaaatctatttcagaacaatga

SEQ ID NO: 91634 - protein, 188 aa, Zea mays
MAAVAALSCPAPPRGLRCAKTLPAPSAATSSRGRVGYGSSYARRWQCRRWAHRPDAATTRIRRATPRRTAVVRVNCAYSPRAETITACSWNEYVICSDVPVLIEFWASWCGPCRMVTRIVDEIAQEYSGRIKCYKLDTDDYPQVATAYSIERIPTVLLFKDGEKIHSITGTLPKAVYVKAIEKSISEQ

SEQ ID NO: 91635 - DNA, 384 bp, Zea mays; identical to SEQ ID NO: 22589
  CDS (1)..(384)

SEQ ID NO: 91636 - protein, 127 aa, Zea mays; identical to SEQ ID NO: 22590

SEQ ID NO: 91637 - DNA, 504 bp, Zea mays; identical to SEQ ID NO: 69980
  CDS (1)..(504)

SEQ ID NO: 91638 - protein, 167 aa, Zea mays; identical to SEQ ID NO: 69981

SEQ ID NO: 91639 - DNA, 363 bp, Zea mays; identical to SEQ ID NO: 69982
  CDS (1)..(363)

SEQ ID NO: 91640 - protein, 120 aa, Zea mays; identical to SEQ ID NO: 69983

SEQ ID NO: 91641 - DNA, 402 bp, Zea mays; identical to SEQ ID NO: 22593
  CDS (1)..(402)

SEQ ID NO: 91642 - protein, 133 aa, Zea mays; identical to SEQ ID NO: 22594

SEQ ID NO: 91643 - DNA, 543 bp, Zea mays; identical to SEQ ID NO: 69988
  CDS (1)..(543)

SEQ ID NO: 91644 - protein, 180 aa, Zea mays; identical to SEQ ID NO: 69989

SEQ ID NO: 91645 - DNA, 381 bp, Zea mays; identical to SEQ ID NO: 69990
  CDS (1)..(381)

SEQ ID NO: 91646 - protein, 126 aa, Zea mays; identical to SEQ ID NO: 69991

SEQ ID NO: 91647 - DNA, 534 bp, Zea mays
  CDS (1)..(534)
atggctcgccgactctgccgtctccctcgcctctttcccctcgtctcgtctgcatccgcctccgccgccccaagacctcatcacctccccttcgccgtgaaccctaaccccgcgcccctcgccccctccttctcgtcgtcatcgccgcccgcttttccgggcccccatcgcctcttctcttccacgagtggttcaagcatggtggtcgtgggctccgcggactccttcaacagcatcttttccaaggtgcaagatgaaaagctaccagctgtcttttactacacggcggtgtggtgtggaccatgtagggcgatcgcacctttagtatcaaagctgagcagccagtatcccaagataccggtgtacaaagttgacattgaattggaaggactgggaaacaaactccgtgatctaaacatatgttcagtgccgacgttccacttctatcacaaggggcagagaattagtgaaatcgtgggtgctgatgcaaagaaaattgaagctaccatggaaagtctccacaagcagcagtag

SEQ ID NO: 91648 - protein, 177 aa, Zea mays
MARRLCRLPRLFPLVSSASASAAPRPHHLPFAVNPNPAPLAPSFSSSSPPAFPGPHRLFSSTSGSSMVVVGSADSFNSIFSKVQDEKLPAVFYYTAVWCGPCRAIAPLVSKLSSQYPKIPVYKVDIELEGLGNKLRDLNICSVPTFHFYHKGQRISEIVGADAKKIEATMESLHKQQ

SEQ ID NO: 91649 - DNA, 369 bp, Zea mays; identical to SEQ ID NO: 22599
  CDS (1)..(369)

SEQ ID NO: 91650 - protein, 122 aa, Zea mays; identical to SEQ ID NO: 22600

SEQ ID NO: 91651 - DNA, 399 bp, Zea mays; identical to SEQ ID NO: 22601
  CDS (1)..(399)

SEQ ID NO: 91652 - protein, 132 aa, Zea mays; identical to SEQ ID NO: 22602

SEQ ID NO: 91653 - DNA, 387 bp, Zea mays; identical to SEQ ID NO: 22605
  CDS (1)..(387)

SEQ ID NO: 91654 - protein, 128 aa, Zea mays; identical to SEQ ID NO: 22606

SEQ ID NO: 91655 - DNA, 25 bp, Artificial sequence
  primer
atggttactcaattcaaaactgcca

SEQ ID NO: 91656 - DNA, 24 bp, Artificial sequence
  primer
ttaagcattagcagcaatggcttg

SEQ ID NO: 91657 - protein, 92 aa, Artificial sequence
  consensus sequence
  Variant (3)..(3): Xaa in position 3 is any amino acid
  Variant (5)..(5): Xaa in position 5 is any amino acid
  Variant (11)..(11): Xaa in position 11 is any amino acid
  Variant (12)..(14): Xaa in position 12 to 14 is any or no amino acid
  Variant (16)..(27): Xaa in position 16 to 27 is any amino acid
  Variant (28)..(34): Xaa in position 28 to 34 is any or no amino acid
  Variant (36)..(38): Xaa in position 36 to 38 is any amino acid
  Variant (40)..(50): Xaa in position 40 to 50 is any amino acid
  Variant (51)..(54): Xaa in position 51 to 54 is any or no amino acid
  Variant (57)..(60): Xaa in position 57 to 60 is any amino acid
  Variant (62)..(62): Xaa in position 62 is any amino acid
  Variant (64)..(68): Xaa in position 64 to 68 is any amino acid
  Variant (69)..(72): Xaa in position 69 to 72 is any or no amino acid
  Variant (74)..(78): Xaa in position 74 to 78 is any amino acid
  Variant (79)..(91): Xaa in position 79 to 91 is any or no amino acid
DFXAXWCGPCXXXXPXXXXXXXXXXXXXXXXXXXKXXXDXXXXXXXXXXXXXXXPTXXXXKXGXXXXXXXXXGXXXXXXXXXXXXXXXXXXL

SEQ ID NO: 91658 - protein, 14 aa, Artificial sequence
  protein pattern
  Variant (2)..(2): Xaa in position 2 is any or no amino acid
  Variant (4)..(4): Xaa in position 4 is any amino acid
  Variant (7)..(7): Xaa in position 7 is Ala, Gly or Pro
  Variant (10)..(13): Xaa in position 10 to 13 is any amino acid
FXAXWCXPCXXXXP

SEQ ID NO: 91659 - DNA, 1152 bp, Saccharomyces cerevisiae
  CDS (1)..(1152)
atgagtgaaacagaattgagaaaaagacaggcccaattcactagggagttacatggtgatgatattggtaaaaagacaggtttgagtgcattgatgtcgaagaacaactctgcccaaaaggaagccgttcagaagtacttgagaaattgggatggtagaaccgataaagatgccgaagaacgtcgtcttgaggattataatgaagccacacattcctactataacgtcgttacagatttctatgaatatggttggggttcctctttccatttcagcagattttataaaggtgagagtttcgctgcctcgatagcaagacatgaacattatttagcttacaaggctggtattcaaagaggcgatttagttctcgacgttggttgtggtgttgggggcccagcaagagagattgcaagatttaccggttgtaacgtcatcggtctaaacaataacgattaccaaattgccaaggcaaaatattacgctaaaaaatacaatttgagtgaccaaatggactttgtaaagggtgatttcatgaaaatggatttcgaagaaaacactttcgacaaagtttatgcaattgaggccacatgtcacgctccaaaattagaaggtgtatacagcgaaatctacaaggttttgaaaccgggtggtacctttgctgtttacgaatgggtaatgactgataaatatgacgaaaacaatcctgaacatagaaagatcgcttatgaaattgaactaggtgatggtatcccaaagatgttccatgtcgacgtggctaggaaagcattgaagaactgtggtttcgaagtcctcgttagcgaagacctggcggacaatgatgatgaaatcccttggtattacccattaactggtgagtggaagtacgttcaaaacttagctaatttggccacatttttcagaacttcttacttgggtagacaatttactacagcaatggttactgtaatggaaaaattaggtctagccccagaaggttccaaggaagttactgctgctctagaaaatgctgcggttggtttagttgccggtggtaagtccaagttattcactccaatgatgcttttcgtcgctaggaagccagaaaacgccgaaaccccctcccaaacttcccaagaagcaactcaataa

SEQ ID NO: 91660 - protein, 383 aa, Saccharomyces cerevisiae
MSETELRKRQAQFTRELHGDDIGKKTGLSALMSKNNSAQKEAVQKYLRNWDGRTDKDAEERRLEDYNEATHSYYNVVTDFYEYGWGSSFHFSRFYKGESFAASIARHEHYLAYKAGIQRGDLVLDVGCGVGGPAREIARFTGCNVIGLNNNDYQIAKAKYYAKKYNLSDQMDFVKGDFMKMDFEENTFDKVYAIEATCHAPKLEGVYSEIYKVLKPGGTFAVYEWVMTDKYDENNPEHRKIAYEIELGDGIPKMFHVDVARKALKNCGFEVLVSEDLADNDDEIPWYYPLTGEWKYVQNLANLATFFRTSYLGRQFTTAMVTVMEKLGLAPEGSKEVTAALENAAVGLVAGGKSKLFTPMMLFVARKPENAETPSQTSQEATQ

SEQ ID NO: 91661 - DNA, 1393 bp, Glycine max
  CDS (92)..(1177)
aaagtccccgacttcgtcgacaccttctacaatctagtcacagacatctacgagtgggggtggggccagtccttccacttccaaagtcacaatggaccccctctctctcttctgcaccggagccctcctcgccggcggcctctactggttcgtgtgcgttctgggccccgccgagcagaagggcaaacgcgccaccgatctttccggcggctccatctccgccgagaaagtccaagacaactacaaacagtactggtccttcttccgccgcccaaaggagatcgagaccgccgacaaagtccccgacttcgtcgacaccttctacaatctagtcacagacatctacgagtgggggtggggccagtccttccacttctccccctccatccccggcaagtcccaccgcgacgccacgcgcctccacgaggagatggccgtcgatctcatcgaggccaagcccggcaacagaatcctggatgtgggctgtggcgtgggcggtcccatgcgggccatcgcggcccactcgcgggccaacgtagtcggcatcaccatcaacgagtaccaggtcaaccgcgcaaggatgcacaacaagaaggcagggttggagtccctctgcgaggtcgtgtgcgggaattttctcaagatgcccttccccgacaacagcttcgacggcgcgtactccatcgaggccacgtgtcacgcgccgaagctggaggaagtgtacgccgaaatcttccgtgttctgaaaccgggggcgctctatgtttcctacgagtgggtgacgacggataagtaccgaggcgatgaccctgaacacgtggaggtcattcaggggattgagaggggggacgcgttgcctggccttagaaactacaccgacatagccgagacggcgcgtaaggtagggtttgctgttgtgaaggagcgggatctggctaagccgccggctcagccatggtggagccgattgaagatgggtaggatcgcctactggcggaaccatattgtggtcactgttctcgccgctttgggaatcgcgcccaaggggaccgtcgatgttcatgagatgctcttcaagaccgctgactatttgaccagagggggtgactctggcattttctcgccgatgcacatgatcctctgcagaaagccccatgacaaggacgaccataactgagcgtttcattgggaaattccaaaactataacaaccaccaccttgtttctttccggtactctcttttttttttttcataattattattatcttgggtttaacttattgttattagttattattattactatgaacttggtgtaatttggattttgatcttttcaattttatttttaattttgctatgttgatcatttaaaaaaaaaaaatagggcgg

SEQ ID NO: 91662 - protein, 361 aa, Glycine max
MDPLSLFCTGALLAGGLYWFVCVLGPAEQKGKRATDLSGGSISAEKVQDNYKQYWSFFRRPKEIETADKVPDFVDTFYNLVTDIYEWGWGQSFHFSPSIPGKSHRDATRLHEEMAVDLIEAKPGNRILDVGCGVGGPMRAIAAHSRANVVGITINEYQVNRARMHNKKAGLESLCEVVCGNFLKMPFPDNSFDGAYSIEATCHAPKLEEVYAEIFRVLKPGALYVSYEWVTTDKYRGDDPEHVEVIQGIERGDALPGLRNYTDIAETARKVGFAVVKERDLAKPPAQPWWSRLKMGRIAYWRNHIVVTVLAALGIAPKGTVDVHEMLFKTADYLTRGGDSGIFSPMHMILCRKPHDKDDHN

SEQ ID NO: 91663 - DNA, 1041 bp, Nicotiana tabacum
  CDS (1)..(1041)
atgtcaaaacaaggggcttttgatctggcatctggggttggtggcaaaattaacaaggaggaagttctctctgctgttgacaagtatgagaagtaccatggttattatggaggtgaagaagaagagagaaagaataactatactgacatggttaacaaatactatgatctttgcactagcttctacgaatacggctggggagagtcattccattttgcacccaggtggaaaggagaatcactccaagagagcattaaaaggcatgagcactttcttgccttgcaactgggattgaaaccaggacaaaaggtcttggacgtaggatgtggaattggtgggccgttaagagaaattgctcgattcagctctacatcagttacaggcctcaacaataatgaatatcagatatctaggggacaggtgttgaaccgcaaagtaggattggatcagacttgcaactttgtaaagggtgatttcatgaaaatgccattccctgacaatagctttgatgcagtgtacgcaatagaagctacctgccatgcaccagatccagttggatgctataaagagatttaccgggtgctgaagcctggtcaatgtttcgctgtgtatgagtggtgcatgaccgattcttacaaccccaataacgaagagcacaacaggatcaaggccgaaattgagctcggaaatggcctccctgaggttagattgacaacacagtgcctcgaagcagccaaacaagctggttttgaagttgtatgggacaaggatctggctgatgactcacctgttccatggtacttgcctttggatacgagtcacttctcgctcagtagcttccgcctaacagcagttggcagacttttcaccagaaatctggtttcggcgcttgaatacgtgggacttgctcctaaaggtagtcaaagggttcaagctttcttagagaaagctgcagaaggtcttgtcggtggtgccaagaaagggattttcacaccaatgtacttcttcgtggttcgcaagcccatttcagactctcagtaa

SEQ ID NO: 91664 - protein, 346 aa, Nicotiana tabacum
MSKQGAFDLASGVGGKINKEEVLSAVDKYEKYHGYYGGEEEERKNNYTDMVNKYYDLCTSFYEYGWGESFHFAPRWKGESLQESIKRHEHFLALQLGLKPGQKVLDVGCGIGGPLREIARFSSTSVTGLNNNEYQISRGQVLNRKVGLDQTCNFVKGDFMKMPFPDNSFDAVYAIEATCHAPDPVGCYKEIYRVLKPGQCFAVYEWCMTDSYNPNNEEHNRIKAEIELGNGLPEVRLTTQCLEAAKQAGFEVVWDKDLADDSPVPWYLPLDTSHFSLSSFRLTAVGRLFTRNLVSALEYVGLAPKGSQRVQAFLEKAAEGLVGGAKKGIFTPMYFFVVRKPISDSQ

SEQ ID NO: 91665 - DNA, 1497 bp, Zea mays
  CDS (66)..(1100)
  misc_feature (1419)..(1419): n is a, g, c or t
agactctggttctgacatgcagcaattattgcaggtgcatttgatccgtcccggccgcctacacgatgtccaagtcgggagcgctggatcttgcttctggcctcggagggaagatcaacaaggtggaagtcaagtcggccgtcgatgagtatgagaaatatcatggatactatggagggaaggaggaagcaaggaagtccaactatactgatatggttaataaatactatgatcttgccactagcttctatgagtatggttggggtgaatccttccactttgctcacagatggaatggagaatccttacgtgaaagcatcaagcgacatgagcattttcttgccctgcaacttggtttgaaaccaggaatgaaggttttagatgtgggctgtggaataggtggaccactgagagaaattgcaagatttagctcaacttcagttaccggattgaataaccacgaataccagataaccaggggaaaggagctcaaccgtttagcaggaattagtggaacatgtgattttgtcaaggcggacttcatgaagatgccgttcgatgacacacttttggatgctgtttacgccattgaggcaacatgtcatgcacctgatccagttggttgctacaaggagatatatcgtgtgttgaagcctggccagtgctttgccgtgtacgagtggtgcgttacggatcactatgatcctaacaatgcaacccacaaaaggatcaaggatgaaattgagcttggcaatggcctgccagatatcagaagcactccgcaatgtctccgggctctaaaagacgccgggtttgacgttgtttgggataaggatcttgctgaagattctcccttgccttggtacttgcccttggactccagccgatgctcactgagtagcttccgtcgacctcctgtcgggacgcatgatacccgcacaatggtcaaggccctggagtacgttggtcttgctccgcagggcagtgagaggtctctagttttcctggagaaggctgcagaagggctggtagagggcggaaagaaggagatcttcacgccaatgtacttcttttttgttcggaagcctcttctggaatgagctcttggatcaccttttcagagagagaaggcaagtggtcatttcgaagaagccgaggagagggaacctggaatcaagaaaaccttcagctctcctgtgtaggaggaaagttaacgaacagtgtagtaactgttcagctctgtgtttattcagttgttttgctgcttgaggttattcgtttctaggtgggggttggaatccttttcgccataaacctctcagtggcataaataagatggtttgcataagagtacttcatggataccgtaagggctactactgaaagagaaatgtttaagcagcatggtatgtgagcaantagtgataattattccatccttttttttaatataaagcaggagttttgtcaaaaaaaaaaaaaaaaaaaaaaaaaaaa

SEQ ID NO: 91666 - protein, 344 aa, Zea mays
MSKSGALDLASGLGGKINKVEVKSAVDEYEKYHGYYGGKEEARKSNYTDMVNKYYDLATSFYEYGWGESFHFAHRWNGESLRESIKRHEHFLALQLGLKPGMKVLDVGCGIGGPLREIARFSSTSVTGLNNHEYQITRGKELNRLAGISGTCDFVKADFMKMPFDDTLLDAVYAIEATCHAPDPVGCYKEIYRVLKPGQCFAVYEWCVTDHYDPNNATHKRIKDEIELGNGLPDIRSTPQCLRALKDAGFDVVWDKDLAEDSPLPWYLPLDSSRCSLSSFRRPPVGTHDTRTMVKALEYVGLAPQGSERSLVFLEKAAEGLVEGGKKEIFTPMYFFFVRKPLLE

SEQ ID NO: 91667 - DNA, 1283 bp, Zea mays
  CDS (69)..(1139)
atctatttatgacttctctcaaccagcaataacgaaaacgtctctcctctctatctctctttaaaaaaatggacggcgtagcattcttcttcaccggagctctcgtagccggcggaatctactggttcctgtgcgtcctgggaccagcggagcgaaaaggaaaacgagcgttggatctatcgggggggtccatctcggccgagaaagttcaagacaagtacaaacagtactggtcgttcttccgccgtccgaaagagatcgaaaccgccgagaaagtcccggacttcgtcgacacgttctacaacctcgtcaccgacatctacgagtggggatggggacagtccttccacttctctccttccatccgaggcaaatcccaccgcgacgccacgcgcctccacgaagagatggccgtagatctgatccaagtgaaaccgggtcaaaagatcctcgatgtcggatgcggcgtcggaggtccgatgcgcgcgattgcatcccactcgcgagccaacgtggtggggatcacgatcaacgagtaccaggtgaagagagcgcgtgaccacaacagaaaagcaggactcgacgcgctctgcgaggtcgtgtgtggtaacttcctccagatacccttcgatgataacaccttcgacggcgcgtactctatcgaagcgacgtgtcacgcgccgaagctggaagaagtctacgccgagatctacagggtgttgaaacccggatctttgtacgtatcgtacgagtgggtcaccactgataagttcaacgccgaggatgaggaacacgtggaggtcatccaaggcatcgagaggggtgacgcgcttcctgggcttagggcttactcggatatagccgaggccgccaagaaagttggcttccaagttgtcaaggagaaggatctagcggctccaccggctgagccgtggtggactaggcttaagatgggtcggctcgcttattggaggaaccacattgtggttcagattctgtctgctgttggagttgcgcctaagggaaccgtcgatgttcacgagatgttgtttaagactgctgatttcttgtccagaggaggcgaaactgaaattttctctccgatgcatatgattctctgccggaaacctatgtcttaaacgataatcatttcccgatctcagtttgtttttaattttttttcttatggatttttgattttgcctggtcagtcaatgtactcctttagattttaattttaatttggtattactgttttttcttgcctaaaaaaaaaaaaaaaa

SEQ ID NO: 91668 - protein, 356 aa, Zea mays
MDGVAFFFTGALVAGGIYWFLCVLGPAERKGKRALDLSGGSISAEKVQDKYKQYWSFFRRPKEIETAEKVPDFVDTFYNLVTDIYEWGWGQSFHFSPSIRGKSHRDATRLHEEMAVDLIQVKPGQKILDVGCGVGGPMRAIASHSRANVVGITINEYQVKRARDHNRKAGLDALCEVVCGNFLQIPFDDNTFDGAYSIEATCHAPKLEEVYAEIYRVLKPGSLYVSYEWVTTDKFNAEDEEHVEVIQGIERGDALPGLRAYSDIAEAAKKVGFQVVKEKDLAAPPAEPWWTRLKMGRLAYWRNHIVVQILSAVGVAPKGTVDVHEMLFKTADFLSRGGETEIFSPMHMILCRKPMS

SEQ ID NO: 91669 - DNA, 1173 bp, Magnaporthe grisea 70-15
  CDS (1)..(1173)
atgtccaaacaacaacacccttcgtccaagactcaaattacccgccgcagagacaccgcagacatgacattcgaacaagtcctgcacaagggcagttcggccaatatgggcggacttagctccatgctgggcaaggaccgcgaggcttccaaaacggctgttgatcaatatttccggcattgggatggtaaaacggcaaaaaccgagaccaccaaagtacgcgaggagagaaaggccgactatgccacattaacgagacagtattacaacctagtgaccgacttttacgaatacggatggggacaatctttccatttctgcacctttgcccccggagaaacttttgcctcggccattacacgatacgaacacaccctcgcgcaccgcatcggtatcaaaaagggcatgaaggttttggatatcggatgcggtgtcggcggacctgcgcggcaaatcgcaaagtttaccggcgccaatattacgggcattacaatcaacgagtaccaggttgaacgcgccaggcggtatgccgagatggaaggttacggggcgggcgagcaattgaaatttgtgcagggagatttcatggcgctgccgttcgaaaaagaaaccttcgacgccgtgtactcgatcgaggccactgtgcacgcgccaaaattggaggacgtttacaagcagattttcaacgtcctcaagcccggcggcatctttgggctgtacgaatgggtcatgacggacgcctacgacgaaaacgacccccaccacaaggagatccgtttcggcatcgagcacggtggaggcatcgccaatctgcaaacggcgcaaacggccatcgcggccatcaaggcggccggctttgagctcctcgagtctgaggacctggccgacaactcggaccgcgcgccttggtactggccgctgggaggaaacgcctggcagtacgcgagcacctttggcgacatcttgtcgacgtttacaatgacccctgccgggcgtgcgattgcgcacaccgtcttgggagtcgtggaatccatcggcctggtaccccccggaaccaaaaagacggccgacagcttgtcgacgacggcggctgcgctggtcgcgggaggaaaggaggggctgttcacgcccatgtttttgatggtggcaaggaagccggttgcgaaagaatga

SEQ ID NO: 91670 - protein, 390 aa, Magnaporthe grisea 70-15
MSKQQHPSSKTQITRRRDTADMTFEQVLHKGSSANMGGLSSMLGKDREASKTAVDQYFRHWDGKTAKTETTKVREERKADYATLTRQYYNLVTDFYEYGWGQSFHFCTFAPGETFASAITRYEHTLAHRIGIKKGMKVLDIGCGVGGPARQIAKFTGANITGITINEYQVERARRYAEMEGYGAGEQLKFVQGDFMALPFEKETFDAVYSIEATVHAPKLEDVYKQIFNVLKPGGIFGLYEWVMTDAYDENDPHHKEIRFGIEHGGGIANLQTAQTAIAAIKAAGFELLESEDLADNSDRAPWYWPLGGNAWQYASTFGDILSTFTMTPAGRAIAHTVLGVVESIGLVPPGTKKTADSLSTTAAALVAGGKEGLFTPMFLMVARKPVAKE

SEQ ID NO: 91671 - DNA, 1143 bp, Magnaporthe grisea 70-15
  CDS (1)..(1143)
atgggcgctcctaagcaaggactcgagaaggaggacaagaagcgtgatgccgagttcaacaaggcactccacggccagtctgctttggctgctggtggtatcgctgccatgttctccaaggacaaggaagccaagaagcttgctgtagatgaatacttcaagcactttgacaacaagactgctgcaaacgagactcctgaggagcgtgctgccaggcaaaaggagtacgccaccctgacgaggcactactacaaccttgcaacggacatctacgagtacggctggggccagtccttccacttctgtcgcttttcgcacaacgagtcgttctaccaggccattgcccgccatgagcactacctggcgcaccagattggtatcaaggagggcatgactgttctcgatgtcggctgcggtgttggtggaccggcccgcgagatcgccaagttcaccggttgcaacgtcgtcggtctgaacaacaacgactaccaaatcgaccgcgctacacactatgctaagcaggagaagcttgacagccagctccagttcgtcaagggtgacttcatgcaaatgtccttccccgacgagtcgtttgatgcagtctacgccatcgaggccacagtgcacgcccccaagctggagggtgtctacagcgagatcttccgcgtgctcaagcctggtggcaccttcggtgtgtacgagtggcttatgactgatgattatgataacgacaaccttcaccaccgcgacattcgcctcaagattgagcttggcaacggtatttccaacatggttcccatcagcgaaggtgaggctgccatgagggcggccggcttcgagatcatcaagaccgacgacctcgcacaaaagggagatgagctgccctggtactggcctttggctggtgatctcaagtacctccagtcctactttgatctgttcacagtgctgcgcatgaccaagtgggccaggacttgcctgcacggtatggcaggtgtgcttgaggctgtcggtgttgctcccgctggcaccaagaagaccgccgacgcactggcaactggcggtgatgctcttgtcgctggtgccaaggagaacatcttcacccccatgtacctgatggtcggacgcaagcccatgaactga

SEQ ID NO: 91672 - protein, 380 aa, Magnaporthe grisea 70-15
MGAPKQGLEKEDKKRDAEFNKALHGQSALAAGGIAAMFSKDKEAKKLAVDEYFKHFDNKTAANETPEERAARQKEYATLTRHYYNLATDIYEYGWGQSFHFCRFSHNESFYQAIARHEHYLAHQIGIKEGMTVLDVGCGVGGPAREIAKFTGCNVVGLNNNDYQIDRATHYAKQEKLDSQLQFVKGDFMQMSFPDESFDAVYAIEATVHAPKLEGVYSEIFRVLKPGGTFGVYEWLMTDDYDNDNLHHRDIRLKIELGNGISNMVPISEGEAAMRAAGFEIIKTDDLAQKGDELPWYWPLAGDLKYLQSYFDLFTVLRMTKWARTCLHGMAGVLEAVGVAPAGTKKTADALATGGDALVAGAKENIFTPMYLMVGRKPMN

SEQ ID NO: 91673 - DNA, 1146 bp, Gibberella zeae PH-1
  CDS (1)..(1146)
atggttgcctcatcgaacaccggcctcgagcgcgaggatcaccagcgcgatgccgacttcaacaaggccatgcacggctcctcagcccaggctcgaggtggtgttgctgccatgttccgcaagggcggtgctgctaagcaggctgctgttgatgagtacttcaagcactgggataacaagcccgcagagaacgagactcctgaggagcgagctgcccgtcaagccgagtatgctactttgacccgacactactacaaccttgctaccgatctctacgaatacggatggggccagtccttccacttctgccgattctcccaaggcgagcccttttaccaggccattgcccgtcatgagcactaccttgcccaccagatcggtatcaaggacggcatgaaggttcttgatgtcggttgcggtgtgggtggtcccgcccgtgagatcgccaagttcacaggtgctcatattaccggcctgaacaacaacaactaccagatcgagcgagctacccactacgccttcaaggagggtctgtccaaccagcttgagtttgtcaagggtgatttcatgcaaatgtctttccccgacaacagcttcgatgccgtttatgccattgaggccaccgttcacgctcccactctcaagggcatctacagcgagattttccgtgttcttaagcccggtggtgtcttcggtgtgtacgagtggctcatgactgacgagtacgacaacgacaacctccgccaccgtgagattcgattgggtatcgaacagggtgatggtatttccaacatgtgcaaggtctctgagggtatcgctgccatccacgactctggcttcgaaatgctccaccacgaggatcttgcggatcgccccgacgcccttccctggtactggcctctggctggtgagctccgctacgtccagactgtcggtgacttcttcaccattgtgcgcatgaccacttggggtcgaaccatcgcccacggtctggctggtctcctcgagaccttcaagcttgcccctgccggaaccaagaagactgctgacagcttggctcttgctgccgactgtctggtcgctggtggccgggacaagctcttcacccccatgtacctcatggtggctcgcaagcctgctgcgtaa

SEQ ID NO: 91674 - protein, 381 aa, Gibberella zeae PH-1
MVASSNTGLEREDHQRDADFNKAMHGSSAQARGGVAAMFRKGGAAKQAAVDEYFKHWDNKPAENETPEERAARQAEYATLTRHYYNLATDLYEYGWGQSFHFCRFSQGEPFYQAIARHEHYLAHQIGIKDGMKVLDVGCGVGGPAREIAKFTGAHITGLNNNNYQIERATHYAFKEGLSNQLEFVKGDFMQMSFPDNSFDAVYAIEATVHAPTLKGIYSEIFRVLKPGGVFGVYEWLMTDEYDNDNLRHREIRLGIEQGDGISNMCKVSEGIAAIHDSGFEMLHHEDLADRPDALPWYWPLAGELRYVQTVGDFFTIVRMTTWGRTIAHGLAGLLETFKLAPAGTKKTADSLALAADCLVAGGRDKLFTPMYLMVARKPAA

SEQ ID NO: 91675 - DNA, 1143 bp, Gibberella zeae PH-1
  CDS (1)..(1143)
atgccaaccaccgaactcatctcctacgacgaggcccagaactcagcattcgacaatgtcctccatggaaaatcaaaagaatcaagaggtggcatgcgagccatgatgaacaaagacaataaagctcatgctgccgctgttgatgagtactttcagttctttgataataaaaaggccgaggatgaagtagaggctgtccgacaggagagaaccgacaactatgccagtttgacaagacaatactacaaccttgccacagatctctacgagtacggatggtcccagagttttcatttctgtcgctttgcgtatggagaatcctttgaccgtgctatcgctcgacacgaacactacctcgctcacaacatcggcatcaaacctggtatgaaggtcctcgacgttggatgtggtgttggtggaccagcccgagagattgtcaagtttacgggggctcacgtaactggtctgaatatcaacgagtatcaggtcgggcgtgcaggtatctatgccgagaaggaaggactttctgataaactcaagtttgttcagggcgatttcatgaaaatgccctttcccgataactcattcgacgccgtctatgccatcgaagcaaccgttcacgcaccctccttagaaggcgtctacagcgagatccgacgtgtcctgaaaccaggcggcatcttcggtgtctacgagtggctcatgactgatatatatgacaacgatgacctcgaacaacgtcgtatccgtctcgatatcgaattaggcgatggcatcgcacagatgttcaagattgatcatgggttatcagctatcaaagcggcgggttttgagctgctccatcacgaggacctcgcagctacagatgacgggacagccccgtggtattggccgttggatagtgacatgcgatatgcacagaatctaagtgatctgttgacggtattcaggatgaacaaatgggggagactggttatgcataatttgattggagtattggaggcttgctcgattgcgccgaaaggaacaagaaagacggctgatggattggccaagggagcagatgctctggttgagggtggtaagaggaaattgtttacgcctatgtatttgatggttgggaagaagcctgaaaaaatctga

SEQ ID NO: 91676 - protein, 380 aa, Gibberella zeae PH-1
MPTTELISYDEAQNSAFDNVLHGKSKESRGGMRAMMNKDNKAHAAAVDEYFQFFDNKKAEDEVEAVRQERTDNYASLTRQYYNLATDLYEYGWSQSFHFCRFAYGESFDRAIARHEHYLAHNIGIKPGMKVLDVGCGVGGPAREIVKFTGAHVTGLNINEYQVGRAGIYAEKEGLSDKLKFVQGDFMKMPFPDNSFDAVYAIEATVHAPSLEGVYSEIRRVLKPGGIFGVYEWLMTDIYDNDDLEQRRIRLDIELGDGIAQMFKIDHGLSAIKAAGFELLHHEDLAATDDGTAPWYWPLDSDMRYAQNLSDLLTVFRMNKWGRLVMHNLIGVLEACSIAPKGTRKTADGLAKGADALVEGGKRKLFTPMYLMVGKKPEKI

SEQ ID NO: 91677 - DNA, 1134 bp, Aspergillus nidulans FGSC A4
  CDS (1)..(1134)
atggctcccactgctttagagaaggagaaccaccagcgcgatgctgagttcaacgctgccatgcacggaaactctgctcaggctaaaggaggtttcgctgccatgcgccagaagagcgctgccgctcagaaggccgccgttgacgagtacttcaagcactgggacaacaagtctgctgagactgaaacagaagagattcgtgaggctcgtcgcgccgagtatgccacgttgacccgacattactacaaccttgctaccgatctctacgaatacggatggggtacatcattccacttctgccgctttgcgtacggagagcccttctaccaggccatcgctcgccacgaacactacctcgctcaccagatgggcatcaaacctggcatgaaggtgctcgatgttggttgtggtgtcggcggtcccgcccgcgagattgtcaagttcactgacgcccatgttactggtctgaacaacaacgactaccagatccagcgtgcgactcgctatgctgaacgtgagggactgagccacaagttgaacttcgtcaagggtgatttcatgcagatgcagttccctgacaactcattcgacgctgtttatgccattgaggctactgtccacgctcctgaacttgccggtgtctacaaggagatcatgcgagttctcaagcctggcggtgtctttggtgtttacgagtggctcatgactgacgcttacgacaatgacaaccccgagcaccgcaagatccgtctcggtatcgagcagggtgacggtatctccaacatggtcaaggtgtccgaaggtctggctgccatcaaggaggccggccttgagcttttgcaccacgaggatctggctgaccgaccagatgagattccgtggtactaccctcttgcaggttccttcaagcatatgacttcgccatgggatttcttcactattgctcggatgacatggtggggacgtggcttggtccaccgctttgtcggcgccatggagaccattaagctcattccccagggaacacagaagaccgccgatagcctggcgttggcggcggactgccttgtcgccggtggtgagaagaagctcttcactccgatgtacctgatggttgcacgcaagcctgagtaa

SEQ ID NO: 91678 - protein, 377 aa, Aspergillus nidulans FGSC A4
MAPTALEKENHQRDAEFNAAMHGNSAQAKGGFAAMRQKSAAAQKAAVDEYFKHWDNKSAETETEEIREARRAEYATLTRHYYNLATDLYEYGWGTSFHFCRFAYGEPFYQAIARHEHYLAHQMGIKPGMKVLDVGCGVGGPAREIVKFTDAHVTGLNNNDYQIQRATRYAEREGLSHKLNFVKGDFMQMQFPDNSFDAVYAIEATVHAPELAGVYKEIMRVLKPGGVFGVYEWLMTDAYDNDNPEHRKIRLGIEQGDGISNMVKVSEGLAAIKEAGLELLHHEDLADRPDEIPWYYPLAGSFKHMTSPWDFFTIARMTWWGRGLVHRFVGAMETIKLIPQGTQKTADSLALAADCLVAGGEKKLFTPMYLMVARKPE

SEQ ID NO: 91679 - DNA, 1044 bp, Ustilago maydis 521
  CDS (1)..(1044)
atggcgcctactgctaccgacgtccgcaacaacgaaggcatcgccaactacaccaagttctggcaaaaggactctaaggatgactctgctaccgacatggccaatcgtctctccgagtacacctcggtcgtgaacggctactacgatggcgccaccgatctctacgagtacggttggggtcagaacttccactttgctcgctactaccccggtgaggccttcatgcaggccatcgcgcgccacgagcactacctcgctcaccagatgggcctcaagcccaagatgcgtgttctcgacgttggttgtggtgttggcggacccgctcgcgagattgctcgtttcgccgatgtcaacattgttggtctcaacaacaacgagtaccagatccaacgtgctcgcaaatacacggaaaaggctggcctttccgctcaagtcgaatttgtcaagggcgactttatgaagctttctgagcagttcggcgagaacagattcgacgccttctacgctatcgaggccacctgccatgcacccaactttgaaggcatttacggagagatcctaaaggttctcaaacctggaggaatcttcggcgtttacgaatggtgcatgaccgacgcttgggaccccaccaaccctgagcacaagcgaatcgctcacggtatcgaggtcggtgacggtatccccgagatgcgatcaatccagaatgcccgaaatgcgctcaagtctgtcggcttccagatccagcacgaggaggaccttgctgaccgcggagacaagatcccctggtactaccctattgctggcagcttgagccattgccaaaccgtatgggactacttcaccgttgctcgtatgaccaagattggacgagccacaacccagggtgctgtcaagttgctcgagactcttcgtctcgtgcctcagggcacccactcggtcggtgcctcgctcgttaccgctgccgatgctctcgtcgacggtggtcgtaccaagctctttaccccaatgatgctgttcgtctgccgcaagccgtcgtcaaactaa

SEQ ID NO: 91680 - protein, 347 aa, Ustilago maydis 521
MAPTATDVRNNEGIANYTKFWQKDSKDDSATDMANRLSEYTSVVNGYYDGATDLYEYGWGQNFHFARYYPGEAFMQAIARHEHYLAHQMGLKPKMRVLDVGCGVGGPAREIARFADVNIVGLNNNEYQIQRARKYTEKAGLSAQVEFVKGDFMKLSEQFGENRFDAFYAIEATCHAPNFEGIYGEILKVLKPGGIFGVYEWCMTDAWDPTNPEHKRIAHGIEVGDGIPEMRSIQNARNALKSVGFQIQHEEDLADRGDKIPWYYPIAGSLSHCQTVWDYFTVARMTKIGRATTQGAVKLLETLRLVPQGTHSVGASLVTAADALVDGGRTKLFTPMMLFVCRKPSSN

SEQ ID NO: 91681 - DNA, 1032 bp, Cryptococcus neoformans var. neoformans B-3501A
  CDS (1)..(1032)
atgcccgccgaaacccgttctgccgaccgagtgtccaactataacaagttctgggagaaaaagtctgccaacgacaacgacactcacagagctaacagattggaccagtacaccgaagtcgtcaacggttattatgacggtgctaccgagctctatgagtatggttgggccgagtctttccatttctgccgtttctacaagggtgaagcttttcttcaggctcttgcccgtcacgagcactacctcgcctctatgatgcagctgaaacccggcatgcgtgtcctcgatgttggatgtggtgttggtggccccgctcgtgaaattgcccgtttctctgatgccactatcgtcggtgtcaataacaatgacttccaaatcggtagggctactgccaagtcaaagaaggccggtctcagcgacaaggtttccttcgtcaaaggagactttatgaagctcagtgaacagtttggagagaactcttttgatgctatctacgccattgaggccacctgccacgcccctaattttgagggcatctacggcgaaattttcaagtgtttgaaacctggtggtgtgtttggtgtgtacgaatggtgcatgactgatgcttgggatccctccaaccctgagcacaaggaaatcgctcatggaatcgaggttggagacggtattcccgagatgcgaaacttggccgccgctcgcagcgctcttaaaactgttggtttcgagattgagcacgaagaggatctggccgaccgagatgatgccgtgccctggtattaccctcttgaaggtgacatctggaaggctcagaccacctgggatatgttcacctgctggagaaccagcaagatgggctacacaatcacccagaacgctgtgtggttccttgagaagtttggtctcgtgcccaagggcacttatagcgttggccaaagtttgatcgtcgcctccaaggctctcgtcgccggtggcaggaccaagttgttcactcctatggctttatgggttgctcgaaagcctgccaactag

SEQ ID NO: 91682 - protein, 343 aa, Cryptococcus neoformans var. neoformans B-3501A
MPAETRSADRVSNYNKFWEKKSANDNDTHRANRLDQYTEVVNGYYDGATELYEYGWAESFHFCRFYKGEAFLQALARHEHYLASMMQLKPGMRVLDVGCGVGGPAREIARFSDATIVGVNNNDFQIGRATAKSKKAGLSDKVSFVKGDFMKLSEQFGENSFDAIYAIEATCHAPNFEGIYGEIFKCLKPGGVFGVYEWCMTDAWDPSNPEHKEIAHGIEVGDGIPEMRNLAAARSALKTVGFEIEHEEDLADRDDAVPWYYPLEGDIWKAQTTWDMFTCWRTSKMGYTITQNAVWFLEKFGLVPKGTYSVGQSLIVASKALVAGGRTKLFTPMALWVARKPAN

SEQ ID NO: 91683 - DNA, 1089 bp, Oryza sativa subsp
  CDS (1)..(1089)
atgtcgaggtctggggccatggatcttgcatctggactcggggggaagatcaccaaggatgaggtcaagtcggctgtcgatgagtatgagaaataccatggatactatggaggaaaagaagaagcaagaaagtccaactacacagacatggttaataaatactatgatcttgccaccagcttctatgagtatggttggggtgaatccttccactttgctcacagatggaatggagaatccctacgtgaaagcattaagcgacatgagcactttcttgcccttcagcttggagtgaaaccaggaatgaaggttttggacgtcggttgtggaataggcggaccactaagagaaattgccaaatttagcttggcttcagtcactggattgaacaacaatgagtaccagataactaggggaaaggagcttaatcgggtagcaggagttagtggaacttgcgactttgtgaaggcagacttcatgaagatgccgttttctgataacacttttgatgctgtctatgccattgaggcaacatgccacgcacctgatccggttggctgctataaggagatctatcgtgtattgaagcctggccagtgttttgctgtgtatgagtggtgtattactgatcactatgaaccgaacaatgcaacacacaagaggatcaaggatgaaatcgagcttggcaatggcctgccagatatccgaagcactcaacaatgtcttcaagctgcaaaagatgctgggtttgaggttatttgggataaagaccttgctgaagattccccggttccttggtacctgcccttggatccaagccggttttccttgagtagcttccgtctgactactgtggggcgtgcaattactcgcacaatggtgaaggcattggaatacgtcggccttgccccacaaggaagtgaaagggtatctaactttttagagaaggcagctgaaggtctcgtcgaaggtggcaaagataaggcgaggagtttgaaagaaacattatggcggtcaaagaaacacctgatgaagctcagaagcttgaagagttcttatgcgtacgaagagatgctgaaatgtgtttaa

SEQ ID NO: 91684 - protein, 362 aa, Oryza sativa subsp
MSRSGAMDLASGLGGKITKDEVKSAVDEYEKYHGYYGGKEEARKSNYTDMVNKYYDLATSFYEYGWGESFHFAHRWNGESLRESIKRHEHFLALQLGVKPGMKVLDVGCGIGGPLREIAKFSLASVTGLNNNEYQITRGKELNRVAGVSGTCDFVKADFMKMPFSDNTFDAVYAIEATCHAPDPVGCYKEIYRVLKPGQCFAVYEWCITDHYEPNNATHKRIKDEIELGNGLPDIRSTQQCLQAAKDAGFEVIWDKDLAEDSPVPWYLPLDPSRFSLSSFRLTTVGRAITRTMVKALEYVGLAPQGSERVSNFLEKAAEGLVEGGKDKARSLKETLWRSKKHLMKLRSLKSSYAYEEMLKCV

SEQ ID NO: 91685 - DNA, 1077 bp, Oryza sativa subsp
  CDS (1)..(1077)
atggcgtggacggcggcgggggtggggatggcgctggtgtactggttcgtgtgggtgatgggagcggcggaggtgaaggggaagcgggcggtggatctcaagatgggatccatcacgaacgacaaggtgaaggacaagtacacgcagtactggtcgttcttccgccgccccaaggagacggcgaccaccgaggcctccgccgagaaggtgccggccttcgtcgacaccttctacaacctcgtcaccgacatctacgagtggggttggggtcagtcgttccacttctccccttccctccccggccgctcccaccgcgaggccacgcgcgtccacgaggagcgcgtcgccgacctcctccaggccaagccgggacaccgcctcctcgacgtcggctgcggcgtcggcgggcccatgcgcgccatcgccgcccactccggctccaacgtcgtcggcatcaccatcaacgagtaccaggtgaaccgcgcccgcgcgcacaaccgcaaggccggcctcgactcccgctgcgaggtcgtctgcggtaacttcctctccatgccgttctccgacgcctccttcgacggcgcctactccatcgaggccacctgccacgcgcccaggctgcaggacgtctacggcgaggtcttccgcgtgctcaagccgggcggcctctacgtctcctacgagtgggtcaccacctccctctaccgcgccgacaacccggagcacgtcgaggccatccacggcatcgagcgcggcgacgcgctcccgggtctccgccgccaggacgagatcgcgtccatcgccaaggaggtcggattcgaggtgctcaaggagctcgacctcgccctcccgcccgctctcccatggtggactcgcctcaagatggggcgcatcgcatactggcgcaactccctcgtcgtccgcgtgctcaccatgctccggattgcacccaagggcgtctgcgaggtgcacgagatgctctacgagaccgcgcagcacctcacccgcggcggcgagaccggcatcttcacgccgatgcacatggtgctcctccgcaagcccgtcgagagcaaatag

SEQ ID NO: 91686 - protein, 358 aa, Oryza sativa subsp
MAWTAAGVGMALVYWFVWVMGAAEVKGKRAVDLKMGSITNDKVKDKYTQYWSFFRRPKETATTEASAEKVPAFVDTFYNLVTDIYEWGWGQSFHFSPSLPGRSHREATRVHEERVADLLQAKPGHRLLDVGCGVGGPMRAIAAHSGSNVVGITINEYQVNRARAHNRKAGLDSRCEVVCGNFLSMPFSDASFDGAYSIEATCHAPRLQDVYGEVFRVLKPGGLYVSYEWVTTSLYRADNPEHVEAIHGIERGDALPGLRRQDEIASIAKEVGFEVLKELDLALPPALPWWTRLKMGRIAYWRNSLVVRVLTMLRIAPKGVCEVHEMLYETAQHLTRGGETGIFTPMHMVLLRKPVESK

SEQ ID NO: 91687 - DNA, 1023 bp, Medicago truncatula
  CDS (1)..(1023)
atggatttggcttcgaatctcggtggaaagattgaaaaagctcaagttctctccgccgtcgacaagtatgagaagtatcatgcatcctatggaggtcaagaggatgaaaggaaagctaattatagtgatatggttaataaatactatgatcttgcgacaagcttttatgaatttggctggggggaatctttccatttcgcaacaagatgggtaggggaatctcttagagagagcatcaagcgacatgaacacttccttgctttacaacttggtcttacgcccggacagaaggttttggatgttggttgtggtattggaggaccattaagagaaatttcacgattcagctcgacatctgttacaggattgaataataatgagtaccagatcaccaggggaaaggcactcaatcgcaaaactggagtggacaagacttgcaacttcgtcaaggctgatttcatgaagatgccattcgaagacaatagttttgatgcagtgtatgctattgaagccacctgccatgcaccagatgcttatggatgctacaaagagatttatagagtgttaaagcctggccaatgttttgctgcttatgaatggtgcatgactgattcttttgatcccaataaccaagaacaccaaaaaatcaaggcagaaattgagattggtgatgggcttcctgacattagattgaccacaaagtgtcttgaagctcttaagcaagcaggttttgaggtcatatgggagaaagatctagcttcggactctcctcttccttggtacttgcctttagacaagagtcacttctcacttagcagctttcgtctaacggctgttggacgccttttcactagaaatatggtgaaggctctggagtttgttggacttgctccgaaggggagtcaaagggttcaagatttccttgagaaggctgcagagggtctagttgaaggtggaaagagagagatcttcacaccaatgtacttctttttggcgcggaagcctgcttcagaaagcaactga

SEQ ID NO: 91688 - protein, 340 aa, Medicago truncatula
MDLASNLGGKIEKAQVLSAVDKYEKYHASYGGQEDERKANYSDMVNKYYDLATSFYEFGWGESFHFATRWVGESLRESIKRHEHFLALQLGLTPGQKVLDVGCGIGGPLREISRFSSTSVTGLNNNEYQITRGKALNRKTGVDKTCNFVKADFMKMPFEDNSFDAVYAIEATCHAPDAYGCYKEIYRVLKPGQCFAAYEWCMTDSFDPNNQEHQKIKAEIEIGDGLPDIRLTTKCLEALKQAGFEVIWEKDLASDSPLPWYLPLDKSHFSLSSFRLTAVGRLFTRNMVKALEFVGLAPKGSQRVQDFLEKAAEGLVEGGKREIFTPMYFFLARKPASESN

SEQ ID NO: 91689 - DNA, 1267 bp, Nicotiana tabacum
  CDS (40)..(1113)
gcacgagttcctgttttctcgctcccacagtcccactaaatggactctctcactctcatttgtaccgccgctcttctagctgccggtggactttactggttcgtttgcatccttggctccgccgaggttaaaggtaaacgcgccgtccaactttccggcgggtccatcgagaaagagaatgtccaagacaattataaacaatactggtctttcttccgccgccctaaagaaatcgaaaccgccgataaagtcccggctttcgtcgatacgttctataatctagttactgatatttacgaatggggttggggtcagtcttttcacttttccccttctatccctgggaaatctcaccgtgaagccacacgtattcacgaagaaatggctgtagatctaataggtgttaagcccggggctcgcattctggatgcaggttgcggcgttggcgggccgatgcgggctattgcggcccattcacgggctaacgttgttggcatcacaattaatgagtatcaggtgaaacgagcccggatgcacaacaaaaaagctggcctcgattccttatgcgaagttgtttgcggcaatttcctgcaaatgccctttccagacaacagcttcgacggagcttattcaattgaagctacgtgtcacgctcctaagcttgaagaagtgtataaggagatctaccgggtaatgaaacccggatccctttacgtttcctatgaatgggtcacaaccgaattgtacagacccgaagacccggaacatgtcgaaattatccacggaattgaaaggggtgacgctttaccagggctgaggagttacaaggacatagctgaagttgctaagaaagtgggatttgaggtagtgaaagagaaagatttggctagaccgccatcgaacccgtggtggacgaggctgaaaatggggagaattgcttactggaggaaccatattttggttacgattcttgcttttcttggaattgcaccaaaaggtacagttgatgtccacgagatgttgttcgtgactgctgattatttgtctaaaggtggtgaaaaaggcattttctctcctatgcatatgattctctgcagaaaacctgaagagtaaaattaagctctctttcaaattctcattagcagttacaagtatgatgtagagattgaccatggaggttaatttcgctctgttgtccctctttttttgtttttctttttggacgatttaatttaatgttcgtttttttaaaaaaaaaaaaaaaaaa

SEQ ID NO: 91690 - protein, 357 aa, Nicotiana tabacum
MDSLTLICTAALLAAGGLYWFVCILGSAEVKGKRAVQLSGGSIEKENVQDNYKQYWSFFRRPKEIETADKVPAFVDTFYNLVTDIYEWGWGQSFHFSPSIPGKSHREATRIHEEMAVDLIGVKPGARILDAGCGVGGPMRAIAAHSRANVVGITINEYQVKRARMHNKKAGLDSLCEVVCGNFLQMPFPDNSFDGAYSIEATCHAPKLEEVYKEIYRVMKPGSLYVSYEWVTTELYRPEDPEHVEIIHGIERGDALPGLRSYKDIAEVAKKVGFEVVKEKDLARPPSNPWWTRLKMGRIAYWRNHILVTILAFLGIAPKGTVDVHEMLFVTADYLSKGGEKGIFSPMHMILCRKPEE

SEQ ID NO: 91691 - DNA, 1328 bp, Ricinus communis
  CDS (31)..(1071)
ttgattttttagatcttgaatttgtagaagatgtctaaagccggcgcattggatctcgcctccggtgttggtggtaagatcgataaaaacgaagttctctccgccgtcgaaaaatatgagaagtatcatgtctattatggaggtgcagaagaagagagaaaagccaactacactgacatggtcaataaatactatgatcttgttactagcttttatgagttcggctggggagagtctttccattttgcacacagatttaaaggggagtctcttcgagaaagcatcaaacgacatgaacactttctggctttacagcttggcctgaaacctgaacagaaggttttggatgttggatgtggaattggtggaccactaagagaaatttctcgtttcagtttgacatcagttacggggttgaacaacaatgaatatcagatcacaagaggaaaggtactaaatcgcatagcaggagtggacaagacctgtgattttgtaaaggccgacttcatgaaaatgccatttcctgccaatagttttgatgcagtgtatgcaattgaagctacttgccatgcaccagatgcatacggatgctacagtgagatttacagagtattgaagcctgggcaattttttgccgcatatgagtggtgcatgactgattcctttgatcccaataaccaagaacatcagaaaattaaggcagagatcgaaattggcgatggccttccagatattaggttaactgggcaatgcattgaagctctcaaaaaagctggttttgatgtcatatggtcaggtgatcttacagcaagctcacctgtcccatggtacttgcctctggacaaaaatcaatactctctgactggtttccggttaacagctattggaagatttttcactagaaacatgataaaggctctagaatttgcaggacttgctccgaagggaagtcaaagggttcaagattttcttgagaaggctgcggagggattagtggaaggtggaaggaaggagattttcacaccaatgttcttcttcctggctcagaaaccacattcagagaaccagtaaggagacttccacaccctaatgcaaattaaatagcctgctgcttctaactatgaaatcttcctggacattgtgactgggtagatacgtttctaattgctataacaaagataggcagcttcttccatgcttatgcaatgtctcatccgcgttcaatttctagagttttggttttgtacctcttgctgtttgctcgtcttcatgtcatcaaacttctgctccattctggtttcttatgcaatctaacaaatttagttgac

SEQ ID NO: 91692 - protein, 346 aa, Ricinus communis
MSKAGALDLASGVGGKIDKNEVLSAVEKYEKYHVYYGGAEEERKANYTDMVNKYYDLVTSFYEFGWGESFHFAHRFKGESLRESIKRHEHFLALQLGLKPEQKVLDVGCGIGGPLREISRFSLTSVTGLNNNEYQITRGKVLNRIAGVDKTCDFVKADFMKMPFPANSFDAVYAIEATCHAPDAYGCYSEIYRVLKPGQFFAAYEWCMTDSFDPNNQEHQKIKAEIEIGDGLPDIRLTGQCIEALKKAGFDVIWSGDLTASSPVPWYLPLDKNQYSLTGFRLTAIGRFFTRNMIKALEFAGLAPKGSQRVQDFLEKAAEGLVEGGRKEIFTPMFFFLAQKPHSENQ

SEQ ID NO: 91693 - DNA, 1497 bp, Zea mays
  CDS (66)..(1100)
agactctggttctgacatgcagcaattattgcaggtgcatttgatccgtcccggccgcctacacgatgtccaagtcgggagcgctggatcttgcttctggcctcggagggaagatcaacaaggtggaagtcaagtcggccgtcgatgagtatgagaaatatcatggatactatggagggaaggaggaagcaaggaagtccaactatactgatatggttaataaatactatgatcttgccactagcttctatgagtatggttggggtgaatccttccactttgctcacagatggaatggagaatccttacgtgaaagcatcaagcgacatgagcattttcttgccctgcaacttggtttgaaaccaggaatgaaggttttagatgtgggctgtggaataggtggaccactgagagaaattgcaagatttagctcaacttcagttaccggattgaataacaacgaataccagataaccaggggaaaggagctcaaccgtttagcaggaattagtggaacatgtgattttgtcaaggcggacttcatgaagatgccgttcgatgacaacacttttgatgctgtttacgccattgaggcaacatgtcatgcacctgatccagttggttgctacaaggagatatatcgtgtgttgaagcctggccagtgctttgccgtgtacgagtggtgcgttacggatcactatgatcctaacaatgcaacccacaaaaggatcaaggatgaaattgagcttggcaatggcctgccagatatcagaagcactcggcaatgtctccgggcagtaaaagacgccgggtttgaggttgtttgggataaggatcttgctgaagattctcccttgccttggtacttgcccttggatccaagccgattctccctgagtagcttccgtttgacctctgtgggacgcatgattacccgcacaatggtcaaggccctggagtacgttggtcttgctccgcagggcagtgagagggtctctagtttcctggagaaggctgcagaagggctggtagagggcggaaagaaggagatcttcacgccaatgtacttcttttttgttcggaagcctcttctggaatgagctcttggatcaccttttcagagagagaaggcaagtggtcatttcgaagaagccgaggagagggaacctggaatcaagaaaaccttcagctctcctgtgtaggaggaaagttaacgaacagtgtagtaactgttcagctctgtgtttattcagttgttttgctgcttgaggttattcgtttctaggtgggggttggaatccttttcgccataaacctctcagtggcataaataagatggtttgcataagagtacttcatggataccgtaagggctactactgaaagagaaatgtttaagcagcatggtatgtgagcaactagtgataattattccatccttttttttaatataaagcaggagttttgtcaaaaaaaaaaaaaaaaaaaaaaaaaaaa

SEQ ID NO: 91694 - protein, 344 aa, Zea mays
MSKSGALDLASGLGGKINKVEVKSAVDEYEKYHGYYGGKEEARKSNYTDMVNKYYDLATSFYEYGWGESFHFAHRWNGESLRESIKRHEHFLALQLGLKPGMKVLDVGCGIGGPLREIARFSSTSVTGLNNNEYQITRGKELNRLAGISGTCDFVKADFMKMPFDDNTFDAVYAIEATCHAPDPVGCYKEIYRVLKPGQCFAVYEWCVTDHYDPNNATHKRIKDEIELGNGLPDIRSTRQCLRAVKDAGFEVVWDKDLAEDSPLPWYLPLDPSRFSLSSFRLTSVGRMITRTMVKALEYVGLAPQGSERVSSFLEKAAEGLVEGGKKEIFTPMYFFFVRKPLLE

SEQ ID NO: 91695 - DNA, 1136 bp, Nicotiana tabacum
  CDS (37)..(1086)
tttattctattctgtatcttgtgatttaggaaaaagatgtcaaaacaaggagctttatttgatctggcatctggggttggtggcaaaattaacaaagagaaagttctgtctgctgttgacaagtatgagaagtaccatggttattatggaggtgaagaagaagagagaaagaataactacagtgacatggttaacaaatactatgatctttccaccagcttctatgaatatggctggggagaatcattccattttgcacccaggtggaaaggagaatcactactggagagcattaaaaggaatgagcacttccttgccttgcaactaggattaaaaccaggacaaaaggttttggacgtaggatgtggaattggtggaccattaagagaaatagctcgattcagctctacatcaattacaggcctcaacaacaatgaatatcagataactaggggacaagagttgaacaacaaaattggtttaacattgaatcagacttgcaattttgtaaaaggcgatttcatgaaaatgtcgtttcctgacaatagctttgatgcagtatacgccatagcagcaacttgccatgcaccagatgtagttggatgttataaagagatttatagagtgttgaaacctggtcagtgttttgctgtatacgaatggtgcatgaccgattcatacgatccaaataacgaagagcacgaaaagatcaagtcggaaattgagcttggaaatggtctacctgaggttagattgacatcacaatgtcttgaagcagcgaaacaagctggtttcgaagttgtatgggacaaggatcttgctgaggattcgcctgttccgtggtacttgcctttagatacgagtcatttctcgtttagtagcttccctctaacagcacttggacggcttttgaccagaaatctagtctccgcacttgaattcgtgggactggctcctaaaggtagtcaaagggttcaaggtttcttagagaaagctgcacaaggtcttgttggtggtgcaaagaaaggaatctttacaccattgtatttcttcttggttcgcaagcccatttcagacctaaagtaaattggagtttatagtcagttagctttatatttaaaaaaaaaaaaaaaaaa

SEQ ID NO: 91696 - protein, 349 aa, Nicotiana tabacum
MSKQGALFDLASGVGGKINKEKVLSAVDKYEKYHGYYGGEEEERKNNYSDMVNKYYDLSTSFYEYGWGESFHFAPRWKGESLLESIKRNEHFLALQLGLKPGQKVLDVGCGIGGPLREIARFSSTSITGLNNNEYQITRGQELNNKIGLTLNQTCNFVKGDFMKMSFPDNSFDAVYAIAATCHAPDVVGCYKEIYRVLKPGQCFAVYEWCMTDSYDPNNEEHEKIKSEIELGNGLPEVRLTSQCLEAAKQAGFEVVWDKDLAEDSPVPWYLPLDTSHFSFSSFPLTALGRLLTRNLVSALEFVGLAPKGSQRVQGFLEKAAQGLVGGAKKGIFTPLYFFLVRKPISDLK

SEQ ID NO: 91697 - DNA, 1444 bp, Nicotiana tabacum
  CDS (112)..(1152)
gcacgagtactctttcccatttctctcttgaaaggtgaaaggttctctccaagaatacagagatcctttctctacatagattttgtgtatatcttgtgatttgggaaagaaatgtcaaaacaaggggcttttgatctggcatctggggttggtggcaaaattaacaaggaggaagttctctctgctgttgacaagtatgagaagtaccatggttattatggaggtgaagaagaagagagaaagaataactatactgacatggttaacaaatactatgatctttgcactagcttctacgaatacggctggggagagtcattccattttgcacccaggtggaaaggagaatcactccaagagagcattaaaaggcatgagcactttcttgccttgcaactgggattgaaaccaggacaaaaggtcttggacgtaggatgtggaattggtgggccgttaagagaaattgctcgattcagctctacatcagttacaggcctcaacaataatgaatatcagatatctaggggacaggtgttgaaccgcaaagtaggattggatcagacttgcaactttgtaaagggtgatttcatgaaaatgccattccctgacaatagctttgatgcagtgtacgcaatagaagctacctgccatgcaccagatccattgggatgctataaagagatttaccgggtgctgaagcctggtcaatgtttcgctgtgtatgagtggtgcatgaccgattcttacaaccccaataacgaagagcacaacaggatcaaggccgaaattgagctcggaaatggcctccctgaggttagattgacaacacagtgcctcgaagcagccaaacaagctggttttgaagttgtatgggacaaggatctggctgatgactcacctgttccatggtacttgcctttggatacgagtcacttctcgctcagtagcttccgcctaacagcagttggcagacttttcaccagaaatctggtttcggcgcttgaatacgtgggacttgctcctaaaggtagtcaaagggttcaagctttcttagagaaagctgcagaaggtcttgtcggtggtgccaagaaagggattttcacaccaatgtacttcttcgtggttcgcaagcccatttcagactctcagtaatatggagtttagtcacttagctttttgctttagctagcaaatctgtaagattcttcgcacagaactttacacattgaatatgaccgccctaattaaggtgactacagtttttggagggcgttgtgggtggagggtttctttttctgtgttgcttgtctggcacaatttgatttcatgtcttgctatttttgccattgatgtccttgttctaagatatatacctattgacaagctcataaaggtgggcatttgctaatatatggtgtttcaggtaaaaaaaaaaaaaaaaaaa

SEQ ID NO: 91698 - protein, 346 aa, Nicotiana tabacum
MSKQGAFDLASGVGGKINKEEVLSAVDKYEKYHGYYGGEEEERKNNYTDMVNKYYDLCTSFYEYGWGESFHFAPRWKGESLQESIKRHEHFLALQLGLKPGQKVLDVGCGIGGPLREIARFSSTSVTGLNNNEYQISRGQVLNRKVGLDQTCNFVKGDFMKMPFPDNSFDAVYAIEATCHAPDPLGCYKEIYRVLKPGQCFAVYEWCMTDSYNPNNEEHNRIKAEIELGNGLPEVRLTTQCLEAAKQAGFEVVWDKDLADDSPVPWYLPLDTSHFSLSSFRLTAVGRLFTRNLVSALEYVGLAPKGSQRVQAFLEKAAEGLVGGAKKGIFTPMYFFVVRKPISDSQ

SEQ ID NO: 91699 - DNA, 1383 bp, Zea mays
  CDS (78)..(1112)
cccacgcgtccgagactctggttctgacatgcagcaattattgcaggtgcatttgatccgtcccggccgcctacacgatgtccaagtcgggagcgctggatcttgcttctggcctcggagggaagatcaacaaggtggaagtcaagtcggccgtcgatgagtatgagaaatatcatggatactatggagggaaggaggaagcaaggaagtccaactatactgatatggttaataaatactatgatcttgccactagcttctatgagtatggttggggtgaatccttccactttgctcacagatggaatggagaatccttacgtgaaagcatcaagcgacatgagcattttcttgccctgcaacttggtttgaaaccaggaatgaaggttttagatgtgggctgtggaataggtggaccactgagagaaattgcaagatttagctcaacttcagttaccggattgaataacaacgaataccagataaccaggggaaaggagctcaaccgtttagcaggaattagtggaacatgtgattttgtcaaggcggacttcatgaagatgccgttcgatgacaacacttttgatgctgtttacgccattgaggcaacatgtcatgcacctgatccagttggttgctacaaggagatatatcgtgtgttgaagcctggccagtgctttgccgtgtacgagtggtgcattacggatcactatgatcctaacaatgcaacccacaaaaggatcaaggatgaaattgagcttggcaatggcctgccagatatcagaagcactcggcaatgtctccaggcagtaaaagacgccgggtttgaggttgtttgggataaggatcttgctgaagattctcccttgccttggtacttgcccttggatccaagccgattctccctgagtagcttccgtttgacctctgtgggacgcatgattacccgcacaatggtcaaggccctggagtacgttggtcttgctccgcagggcagtgagagggtctctaatttcctggagaaggctgcagaagggctggtagagggcggaaagaaggagatcttcacgccaatgtacttctttcttgttcggaagcctcttctggaatgagctcttggatcaccttttcagagagagaaggcaagtggtcatttcgaagaagccgaggagagggaacctggaatcaagaaaaccttcagctctcctgtgtaggaggaaagttaacgaacagtgtagtaactgttcagctttgtgtttattcagttgttttgctgcttgaggttattcgtttctaggtgggggttggaatccttttcgccataaacctctcagtggcataaataagatggtttgcataaaaaaaaaaaaaaaaaaaaaaaaa

SEQ ID NO: 91700 - protein, 344 aa, Zea mays
MSKSGALDLASGLGGKINKVEVKSAVDEYEKYHGYYGGKEEARKSNYTDMVNKYYDLATSFYEYGWGESFHFAHRWNGESLRESIKRHEHFLALQLGLKPGMKVLDVGCGIGGPLREIARFSSTSVTGLNNNEYQITRGKELNRLAGISGTCDFVKADFMKMPFDDNTFDAVYAIEATCHAPDPVGCYKEIYRVLKPGQCFAVYEWCITDHYDPNNATHKRIKDEIELGNGLPDIRSTRQCLQAVKDAGFEVVWDKDLAEDSPLPWYLPLDPSRFSLSSFRLTSVGRMITRTMVKALEYVGLAPQGSERVSNFLEKAAEGLVEGGKKEIFTPMYFFLVRKPLLE

SEQ ID NO: 91701 - DNA, 1386 bp, Gossypium hirsutum
  CDS (120)..(1160)
gaataacttcgttgttgttttttttttaactagatttgttgcgggtgctgctagtgacgagagagagagagagagagagagagagagagagagagagagagagagagtgacggagaaaaatgtcgaaggctggtgcattggatctggcatccggtctcggcggcaagatcgagaaagccgaagtcctttccgctgttgaacagtatgagcgatatcatgtcttttatggaggcgaagaggaagagagaaaagccaactacactgacatggttaacaaatactatgatcttgttaccagcttttatgagtttggatggggtgaatctttccattttgctcccagatggaatggggagtctctcaaagaaagcataaagcggcatgaacattttcttgctttacaacttgggttgaagcctggacacaaggtgttggatgttggatgtggaattggtggaccacttagagaaattgctcgattcagttccacatcggtcactgggataaacaacaatgaatatcaaataacaagagggaaggaattaaaccgcattgctggagtggaaaagacttgcaactttgtgaaggctgacttcatgaagatgccatttcctgacagcgcctttgatgcagtttacgcaattgaagctacttgccatgctccggatgcgtatggctgctacaaggagatttacagagtactaaagccgggacagtattttgctgcatatgagtggtgcatgacagattcatttgatccaaataactcagaacatcagaaaattaaggctgaaattgagattggtgatggtcttccggatatcaggttgactggacagtgcctggaagctctaaaagaggctggttttgagataatttgggagaaagatcttgctgttggctctccactcccttggtacttgcctttggatacaagccacttctcattgagtagcttccgtctaacatctgttggacgcttcatcaccagaaatatggtaaaggctctagaatttgtgggattagctcccaagggaagtcaaagagttcaagattttctagagaaagctgcagaagggttggttgaaggtggtaggaaagagatatttacgcctatgtatttctttttggcccgaaagccactttcggagagccagtgatgcatcgatgtagggggtgaaaactgggtgaatctatcaaatatgaacttaagctggttgtttggttccatcgtctgtaacagttttagagacttggtgtttattagctagttgatttccgttattttcatttatagaagttactggattatgtgaaacatataaatttatccttattccatgtttttaagttgttgaaaaaaaaaaaaaaaaaaaaaaaaaaaaa

SEQ ID NO: 91702 - protein, 346 aa, Gossypium hirsutum
MSKAGALDLASGLGGKIEKAEVLSAVEQYERYHVFYGGEEEERKANYTDMVNKYYDLVTSFYEFGWGESFHFAPRWNGESLKESIKRHEHFLALQLGLKPGHKVLDVGCGIGGPLREIARFSSTSVTGINNNEYQITRGKELNRIAGVEKTCNFVKADFMKMPFPDSAFDAVYAIEATCHAPDAYGCYKEIYRVLKPGQYFAAYEWCMTDSFDPNNSEHQKIKAEIEIGDGLPDIRLTGQCLEALKEAGFEIIWEKDLAVGSPLPWYLPLDTSHFSLSSFRLTSVGRFITRNMVKALEFVGLAPKGSQRVQDFLEKAAEGLVEGGRKEIFTPMYFFLARKPLSESQ

SEQ ID NO: 91703 - DNA, 1137 bp, Aspergillus oryzae
  CDS (1)..(1137)
atggctcccgctactttggaacaagagaatcatactcgtgacgctgaattcaaccgcgtccttcatggaaagtcgtcccaggcccagggaggcttcgccgccatgcttggaggaaaggacgccgctgcgcagaaggctgctgttgatgaatacttcaagcactgggacaacaaggatgccgccgaggagactgaggagattcgcgcggcccgccgtgcggaatatgctaccttgaccagacattactacaacctggcgaccgatttgtatgaatacggatggggtacatctttccatttctgccgctttgcccagggcgagcccttttaccaagccattgcccgtcatgaacactatctggctcataccatgggcatcaagagtggtatgaaggtcctcgatgtcggctgcggtgttggcggtcccgcgcgcgagatttgcaaattcaccgatgccaacattgtcggattcaacaacaatgattaccagattcaacgtgccacccgctatgctgagcgcgagggattgagcgacaaactgagcttcgtcaagggtgactttatgcaaatgagcttccccgataactcattcgacgctgtctatgccatcgaggctacatgccatgctcctgagctcgagggtgtgtataaggagatcttccgtgtgctgaagcccggtggtgtgttcggtgtttacgagtggcttatgaccgacgaatatgataacgataacgccgagcaccgcaagatccgtctgggtatcgagcagggagatggtatctccaacatggtcaaggtgtctgagggccttcaggccttcaagaacgccggcttcgaggtccttcacaatgaagatttggctgaccgtcccgacgctatcccttggtattaccctcttgctgggtcattcaagcacatgacctcgccttgggatttcttcacgatcgcccgcatgacatggtggggacgtggcatcgctcatcgcttcgtcggtgctttggaaactattggactcgcccccaagggcacccagaagaccgccgacagcttggcgttggcaggagactgcctcgtggcgggtggtgagaagaagcttttcacccccatgtacctgatggttggacgcaagcccgagtaa

SEQ ID NO: 91704 - protein, 378 aa, Aspergillus oryzae
MAPATLEQENHTRDAEFNRVLHGKSSQAQGGFAAMLGGKDAAAQKAAVDEYFKHWDNKDAAEETEEIRAARRAEYATLTRHYYNLATDLYEYGWGTSFHFCRFAQGEPFYQAIARHEHYLAHTMGIKSGMKVLDVGCGVGGPAREICKFTDANIVGFNNNDYQIQRATRYAEREGLSDKLSFVKGDFMQMSFPDNSFDAVYAIEATCHAPELEGVYKEIFRVLKPGGVFGVYEWLMTDEYDNDNAEHRKIRLGIEQGDGISNMVKVSEGLQAFKNAGFEVLHNEDLADRPDAIPWYYPLAGSFKHMTSPWDFFTIARMTWWGRGIAHRFVGALETIGLAPKGTQKTADSLALAGDCLVAGGEKKLFTPMYLMVGRKPE

SEQ ID NO: 91705 - DNA, 1128 bp, Aspergillus oryzae
  CDS (1)..(1128)
atgaccgtcgccttacaagaagaccccgaccttgccttgaccaaggacatgcacggaaagtcggcagaagagaagaatgccttcttcgccatgctcaaaaagaacaacgcggcccatcgcgagatcacaaacgaatatgtgcggcggtggaggactgaaaagggcattgacggcacgaccgacgaggccagaaaggagagaacaactgagtacatgggtgtggtcaataactactacgaccttgtgacagacttttatgaagaagcgtgggcacagtcgttccatttctgtcggttcactgtcggtgaatcgttcctccaggctttggcgcgccacgagcattaccttgcatataaattaggcattaagcggggaatggaggttttggatgttggttgtggtgttgggggtccagcgagagagattgctcgatttactgggtgccaggtggttggagtcaataataatggatatcagatcgcacgtgcaacacggcatacgcagaaggcgggtctggaggagcaggtctccttctgtaagggtgatttcatgcatcttgatttcccagataataaattcgatgcagtctatgtcatcgaagccacagtccatgccccaagccttcaaaaagtatatgagcagatcttccgcgtccttaaaccaggcggtcgctttggtgtatatgagtgggtcatgacggatcgtttcgatgagtccaatcccaagcatcgtgctattcgactcgggattgagcgcggcaatggcattgtcaacatgtgcactcaaaacgaggctgccgaagcgattcaagctgctggtttcgttctcgaacatgaagaagacctagcagcacgaccagatcctataccatggtactaccctattgcaggggagctgcggcacgcacgaagtctctgggatctactcactgttctgcgcatgaccaaactcggacgaggagcgatgggttacctgctgtggacactggaaaatttgcggttggccccatctggaactgctgaaacagccacagagctcgccagtggtgctgatagtcttgtcgaagggggtagacttggccttttcactcctatgtatttcatgatcgggcggaaaccggagatctag

SEQ ID NO: 91706 - protein, 375 aa, Aspergillus oryzae
MTVALQEDPDLALTKDMHGKSAEEKNAFFAMLKKNNAAHREITNEYVRRWRTEKGIDGTTDEARKERTTEYMGVVNNYYDLVTDFYEEAWAQSFHFCRFTVGESFLQALARHEHYLAYKLGIKRGMEVLDVGCGVGGPAREIARFTGCQVVGVNNNGYQIARATRHTQKAGLEEQVSFCKGDFMHLDFPDNKFDAVYVIEATVHAPSLQKVYEQIFRVLKPGGRFGVYEWVMTDRFDESNPKHRAIRLGIERGNGIVNMCTQNEAAEAIQAAGFVLEHEEDLAARPDPIPWYYPIAGELRHARSLWDLLTVLRMTKLGRGAMGYLLWTLENLRLAPSGTAETATELASGADSLVEGGRLGLFTPMYFMIGRKPEI

SEQ ID NO: 91707 - DNA, 1392 bp, Triticum aestivum
  CDS (26)..(1117)
gcacactagttcaaggagcatcataatgtttgtgttttgcctctgcacgcgctgtcggatctgccgagtgtcttcattccctgtactgttgctgtttatgttcattcacttgagttattttttccttgtcctactcctaattttgggacaattttttttcaccaggtatgagaaatatcatggatattacggagggaaggaggaatcgaggaaatccaactacaccgatatggttaataaatattatgatcttgctactagcttctatgagtatggctggggtgaatccttccactttgctcacaggtggaatggggaatctttaagggaaagcatcaaaaggcacgagcactttctggctttacagcttgagttgaaaccagggatgaaggttttggatgtcggctgtggaataggcgggccattaagagaaattgcgagatttagctccacctcagttactggattgaacaacaacgactaccagataactaggggaaaggcgcttaatcggtcggtaggacttggcgctacttgtgattttgtcaaggcagacttcatgaagatgccattctctgataacactttcgatgctgtttatgccattgaggcaacatgccacgcacctgatccggttggctgctacaaggagatctaccgtgtattaaaacccgggcagtgttttgctgtatatgagtggtgcattaccgatcactatgatccaaacaatgcaacccacaagaggattaaggacgaaattgagcttgggaatggcctgccagatatcagaagtactcggcaatgtcttcaagctgttaaagatgctgggtttgaggttatttgggacaaggatcttgctgaagattctccattgccttggtacttgcccttggacccaagtcggttttctttgagtagtttccggttgactaccgtgggacgaataattactcgcaatatggtcaaggtattggaatatgttggtctggctccggaaggcagccagagggtctctagcttcttagagaaggccgcggaaggtcttgtcgaaggtggcaagaaggaaatcttcaccccggtgtacttctttgtggttcggaagcctctttcagaatgagcaactttcaggcaatgcaaagatgcattttgaagaagcgggcttgaccggggagtttggctatgcgatcctcggttcttatctgtagaagaagacatagtgaaatgtgttgcgtttctgtttgttttgtatttaatgttgagcttctgttttgttgttttgtcgtgtgaacttttgatgctcgtcgattaactgactgtttgacaccattgtgctaagctattagtggcataaataagctagatgcagttttcttcccaaaaaaaaaaaaaaaa

SEQ ID NO: 91708 - protein, 363 aa, Triticum aestivum
MFVFCLCTRCRICRVSSFPVLLLFMFIHLSYFFLVLLLILGQFFFTRYEKYHGYYGGKEESRKSNYTDMVNKYYDLATSFYEYGWGESFHFAHRWNGESLRESIKRHEHFLALQLELKPGMKVLDVGCGIGGPLREIARFSSTSVTGLNNNDYQITRGKALNRSVGLGATCDFVKADFMKMPFSDNTFDAVYAIEATCHAPDPVGCYKEIYRVLKPGQCFAVYEWCITDHYDPNNATHKRIKDEIELGNGLPDIRSTRQCLQAVKDAGFEVIWDKDLAEDSPLPWYLPLDPSRFSLSSFRLTTVGRIITRNMVKVLEYVGLAPEGSQRVSSFLEKAAEGLVEGGKKEIFTPVYFFVVRKPLSE

SEQ ID NO: 91709 - DNA, 1092 bp, Triticum aestivum
  CDS (1)..(1092)
atgtttgtgttttgcctctgcacgcgctgtcggatctgccgagtgtcttcattccctgtactgttgctgtttatgttcattcacttgagttattttttccttgtcctactcctaattttgggacaattttttttcacaaggtatgagaaatatcatggatattacggagggaaggaggaatcgaggaaatccaactacaccgatatggttaataaatactatgatcttgctactagcttctatgagtatggctggggtgaatccttccactttgctcacaggtggaatggggaatctttaagggaaagcatcaaacgacacgagcactttctggccttacagcttgagttgaaaccaggcatgaaggttttggatgtcggctgtggaataggcgggccattaagagaaattgcgagatttagctccacctcagttactggattgaacaacaacgactaccagataactaggggaaaggcgcttaatcggtcggtaggacttggcgcaacttgtgattttgtcaaggcagacttcatgaagatgccattctctgataacactttcgatgctgtttatgccattgaggcaacatgccacgcacctgatccggttggctgctacaaggagatctaccgtgtattaaaacccgggcagtgttttgctgtatatgagtggtgcattaccgatcactatgatccaaacaatgcaacccacaagaggattaaggatgaaattgagcttgggaatggcctgccagatatcagaagtactcggcaatgtcttcaagctgttaaagatgctgggtttgaggttatttgggacaaggatcttgctgaagattctccgttgccttggtacttgcccttggacccaagtcggttttcattgagtagtttccggttgactaccgtgggacgaataattactcgcaatatggtcaaggtattggaatatgttggtctggctccggaaggcagccagagggtctctagtttcttagagaaggccgcggaaggtcttgttgaaggtggcaagaaggaaatcttcaccccgatgtacttctttgtggttcggaagcctctttcagaatga

SEQ ID NO: 91710 - protein, 363 aa, Triticum aestivum
MFVFCLCTRCRICRVSSFPVLLLFMFIHLSYFFLVLLLILGQFFFTRYEKYHGYYGGKEESRKSNYTDMVNKYYDLATSFYEYGWGESFHFAHRWNGESLRESIKRHEHFLALQLELKPGMKVLDVGCGIGGPLREIARFSSTSVTGLNNNDYQITRGKALNRSVGLGATCDFVKADFMKMPFSDNTFDAVYAIEATCHAPDPVGCYKEIYRVLKPGQCFAVYEWCITDHYDPNNATHKRIKDEIELGNGLPDIRSTRQCLQAVKDAGFEVIWDKDLAEDSPLPWYLPLDPSRFSLSSFRLTTVGRIITRNMVKVLEYVGLAPEGSQRVSSFLEKAAEGLVEGGKKEIFTPMYFFVVRKPLSE

SEQ ID NO: 91711 - DNA, 1504 bp, Glycine max
  CDS (163)..(1266)
gaattcggcacgagatttgggaccaggtattgatgtaatgttgccagttgccatcttactaatgtcttatgacttaaattaactaaaatactttcttgaaaacaatttaatacatattatgaactatgttatcataacaaagtcgaggggtaagttttgtggatgcaaaaaaaaaaaaaaaatcgaaacgaggtcgttttgtgttccgccgaaggcaccggaggttgtagcaggctagcagctatggatttggcatccaatctcggtggcaagattgacaaagccgaagttctctctgccgttcagaagtatgagaagtatcatgtttgctatggaggtcaagaggaagagaggaaagctaattataccgatatggttaataaatactacgatcttgttaccagcttttatgagtttggctggggggaatctttccattttgcacccagatggaaaggggaatctcttcgagagagcatcaagcgacatgaacacttccttcctttacaacttggactgaagccagggcagaaggttttggatgttggatgtggaattgggggaccattaagagaaatttctcgatttagctcaacttcaattaccgggttgaataacaatgagtaccagataacaagaggaaaggaactcaatcgcattgctggagtggacaagacttgcaattttgtcaaggctgacttcatgaaaatgccattcccagacaacagttttgatgcagtgtatgcgattgaagccacttgccatgcaccggatgcttatggatgctataaagagatttttagagtgttaaagcctggtcaatattttgctgcttatgaatggtgcatgaccgattcttttgatccccaaaacccagagcaccaaaaaatcaaggcagaaattgagattggtgatgggctacctgacattcgattgactgctaagtgtcttgaagctctgaagcaagcaggttttgaggtaatatgggagaaagatctagcagtggactctcctcttccttggtatttgcctttagacaaaagtcacttctcactgagtagcttccgtctaactgctgtcgggcgacttttcaccaaaaacatggtcaaggttctggagtatgttggactggctccaaagggtagtctaagggttcaagacttcctggagaaggctgcagagggactagttgaaggagggaagagagagattttcacaccaatgtacttcttcctggcacggaagcctgatttagacaggaactaagctggctgtacaaataggttgctgttttcatcagttacggtgattctggtagggtgaaccgtaagctaggattgtttttggccttgttgccttagtgattcttgctgtttctttgttttgtttaggttaccaacacttcattttgctgcttgtttcgatgaagcagtgctcctccatattatgtttaccctacatattatatgctcttttactttgtttaaaaaaaaaaaaaaaaaaa

SEQ ID NO: 91712 - protein, 367 aa, Glycine max
MQKKKKNRNEVVLCSAEGTGGCSRLAAMDLASNLGGKIDKAEVLSAVQKYEKYHVCYGGQEEERKANYTDMVNKYYDLVTSFYEFGWGESFHFAPRWKGESLRESIKRHEHFLPLQLGLKPGQKVLDVGCGIGGPLREISRFSSTSITGLNNNEYQITRGKELNRIAGVDKTCNFVKADFMKMPFPDNSFDAVYAIEATCHAPDAYGCYKEIFRVLKPGQYFAAYEWCMTDSFDPQNPEHQKIKAEIEIGDGLPDIRLTAKCLEALKQAGFEVIWEKDLAVDSPLPWYLPLDKSHFSLSSFRLTAVGRLFTKNMVKVLEYVGLAPKGSLRVQDFLEKAAEGLVEGGKREIFTPMYFFLARKPDLDRN

SEQ ID NO: 91713 - DNA, 1806 bp, Candida glabrata
  CDS (534)..(1652)
cggcattgggattttctcgtttcgccgagaattgttacccgcagtgcaggttggaggggggggggaaggaggtgctcgttgcttttcgccctaagagagtgcttcacaagggatcccacggaaggggttttctctgctgctattgccagtattcttattgtagtattctattgttcttattgttggtctattgttcttattgttctaattctattgcaatcctctgattcgagctcgaagatgtaaattgtctcgtttactcccttactccccccgtcaacaccctgcagtggattgttaccgcatctgcaagcaagaaaaaaaattgcgaaaagtcgtttagcccttcgtaccctttctgctcaaatctcggaagttatcgggtaaacatcgcaaaatttttctggacagctctattatatatattggtaaagacaatatacagtttattgtgctcttgacgtctctaaagcgtataacagaaaatatatcaaggaattgaaattctcccgatactaatacagaaggaaaagatgtctgagtcggaattgagacagagacaagctgagttcaccaaggaattgcacggtgaaggtgccgagagcaggaccggtttgaccgcgttgctgtccaagaaccgtaacgcccaacgtgaagctgtttccaagtacttgagacactgggacggtaagaccgacaaagaggccgaggaccgtcgtttggaggactacaacgaggccactcactcctactacaacgttgtcacggacttctacgagtacggctggggttcctctttccacttctcccgtttctacaaaggtgagaacttccaagccgccatggctcgtcacgaacagtacttggcatacatggccggtatcaagaagggtgacctagtgctggacgtcggttgcggtgtcggtggccctgcccgtaccatcgccagattcaccggctgtaacatcatcggtctaaacaacaacgactaccagatccaaaaggctaagtactacgccaagaagtataacttgcaagaccacatggacttcgttaagggtgactttatgaacatggagtttgagccaaattccttcgacaaagtgtacgcgatcgaggccactttccacgctccaaagctggaaggtgtatacggtgagatctacaaggtgctgaagccaggtggtactttcgccgtttacgaatgggtcatgaccgaaaactacgacgaaaacaatgaagagcaccgtaagatcgcttacgagatcgagctaggtgatggtattccaaagatgttcaccgtcgacgttgccaagcaagctttgaagaacgtcggtttcgaagtcgaagtttctaaggatcttgctgacgaggatgacgaaatcccatggtactacccattgaccggtgaatggaagtacgttcaatctctatccgatatcgctactttcttcagaacctcttacttcggtagaaaattcactaactgtatggtctccataatggaaaaggttggtgtcgccccacaaggttccgttgaagttaccgctgccctagaaaatgccgctgttggtttggtcgaaggtggtagaaagaagcttttcaccccaatgttcctattcgtcgctaagaagccagaagatgctaaataaacaactgcagcataactatattcacactttatgatgttactttatttccaaacgattgtctttaattaattttattcttggccttatgagtgttacctgtcgtaatgctaatgaaattaacgctaattatgatttttgcaaaattaaattaata

SEQ ID NO: 91714 - protein, 372 aa, Candida glabrata
MSESELRQRQAEFTKELHGEGAESRTGLTALLSKNRNAQREAVSKYLRHWDGKTDKEAEDRRLEDYNEATHSYYNVVTDFYEYGWGSSFHFSRFYKGENFQAAMARHEQYLAYMAGIKKGDLVLDVGCGVGGPARTIARFTGCNIIGLNNNDYQIQKAKYYAKKYNLQDHMDFVKGDFMNMEFEPNSFDKVYAIEATFHAPKLEGVYGEIYKVLKPGGTFAVYEWVMTENYDENNEEHRKIAYEIELGDGIPKMFTVDVAKQALKNVGFEVEVSKDLADEDDEIPWYYPLTGEWKYVQSLSDIATFFRTSYFGRKFTNCMVSIMEKVGVAPQGSVEVTAALENAAVGLVEGGRKKLFTPMFLFVAKKPEDAK

SEQ ID NO: 91715 - DNA, 993 bp, Oryza sativa subsp
  CDS (1)..(993)
atggcatgtcatatcagtgcacgtagcaggtatgagaattatcatgaaatttatggaggtgaagtggaatcaaggacatccaactacgctgatttggcaaacaagtattatgatcttgtcaccagtttctacgaatacggctggggagaatcattccatttcggcagcagatggcaaggagaaactttacgcgaaagccttaagcgtcatgagcattttctggccttgcaactcggcctcaagaagggcatgaaggtcctagacgtggggtgtggcattggaggacccttgagagagattgccagattcagctcagcatcggtgactggactgaacaacaatgcgtaccagatatcaaggggcaaggaactcaacttttctgtcggtttgagtgaaacctgcaactttgtcaaggctgacttcatgaacatgcctatccctgatgccaccttcgacgcagcctacgccatcgaggcgacatgccatgcccctgatgctgttggtgtctacagggagatctgccgagtgctgaaaccagggcagttgttcgcgttggacgagtggtgcatgaccgacaagtatgatccaggcaactcgaggcaccggagcatcaaggccgagatcgagctcggcaatggccttccagacatcagaaccaccaaacagtgcatccaggctctcaaagacgcgggctttgaggttgtatcggtgaaggatctggcagaggattcgccgttgccatggtacctgcctcttgattccagccagttctcactcaatggcttccgtctcacccgtgtcggccgcttcatcactcacatgctggtaaagacgctcgagtgcctccatgttgccccacagggcagcctgagggtctccagctttcttgagaccgcggccgaagggcttgtgaagggcgccaaggaagggatcttcacgcccattttcttcgtcttggctcggaaacctctggacaagcagccagagatctga

SEQ ID NO: 91716 - protein, 330 aa, Oryza sativa subsp
MACHISARSRYENYHEIYGGEVESRTSNYADLANKYYDLVTSFYEYGWGESFHFGSRWQGETLRESLKRHEHFLALQLGLKKGMKVLDVGCGIGGPLREIARFSSASVTGLNNNAYQISRGKELNFSVGLSETCNFVKADFMNMPIPDATFDAAYAIEATCHAPDAVGVYREICRVLKPGQLFALDEWCMTDKYDPGNSRHRSIKAEIELGNGLPDIRTTKQCIQALKDAGFEVVSVKDLAEDSPLPWYLPLDSSQFSLNGFRLTRVGRFITHMLVKTLECLHVAPQGSLRVSSFLETAAEGLVKGAKEGIFTPIFFVLARKPLDKQPEI

SEQ ID NO: 91717 - DNA, 1080 bp, Pneumocystis carinii
  CDS (1)..(1080)
  misc_feature (585)..(585): n is a, g, c or t
atgcatgggaaagatgcagcaaaagaacggggattgctttcatcttttaggaggataaagaagcccaaaacagagcgtctagattcgtattttggattttggggtgataaatgtacctcagagaagaagaatgatgttcatccaccagagcgttttaagttttatgctactcttactcgtcattattattctcttgttactgatttttatgaatatggatggtcaatttcatttcatttttgccgtctttgcaaaaacgaatcatttagccaggcaattgctcgtcatgagcactatattgcgttacatgctggaatacgtgaaggcgaaacggtattggatgttggatgtggggtaggtggacctgactgtcagatttctgtttttacgggtgcaaatattgtgggattaaataataatgattatcaaattcagcgagctaaatattattcagaaaaaaagggattatcagataaattaaagtttatcaagggtgattttatgcaaatgccttttccagaaaattcatttgataaaatatactctattgaagcaacaattcatgcaccttctttagagggtgtntattcagaaatttatcgagtccttaagccaggaggtctttatgcttcatatgaatgggttatgcttacagaatatgatgaaaatgaccctgaacatcaacaaattgtatatgggattgagattggtgattctatccctaaaatttctaaaattggagaagcagaagcagccttaattaaagtaggatttgaaattattcattctgaggagctttctacaaaaaatagcccactcccatggtattattatctcgatggttatttgaaaagagttagatcgttcagagattttatttcgattgctcgtatgacaacaattgggaaatggcttattagttcttttataggacttatggaattcattggtcttcttccaaaaggtagtaaaaaagttaatgacattttgttggttgccgcggattcccttgtaaaggctggaaaaaaggaaatatttactcctatgcaattatgggtttgtagaaaacctttggtttaa

SEQ ID NO: 91718 - protein, 359 aa, Pneumocystis carinii
MHGKDAAKERGLLSSFRRIKKPKTERLDSYFGFWGDKCTSEKKNDVHPPERFKFYATLTRHYYSLVTDFYEYGWSISFHFCRLCKNESFSQAIARHEHYIALHAGIREGETVLDVGCGVGGPDCQISVFTGANIVGLNNNDYQIQRAKYYSEKKGLSDKLKFIKGDFMQMPFPENSFDKIYSIEATIHAPSLEGVYSEIYRVLKPGGLYASYEWVMLTEYDENDPEHQQIVYGIEIGDSIPKISKIGEAEAALIKVGFEIIHSEELSTKNSPLPWYYYLDGYLKRVRSFRDFISIARMTTIGKWLISSFIGLMEFIGLLPKGSKKVNDILLVAADSLVKAGKKEIFTPMQLWVCRKPLV

SEQ ID NO: 91719 - DNA, 1122 bp, Ashbya gossypii
  CDS (1)..(1122)
atgagcgagcaggatcaggagctaaggaacagacaggcgcaatttgccaaggagctgcatggtgagagcgtggagcgtagcgggctaacggctctgctcgggaagaaccgggaagcccagcaagaggccgtcgccaagtacctgcgtcactgggacggtgcgacggacgcagaggccgaggagcggcggctggcggactacaacgagtcgactcactcgtattacaacgtggtgacggacttctacgagtacgggtggggcgcgtcgttccacttcagccggttctacaccggggagtcgttcgccatgagtatggcgcgccacgagcactaccttgcgcaccgcgcgggcatcacaagcggagacctggttctggacgtcggctgcggcgtcggtgggcctgcgcgcgagatcgcgcgcttcaccggctgccgcgtggtcggactcaacaacaatgactaccaaatcatgaaaggcaagcactacagccgtaagctcggcctcggcgaccaggtgagctacgtcaagggcgacttcatgaacatggactttccggatgcgaccttcgacaaggtgtatgcgatcgaggccacatgccacgccccctccttcgagggcgtgtacggcgagatctaccgtgtgctaaagcccggcggagtcttcgccgtatacgaatgggtcatgaccgaaaactacgacgaaactaaccccgaacaccgtcgtatcgcctacgatatcgagctcggcgacggtatccccaagatgtacagcgtcaaggttgcccgcgacgcgctggccaaggtcggcttcgaaatcctggtcgacgaggaccgcgcggacaacgacgaccccgtgccatggtactacccgctcaccggcgagtgggcctacatccagacaatcgccgacctgggcaccttcgtgcgcacctccgccttgggccgccgcgtcacctccgccttcgtgtcccttatggagacgctgcgcctagcgccgcgtggatcctccgaggtcgtgaacgcgctggagtctgcagccgctggtctcgtggcagggggcaagtctaagctgttcacgcctatgatgctgttcgtcgcacgcaaaccagagactgcggaatag

SEQ ID NO: 91720 - protein, 373 aa, Ashbya gossypii
MSEQDQELRNRQAQFAKELHGESVERSGLTALLGKNREAQQEAVAKYLRHWDGATDAEAEERRLADYNESTHSYYNVVTDFYEYGWGASFHFSRFYTGESFAMSMARHEHYLAHRAGITSGDLVLDVGCGVGGPAREIARFTGCRVVGLNNNDYQIMKGKHYSRKLGLGDQVSYVKGDFMNMDFPDATFDKVYAIEATCHAPSFEGVYGEIYRVLKPGGVFAVYEWVMTENYDETNPEHRRIAYDIELGDGIPKMYSVKVARDALAKVGFEILVDEDRADNDDPVPWYYPLTGEWAYIQTIADLGTFVRTSALGRRVTSAFVSLMETLRLAPRGSSEVVNALESAAAGLVAGGKSKLFTPMMLFVARKPETAE

SEQ ID NO: 91721 - DNA, 1131 bp, Candida albicans
  CDS (1)..(1131): transl_table=12
atgtctccagttcaattagcagaaaaaaattacgaaagagatgaacaattcactaaagctttacatggtgaatcttataaaaaaactgggttatcagctttaatagctaaatctaaagatgctgcttctgttgctgctgagggttatttcaaacattgggatggtggtatttctaaagatgatgaagagaaaagattgaatgattattcccaattgactcatcattattataatttagtcactgacttttatgaatatggttggggttcttcattccatttttcaagatattataaaggtgaagcttttagacaagctactgctagacatgaacatttcttggcccataaaatgaatcttaatgaaaacatgaaagttttagatgttggttgtggtgtaggtggtcctggtagagaaatcacaagatttactgattgtgaaattgttggattaaataataatgattatcaaattgaaagagctaatcattatgctaaaaaataccatttagatcataaattatcttatgttaaaggtgattttatgcaaatggattttgaaccagaatcattcgatgctgtttatgccattgaagctaccgttcatgctccagttttagaaggagtttattcagaaatttataaagttttgaaaccaggtggtattttcggtgtttatgaatgggtcatgactgataaatacgatgaaactaatgaagaacatcgtaaaattgcttatggtattgaagtcggtgatggtattccaaaaatgtattctcgtaaagttgctgaacaagctttgaaaaatgttggatttgaaattgaatatcaaaaagatttggctgatgttgatgatgaaattccttggtattatccattaagtggtgatttgaaattttgtcaaacttttggtgattatttgactgttttcagaacttcaagaattggtagattcattactactgaatcagttggtttaatggaaaaaattggtttagctccaaaaggttctaaacaagttactcatgctttagaagatgctgctgttaatttagttgaaggtggtagacaaaaattgtttactccaatgatgttgtacgttgttagaaaaccattagaaaagaaagattaa

SEQ ID NO: 91722 - protein, 376 aa, Candida albicans
MSPVQLAEKNYERDEQFTKALHGESYKKTGLSALIAKSKDAASVAAEGYFKHWDGGISKDDEEKRLNDYSQLTHHYYNLVTDFYEYGWGSSFHFSRYYKGEAFRQATARHEHFLAHKMNLNENMKVLDVGCGVGGPGREITRFTDCEIVGLNNNDYQIERANHYAKKYHLDHKLSYVKGDFMQMDFEPESFDAVYAIEATVHAPVLEGVYSEIYKVLKPGGIFGVYEWVMTDKYDETNEEHRKIAYGIEVGDGIPKMYSRKVAEQALKNVGFEIEYQKDLADVDDEIPWYYPLSGDLKFCQTFGDYLTVFRTSRIGRFITTESVGLMEKIGLAPKGSKQVTHALEDAAVNLVEGGRQKLFTPMMLYVVRKPLEKKD

SEQ ID NO: 91723 - DNA, 1119 bp, Candida glabrata
  CDS (1)..(1119)
atgtctgagtcggaattgagacagagacaagctgagttcaccaaggaattgcacggtgaaggtgccgagagcaggaccggtttgaccgcgttgctgtccaagaaccgtaacgcccaacgtgaagctgtttccaagtacttgagacactgggacggtaagaccgacaaagaggccgaggaccgtcgtttggaggactacaacgaggccactcactcctactacaacgttgtcacggacttctacgagtacggctggggttcctctttccacttctcccgtttctacaaaggtgagaacttccaagccgccatggctcgtcacgaacagtacttggcatacatggccggtatcaagaagggtgacctagtgctggacgtcggttgcggtgtcggtggccctgcccgtaccatcgccagattcaccggctgtaacatcatcggtctaaacaacaacgactaccagatccaaaaggctaagtactacgccaagaagtataacttgcaagaccacatggatttcgttaaaggtgactttatgaacatggagtttgagccaaattccttcgacaaagtgtacgcgatcgaggccacttgccacgctccaaagctggaaggtgtatacggtgagatctacaaggtgctgaagccaggtggtactttcgccgtttacgaatgggtcatgaccgaaaactacgacgaaaacaatgaagagcaccgtaagatcgcttacgagatcgagctaggtgatggtattccaaagatgttcaccgtcgacgttgccaagcaagctttgaagaacgtcggtttcgaagtcgaagtttctaaggatcttgctgacgaggatgacgaaatcccatggtactacccattgaccggtgaatggaagtacgttcaatctctatccgatatcgctactttcttcagaacctcttacttcggtagaaaattcactaactgtatggtctccataatggaaaaggttggtgtcgccccacaaggttccgttgaagttaccgctgccctagaaaatgccgctgttggtttggtcgaaggtggtagaaagaagcttttcaccccaatgttcctattcgtcgctaagaagccagaagatgctaaataa

SEQ ID NO: 91724 - protein, 372 aa, Candida glabrata
MSESELRQRQAEFTKELHGEGAESRTGLTALLSKNRNAQREAVSKYLRHWDGKTDKEAEDRRLEDYNEATHSYYNVVTDFYEYGWGSSFHFSRFYKGENFQAAMARHEQYLAYMAGIKKGDLVLDVGCGVGGPARTIARFTGCNIIGLNNNDYQIQKAKYYAKKYNLQDHMDFVKGDFMNMEFEPNSFDKVYAIEATCHAPKLEGVYGEIYKVLKPGGTFAVYEWVMTENYDENNEEHRKIAYEIELGDGIPKMFTVDVAKQALKNVGFEVEVSKDLADEDDEIPWYYPLTGEWKYVQSLSDIATFFRTSYFGRKFTNCMVSIMEKVGVAPQGSVEVTAALENAAVGLVEGGRKKLFTPMFLFVAKKPEDAK

SEQ ID NO: 91725 - DNA, 1128 bp, Clavispora lusitaniae
  CDS (1)..(1128): transl_table=12
atgacttccgttaaattggccgagaaaaatttcgagcaggacaaggagtttgccaaagccatgcatggcgactcttacaagaagagaggcatttctgcgctcatggccaaggccaaagaagcatctgacgttgctaccaatggctacttcaaacactgggacggaggtgtttcagaagacgatgagaagaaaagattggacgactactcgagcttgaccaagaactactataacttggtcaccgacttttacgaatacggctggggttcttctttccacttctctcgttactacaagggcgaagctttcagacaggccactgccagacacgagcactttttggcacacaagatgaacatcaacgaaaacatgagagttttggatgttggatgcggtgttggtggcccaggaagagagatttgcagattcaccgactgcaccattgttggtttgaacaacaacgactatcaggtcgaaagagcccagtactacgcaaagaagtacaagttggatgacaagttgtcttacgttaagggtgactttatgcaaatggactttgagcctgagtccttcgacgctgtgtatgcgattgaggctaccgtgcatgcgcctgtattggaaggtgtctactctgagatttacaaggttttgaagcctggaggagttttcggtgtttacgagtgggtcatgaccgacaagtacgatgaaaacaacgaagagcaccgcaagatcgcttatggtattgaagtcggtgatggtattccaaagatgtacaagagagaggttgctgagcaggcgttgaagaatgttggttttgacattgagtacgaaaaggatttggccgatgttaacgacgagattccttggtactacccattggccggtgaatggaaatacgtgcagaccttgtctgactgtttcacaatctttagaacatccaagattggtagaactgtcaccaccaatgtcgtgggtttgatggagaaaatcggtttggctccaaagggctctaagcaggttactggtgccttggaggatgccgcagtcaacttggttgctggaggtgagcaaaaattgtttacgccaatgatgttgtacatcgcaagaaagcctttggacgcaaagtaa

SEQ ID NO: 91726 - protein, 375 aa, Clavispora lusitaniae
MTSVKLAEKNFEQDKEFAKAMHGDSYKKRGISALMAKAKEASDVATNGYFKHWDGGVSEDDEKKRLDDYSSLTKNYYNLVTDFYEYGWGSSFHFSRYYKGEAFRQATARHEHFLAHKMNINENMRVLDVGCGVGGPGREICRFTDCTIVGLNNNDYQVERAQYYAKKYKLDDKLSYVKGDFMQMDFEPESFDAVYAIEATVHAPVLEGVYSEIYKVLKPGGVFGVYEWVMTDKYDENNEEHRKIAYGIEVGDGIPKMYKREVAEQALKNVGFDIEYEKDLADVNDEIPWYYPLAGEWKYVQTLSDCFTIFRTSKIGRTVTTNVVGLMEKIGLAPKGSKQVTGALEDAAVNLVAGGEQKLFTPMMLYIARKPLDAK

SEQ ID NO: 91727 - DNA, 1134 bp, Debaryomyces hansenii
  CDS (1)..(1134)
atgccttctgcagtacaattagcggaaaagaaccacgaaaaggattctaaatttgccaaagctttgcatggtgaatcttacaaacagaccggtttaaaggctttaatgtctaaagctagagatgcctccgaagttgccaacgatggttacttcaagcactgggatggtggtgtcaccaaggaagatgaagataagagattaagtgattattctaatttgactgctcattactacaatttagttactgacttctacgaatatggttggggttcatctttccacttttcccgttattacaccggggaagctttccgtcaagctactgctagacatgaacatttcttagctcacaagatgcaaattaatgaaaatatgaaggttttagacgttggttgtggtgtcggtggaccagctagagaaatctgtagatttaccgactgttctattgttggtttaaacaacaatgactaccagattgaaagagccaaccactatgctagaaaatataagttagacgataaattatcgttcgttaaaggtgactttatgcaaatggattttgaagccgaatcgttcgatgccgtgtatgctattgaagccactgtccacgcaccagttttagaaggtgtttactctgaaatctacaaggtattaaagccaggtggtgtctttggtgtttacgaatgggtcatgactgataaatacgacgatgaaaacgaagaacatcgtaaaattgcatacggtattgaagttggtgatggtattccaaagatgtacaagagagaagttgctgaaaaggctttaaaatcggttgggtttgaaatcgaatacgaagctgatttagctgacaaggaagatgatattccatggtactatcctttatctggtgaatggaaatatgtccaaactttaagtgactatttcactatctttagaacttctaaggttggtagaactattactacggaagctgttggtttaatggaaaaacttggtttagctccaaagggttctaagcaagttactaacgcattagaagacgccgctgttaatttagtcgaaggtggtcgtcaaaaattattcacaccaatgatgttatacgtttgtagaaaaccagcaaacgaagatatttaa

SEQ ID NO: 91728 - protein, 377 aa, Debaryomyces hansenii
MPSAVQLAEKNHEKDSKFAKALHGESYKQTGLKALMSKARDASEVANDGYFKHWDGGVTKEDEDKRLSDYSNLTAHYYNLVTDFYEYGWGSSFHFSRYYTGEAFRQATARHEHFLAHKMQINENMKVLDVGCGVGGPAREICRFTDCSIVGLNNNDYQIERANHYARKYKLDDKLSFVKGDFMQMDFEAESFDAVYAIEATVHAPVLEGVYSEIYKVLKPGGVFGVYEWVMTDKYDDENEEHRKIAYGIEVGDGIPKMYKREVAEKALKSVGFEIEYEADLADKEDDIPWYYPLSGEWKYVQTLSDYFTIFRTSKVGRTITTEAVGLMEKLGLAPKGSKQVTNALEDAAVNLVEGGRQKLFTPMMLYVCRKPANEDI

SEQ ID NO: 91729 - DNA, 1116 bp, Kluyveromyces lactis
  CDS (1)..(1116)
atgtctgaaagtaatgaattgagaaagcgtcaagctgaatttactaaagaattgcacggtaataacgtgaccaagagtgggttctctgcgttggtttccaagaacaaatctgctcaaacggaggctgtggccaagtatttgaagcattgggatggtaagacagacgctgatgctgaacgtagacgtctagaggactataacgagtccacgcactcttattacaacgtcgtgaccgatttttacgagtacggttggggttccagtttccatttctcgcgtttcttcaaaggtgaatctttctcggccagtgttgccaggcacgaacattacttggcttacaaagccggtattaaggaaaatgatttgatacttgacgttggatgtggtgttggtggaccagcacgtaccatttcccgtttcactggttgtaacatcatcgggttgaataacaacgattaccaaatccaaaaggcaaactattacgccaagcgtgatcatttggactctaaactatcttttgttaaaggtgatttcatgaagatggaattcgacgaaaacactttcgatagcgtctatgccatcgaagccacatgtcacgcaccaactttcgaaggtgtctatggtgaaatctacaaagtcttgaagcctggcggtacttttgccgtttacgaatgggtcatgactgataagtacgacgaaactaatccagaacaccgtaaaatcgcttatgaaatcgaattgggtgacggtatcccaaagatgtattctgtcgatgcagcacgtgacgccctatctaaagtcggtttcgaaatcttggaagagaatgatttagctgacaacgatgacgagataccatggtacgctcccttgaccggtgaatggaaatacgtcaattccgtagcagatttggccactttcttcagaacctctcgtctcggccgtgccttcaccacatccatggttactgtcttcgaaaagttgggtttggctccaaagggttccgtatcagtgactaacgcattggaagaagctgctgttggtttagtagccggtggtgagaagaaacttttcaccccaatgatgttgttcgtggccaaaaagccagaacaaaaatag

SEQ ID NO: 91730 - protein, 371 aa, Kluyveromyces lactis
MSESNELRKRQAEFTKELHGNNVTKSGFSALVSKNKSAQTEAVAKYLKHWDGKTDADAERRRLEDYNESTHSYYNVVTDFYEYGWGSSFHFSRFFKGESFSASVARHEHYLAYKAGIKENDLILDVGCGVGGPARTISRFTGCNIIGLNNNDYQIQKANYYAKRDHLDSKLSFVKGDFMKMEFDENTFDSVYAIEATCHAPTFEGVYGEIYKVLKPGGTFAVYEWVMTDKYDETNPEHRKIAYEIELGDGIPKMYSVDAARDALSKVGFEILEENDLADNDDEIPWYAPLTGEWKYVNSVADLATFFRTSRLGRAFTTSMVTVFEKLGLAPKGSVSVTNALEEAAVGLVAGGEKKLFTPMMLFVAKKPEQK

SEQ ID NO: 91731 - DNA, 1140 bp, Neurospora crassa
  CDS (1)..(1140)
atgccttccaccattgccctcgagaaggaggaccaccagcgtgatgctgagttcaagaaggtcatgcacggcgactcggccaaggccgctggcggtgtcgctgctctgctgaagaagaacaccgaggctcagcagattgccgtggacgagtacttcaagcacttcgacaacaagactgccgaggctgagacccaggctgatcgcgaggcccgtactaaggagtacgcgaccttgaccagacactactacaacctcgcgaccgatatttacgagtatggctggggccagtgcttccacttctgccgttactcccccggcgagtccttctaccaggctattgcccgccacgagcactacctcgctgcccagatcggcatcaagaaggacatgaaggttctcgatgtcggctgtggtgtcggtggccctgcgcgcgaaatcgccaagttcactgacgcccacatcaccggcctgaacaacaacgactaccagatcgaccgcgccactcattacgctgttcgcgatggtctctctggtcagctcaagttcgtcaagggtgactttatgcagatgtccttccccgacaactcgttcgatgccgtatacgccattgaggccaccgtccacgctcctaagctcgagggtgtctacggcgagatctaccgtgtccttaagcccggcggtacctttggtgtctatgaatggctcatgactgacaactacgataacgacaacgttgagcaccgtgacatccgtctcgccatcgaagtcggcaacggtatctccaacatggtgaccatcagcgagggtctcgccgccatgaagaacgtcggtttcgagctcgtccaccacgaggatcttgccgatcgcaacgaccccatgccctggtactggcccattgctggtgagctccgctacatgcagagctacctcgacttcttcaccgtcgtccgcatgacccacaccgcccgccgcatcctccacggtttcgccggcatcctcgagaccgtcggccttgcccccaaaggtaccaagaagaccgctgacgcgcttgcccgcggcgccgatggcctcgttgccggtgccaagaagaagctcttcacccccatgtacctcatggttggcaagaagcccctcaactaa

SEQ ID NO: 91732 - protein, 379 aa, Neurospora crassa
MPSTIALEKEDHQRDAEFKKVMHGDSAKAAGGVAALLKKNTEAQQIAVDEYFKHFDNKTAEAETQADREARTKEYATLTRHYYNLATDIYEYGWGQCFHFCRYSPGESFYQAIARHEHYLAAQIGIKKDMKVLDVGCGVGGPAREIAKFTDAHITGLNNNDYQIDRATHYAVRDGLSGQLKFVKGDFMQMSFPDNSFDAVYAIEATVHAPKLEGVYGEIYRVLKPGGTFGVYEWLMTDNYDNDNVEHRDIRLAIEVGNGISNMVTISEGLAAMKNVGFELVHHEDLADRNDPMPWYWPIAGELRYMQSYLDFFTVVRMTHTARRILHGFAGILETVGLAPKGTKKTADALARGADGLVAGAKKKLFTPMYLMVGKKPLN

SEQ ID NO: 91733 - DNA, 1134 bp, Pneumocystis carinii
  CDS (1)..(1134)
atgtcttttgaacttgaacgtattgatatagagaaggatcgggagttttcagagattatgcatgggaaagatgcagcaaaagaacggggattgctttcatcttttaggaaggataaagaagcacaaaagatagcgctagattcgtattttggattttggggtgataaatgtacctcagagaagaatgatattcatcaacaagagcgttttaagttttatgctactcttactcgtcattattataatcttgttactgatttttatgaatatggatggtcaacatcatttcatttttgccgttttgcaaaagacgaatcatttagccaggcaattgctcgtcatgagcactatattgcgttacatgctggaatacgtgaaggcgaaacggtattggatgttggatgtggggtaggtggacctgcatgtcagatttctgtttttacgggtgcaaatattgtgggattaaataataatgattatcaaattcagcgagctaaatattattcagaaaaaaagggattatcagataaattaaagtttatcaagggtgattttatgcaaatgccttttccagaaaattcatttgataaaatatactctattgaagcaacaattcatgcaccttctttagagggtgtttattcagaaatttatcgagtccttaagccaggaggtctttatgcttcatatgaatgggttatgcttaacaaatatgatgaaaatgaccctgaacatcaacaaattgtatatgggattgagattggtgattctatccctaaaatttctaaaattggagaagcagaagcagccttaattaaagtaggatttgaaattattcattctgaggagctttctacaaaaaatagcccactcccatggtattattatctcgatggtgatttgagaaaagttagatcgttcagagattttatttcgattgctcgtatgacaacaattgggaaatggcttattagttcttttataggacttatggaattcattggtcttcttccaaaaggtagtaaaaaagttaatgacattttgttggttgccgcggattcccttgtaaaggctggaaaaaaggaaatatttactcctatgcaattatgggtttgtagaaaacctttggtttaa

SEQ ID NO: 91734 - protein, 377 aa, Pneumocystis carinii
MSFELERIDIEKDREFSEIMHGKDAAKERGLLSSFRKDKEAQKIALDSYFGFWGDKCTSEKNDIHQQERFKFYATLTRHYYNLVTDFYEYGWSTSFHFCRFAKDESFSQAIARHEHYIALHAGIREGETVLDVGCGVGGPACQISVFTGANIVGLNNNDYQIQRAKYYSEKKGLSDKLKFIKGDFMQMPFPENSFDKIYSIEATIHAPSLEGVYSEIYRVLKPGGLYASYEWVMLNKYDENDPEHQQIVYGIEIGDSIPKISKIGEAEAALIKVGFEIIHSEELSTKNSPLPWYYYLDGDLRKVRSFRDFISIARMTTIGKWLISSFIGLMEFIGLLPKGSKKVNDILLVAADSLVKAGKKEIFTPMQLWVCRKPLV

SEQ ID NO: 91735 - DNA, 1137 bp, Schizosaccharomyces pombe
  CDS (1)..(1137)
atgagttctactgcccttcttccccctaacactgaccaggttttgtctcgccgtcttcacggcaaagctgccgagaaaaagactggtttggccgccattgcttccaaagacgttgatgagcaaagtaggaaacttcaagaatattttgagttttgggatcgcaatcatgaaaacgaatctgaggaagatagagcacgtcgtattgatggctataagtcggtagttaacagttattacgatttagctaccgatttgtatgaatatggctggtcgcaaagtttccatttctcccgtttttataagggagaagcctttgcccaaagtattgctagacacgagcattacttggcgtatcgtatgggtataaaacccggttctcgtgttttagacgttggatgtggtgttggtggacctgctcgtgaaattaccgagttcactggttgcaacttggttggtttgaacaacaacgattaccaaatttccagatgtaacaattacgctgtcaaaagaaatcttgacaaaaaacaagtttttgtgaagggtgatttcatgcatatgccctttgaggataacacatttgactatgtgtatgccattgaggctactgtacatgcgcccagtctagagggtgtttatggtgaaatattccgtgttttaaagcctggtggtgtcttcggtgtatatgaatgggttatgtcagacgactacgacagcagtattcctaagcatcgtgagattgcatacaacatcgaagttggtgatggtatccctcagatggtgcgtaaatgcgatgcagttgaagccatcaagaaagtaggctttaatttgcttgaagaagatgacttgactgaccatgacaatcccgaccttccatggtattatccattgactggtgacattaccaagtgtcaaaacatttgggatgtcttcactgttttccgcactagccgcttaggaaaactagttactcgttacagcgtccagtttttagagaaaattggagtcgctgccaaaggaactagtaaggttggtgacacccttgctatcgctcaaaaaggattgatcgagggtggtgaaactcatttgtttactcctatgttcctcatgattgctaagaaacccgaaacggacgcatag

SEQ ID NO: 91736 - protein, 378 aa, Schizosaccharomyces pombe
MSSTALLPPNTDQVLSRRLHGKAAEKKTGLAAIASKDVDEQSRKLQEYFEFWDRNHENESEEDRARRIDGYKSVVNSYYDLATDLYEYGWSQSFHFSRFYKGEAFAQSIARHEHYLAYRMGIKPGSRVLDVGCGVGGPAREITEFTGCNLVGLNNNDYQISRCNNYAVKRNLDKKQVFVKGDFMHMPFEDNTFDYVYAIEATVHAPSLEGVYGEIFRVLKPGGVFGVYEWVMSDDYDSSIPKHREIAYNIEVGDGIPQMVRKCDAVEAIKKVGFNLLEEDDLTDHDNPDLPWYYPLTGDITKCQNIWDVFTVFRTSRLGKLVTRYSVQFLEKIGVAAKGTSKVGDTLAIAQKGLIEGGETHLFTPMFLMIAKKPETDA

SEQ ID NO: 91737 - DNA, 1146 bp, Yarrowia lipolytica
  CDS (1)..(1146)
atgtcttccaacatcaaactggctcagaaggactacaagggcgacaaggagtttgccgcggctctgcacggcaaggaaggccacaagaaacacggtctgggcgcggtcatgtcgaaaaacaaggacgcccaggcggcggcggtggagggttttttccgaaactggggtgacaaggaccggtccaagatcgaggacgccgacgaacagggccgaatcgaagactacgccggactcaccaagcactactacaacctggtgacggacttttacgagtacggctggggctcgtcgttccacttttcccgatactacaagggagaggcgttccgacaggccaccgcccggcacgagcactacctggcctacaagatgggcatccagcccggcatgaaggtgctggacgttggctgtggagtcggaggccccgcacgtgaaatcgcccgattcactggtgccaacattgtcggtctcaacaacaacgactaccaagtggagcgaggcacccactactcggaggtccagggctttggcgaccaggtcacctacgtcaagggcgacttcatgcagatggacttccccgacaactcgtttgacgccgtctacgccattgaggccaccgtccacgcccctgttctggagggcgtctactccgagatcttccgagtgctcaagcccggcggagtctttggtgtttacgagtgggtcatgaccgacgagtacgacgagtccaaccccgagcaccgagacatttgctacggcattgagaagggcgacggtatccccaaaatgtacaagcgagaggtggcggtcaaggccctcgagaacgttggcttcgacattgaataccaggaggatctggctgctgatgacgccgaggtgccctggtactaccctctggccggtgagtggaagtacgtccagtctctcaacgacattgtcaccattggccgaacctcgcgactgggccgaatggtcaccatgaacgtgattggcgcgctggagaagattggtctggctccccagggttctcgacaggtgaccgaggccctggaggatgctgccgtcaacctggtggctggaggaaagaagaagctctttacccccatgatgctgtttgtttctcgaaagcccgaggacaagaactga

SEQ ID NO: 91738 - protein, 381 aa, Yarrowia lipolytica
MSSNIKLAQKDYKGDKEFAAALHGKEGHKKHGLGAVMSKNKDAQAAAVEGFFRNWGDKDRSKIEDADEQGRIEDYAGLTKHYYNLVTDFYEYGWGSSFHFSRYYKGEAFRQATARHEHYLAYKMGIQPGMKVLDVGCGVGGPAREIARFTGANIVGLNNNDYQVERGTHYSEVQGFGDQVTYVKGDFMQMDFPDNSFDAVYAIEATVHAPVLEGVYSEIFRVLKPGGVFGVYEWVMTDEYDESNPEHRDICYGIEKGDGIPKMYKREVAVKALENVGFDIEYQEDLAADDAEVPWYYPLAGEWKYVQSLNDIVTIGRTSRLGRMVTMNVIGALEKIGLAPQGSRQVTEALEDAAVNLVAGGKKKLFTPMMLFVSRKPEDKN

SEQ ID NO: 91739 - DNA, 1011 bp, Arabidopsis thaliana
  CDS (1)..(1011)
atggatctcgcgtcgaatcttggtgggaagatcgataaatccgatgttctcaccgccgtcgaaaagtatgagcaatatcatgtcttccatggaggaaacgaggaagagagaaaagccaattatactgacatggttaataagtactatgaccttgctactagcttttatgagtacggatggggagaatccttccattttgcacaaagatggaaaggagaatcgcttcgagagagtattaagcgacacgagcactttcttgctcttcagcttggcatccaaccaggacaaaaggtactggatgtaggatgtggaattggtggaccgttgagggaaattgcaagattcagcaattcagttgttaccgggctcaacaataacgaataccagatcaccagaggcaaggaactaaaccgacttgcaggtgtcgacaagacatgtaactttgtcaaggctgacttcatgaagatgccattcccggaaaacagtttcgatgcagtttatgcaatagaagcaacttgccatgcacctgatgcgtatggatgctacaaagagatctacagagtgctaaagcctgggcaatgttttgctgcctatgagtggtgtatgactgatgcatttgaccctgataacgccgaacatcagaaaataaagggagagatagagattggagatggtcttcctgacattaggctgactacaaaatgcctcgaagctctgaagcaggccggttttgaagtgatatgggaaaaggatctggccaaggactcgccggtcccatggtacttacctcttgacaaaaatcatttctcactcagtagcttccgccttacagctgttggacgattcataaccaaaaacatggtcaagatccttgaatacataagacttgcacctcaaggaagccaaagggtctcaaatttcctggagcaggctgcggaaggattagtcgacggtggaaggagagagattttcacgccaatgtatttcttcttggcccggaagccagagtaa

SEQ ID NO: 91740 - protein, 336 aa, Arabidopsis thaliana
MDLASNLGGKIDKSDVLTAVEKYEQYHVFHGGNEEERKANYTDMVNKYYDLATSFYEYGWGESFHFAQRWKGESLRESIKRHEHFLALQLGIQPGQKVLDVGCGIGGPLREIARFSNSVVTGLNNNEYQITRGKELNRLAGVDKTCNFVKADFMKMPFPENSFDAVYAIEATCHAPDAYGCYKEIYRVLKPGQCFAAYEWCMTDAFDPDNAEHQKIKGEIEIGDGLPDIRLTTKCLEALKQAGFEVIWEKDLAKDSPVPWYLPLDKNHFSLSSFRLTAVGRFITKNMVKILEYIRLAPQGSQRVSNFLEQAAEGLVDGGRREIFTPMYFFLARKPE

SEQ ID NO: 91741 - DNA, 1086 bp, Arabidopsis thaliana
  CDS (1)..(1086)
atggactctttaacactcttcttcaccggtgcactcgtcgccgtcggtatctactggttcctctgcgttctcggtccagcagagcgtaaaggcaaacgagccgtagatctctctggtggctcaatctccgccgagaaagtccaagacaactacaaacagtactggtctttcttccgccgtccaaaagaaatcgaaaccgccgagaaagttccagacttcgtcgacacattctacaatctcgtcaccgacatatacgagtggggatggggacaatccttccacttctcaccatcaatccccggaaaatctcacaaagacgccacgcgcctccacgaagagatggccgtagatctgatccaagtcaaacctggtcaaaagatcctagacgtcggatgcggtgtcggcggtccgatgcgagcgattgcatctcactcgcgagctaacgtagtcgggattacaataaacgagtatcaggtgaacagagctcgtctccacaataagaaagctggtctcgacgcgctttgcgaggtcgtgtgtggtaacttcctccagatgccgttcgatgacaacagtttcgacggtgcttattccatcgaagccacgtgtcacgcgccgaagctggaagaagtgtacgcagagatctacagggtgttgaaacccggatctatgtatgtgtcgtacgagtgggttacgacggagaaatttaaggcggaggatgacgaacacgtggaggtaatccaagggattgagagaggcgatgcgttaccagggcttagggcttacgtggatatagctgagacggctaaaaaggttgggtttgagatagtgaaggagaaggatctggcgagtccaccggctgagccgtggtggactaggcttaagatgggtaggcttgcttattggaggaatcacattgtggttcagattttgtcagcggttggagttgctcctaaaggaactgttgatgttcatgagatgttgtttaagactgctgattatttgaccagaggaggtgaaaccggaatattctctccgatgcatatgattctctgcagaaaaccggagtcaccggaggagagttcttga

SEQ ID NO: 91742 - protein, 361 aa, Arabidopsis thaliana
MDSLTLFFTGALVAVGIYWFLCVLGPAERKGKRAVDLSGGSISAEKVQDNYKQYWSFFRRPKEIETAEKVPDFVDTFYNLVTDIYEWGWGQSFHFSPSIPGKSHKDATRLHEEMAVDLIQVKPGQKILDVGCGVGGPMRAIASHSRANVVGITINEYQVNRARLHNKKAGLDALCEVVCGNFLQMPFDDNSFDGAYSIEATCHAPKLEEVYAEIYRVLKPGSMYVSYEWVTTEKFKAEDDEHVEVIQGIERGDALPGLRAYVDIAETAKKVGFEIVKEKDLASPPAEPWWTRLKMGRLAYWRNHIVVQILSAVGVAPKGTVDVHEMLFKTADYLTRGGETGIFSPMHMILCRKPESPEESS

SEQ ID NO: 91743 - DNA, 1080 bp, Arabidopsis thaliana
  CDS (1)..(1080)
atggactcggtggctctctactgcaccgctggtctcattgccggcgccgtctactggttcatatgcgtcctaggtccagcagaacgaaaaggcaaacgagcctctgatctctccggcggctcaatctccgcagaaaaagtcaaagacaactataaccaatactggtctttcttccgcaaaccaaaagagatcgaatcagccgagaaagtacctgacttcgtcgacacgttctacaatcttgtcactgatatctacgagtggggatggggacaatctttccatttctctcctcatgtccctggaaaatccgacaaagacgccacaagaatccacgaagaaatggccgtcgatctcatcaaagtgaaaccgggacaaaagattcttgacgctggttgcggcgtgggtgggccgatgagagccatcgcggcccattccaaggcccaagtcactggaatcactatcaacgagtaccaagtgcaacgagccaagcttcacaacaagaaagctggacttgattctctctgcaacgtcgtttgtggtaactttttaaagatgccgttcgatgaaaacacgtttgacggagcttactcgatcgaagctacgtgtcacgctcctaagctcgaagaagtatactcggagatcttcagagtgatgaaaccaggatctttgttcgtgtcctacgaatgggtcaccactgaaaaatacagagacgatgacgaagaacacaaggacgtgattcaagggatcgagagaggagacgcacttcctggactaagaagctacgctgatatagccgtgacggcgaagaaagttgggtttgaggtagtgaaggagaaagatttggctaaaccaccgtctaaaccgtggtggaaccggttaaagatgggaaggattgcttattggagaaaccatgttgtggttgtgattctttctgctattggggttgctcctaaaggaactgttgatgttcataagatgttgtttaagactgctgattatttgaccagaggtggtgagactggaatcttctctccgatgcatatgattctctgtagaaaaccagagaaagcttctgaatga

SEQ ID NO: 91744 - protein, 359 aa, Arabidopsis thaliana
MDSVALYCTAGLIAGAVYWFICVLGPAERKGKRASDLSGGSISAEKVKDNYNQYWSFFRKPKEIESAEKVPDFVDTFYNLVTDIYEWGWGQSFHFSPHVPGKSDKDATRIHEEMAVDLIKVKPGQKILDAGCGVGGPMRAIAAHSKAQVTGITINEYQVQRAKLHNKKAGLDSLCNVVCGNFLKMPFDENTFDGAYSIEATCHAPKLEEVYSEIFRVMKPGSLFVSYEWVTTEKYRDDDEEHKDVIQGIERGDALPGLRSYADIAVTAKKVGFEVVKEKDLAKPPSKPWWNRLKMGRIAYWRNHVVVVILSAIGVAPKGTVDVHKMLFKTADYLTRGGETGIFSPMHMILCRKPEKASE

SEQ ID NO: 91745 - DNA, 1182 bp, Oryza sativa
  CDS (1)..(1182)
atgcaaccccacgataaaacccacgcgagggagagaagccaccccatcctccccacctccctcctcgccggccggagttctcgtctccggcgaccgccgccgccgccgccctcaccgtccggtggagctccggtgatcgacgccgcgatgtcgaggtctggggccatggatcttgcatctggactcggggggaagatcaccaaggatgaggtcaagtcggctgtcgatgagtatgagaaataccatggatactatggaggaaaagaagaagcaagaaagtccaactacacagacatggttaataaatactatgatcttgccaccagcttctatgagtatggttggggtgaatccttccactttgctcacagatggaatggagaatccctacgtgaaagcattaagcgacatgagcactttcttgcccttcagcttggagtgaaaccaggaatgaaggttttggacgtcggttgtggaataggcggaccactaagagaaattgccaaatttagcttggcttcagtcactggattgaacaacaatgagtaccagataactaggggaaaggagcttaatcgggtagcaggagttagtggaacttgcgactttgtgaaggcagacttcatgaagatgccgttttctgataacacttttgatgctgtctatgccattgaggcaacatgccacgcacctgatccggttggctgctataaggagatctatcgtgtattgaagcctggccagtgttttgctgtgtatgagtggtgtattactgatcactatgaaccgaacaatgcaacacacaagaggatcaaggatgaaatcgagcttggcaatggcctgccagatatccgaagcactcaacaatgtcttcaagctgcaaaagatgctgggtttgaggttatttgggataaagaccttgctgaagattccccggttccttggtacctgcccttggatccaagccggttttccttgagtagcttccgtctgactactgtggggcgtgcaattactcgcacaatggtgaaggcattggaatacgtcggccttgccccacaaggaagtgaaagggtatctaactttttagagaaggcagctgaaggtctcgtcgaaggtggcaagaaggaaatcttcacgccgatgtacttctttttggttcgcaagcctatctcagaatga

SEQ ID NO: 91746 - protein, 393 aa, Oryza sativa
MQPHDKTHARERSHPILPTSLLAGRSSRLRRPPPPPPSPSGGAPVIDAAMSRSGAMDLASGLGGKITKDEVKSAVDEYEKYHGYYGGKEEARKSNYTDMVNKYYDLATSFYEYGWGESFHFAHRWNGESLRESIKRHEHFLALQLGVKPGMKVLDVGCGIGGPLREIAKFSLASVTGLNNNEYQITRGKELNRVAGVSGTCDFVKADFMKMPFSDNTFDAVYAIEATCHAPDPVGCYKEIYRVLKPGQCFAVYEWCITDHYEPNNATHKRIKDEIELGNGLPDIRSTQQCLQAAKDAGFEVIWDKDLAEDSPVPWYLPLDPSRFSLSSFRLTTVGRAITRTMVKALEYVGLAPQGSERVSNFLEKAAEGLVEGGKKEIFTPMYFFLVRKPISE

SEQ ID NO: 91747 - DNA, 1047 bp, Oryza sativa
  CDS (1)..(1047)
atgtcgaagacgagtgccctggatcttgcttcaggattaggagggaagatcagaaaggagcaagtcaaatcggccgtggatcagtatgagaattatcatgaaatttatggaggtgaagtggaatcaaggacatccaactacgctgatttggcaaacaagtattatgatcttgtcaccagtttctacgaatacggctggggagaatcattccatttcggcagcagatggcaaggagaaactttacgcgaaagccttaagcgtcatgagcattttctggccttgcaactcggcctcaagaagggcatgaaggtcctagacgtggggtgtggcattggaggacccttgagagagattgccagattcagctcagcatcggtgactggactgaacaacaatgcgtaccagatatcaaggggcaaggaactcaacttttctgtcggtttgagtgaaacctgcaactttgtcaaggctgacttcatgaacatgcctatccctgatgccaccttcgacgcagcctacgccatcgaggcgacatgccatgcccctgatgctgttggtgtctacagggagatctgccgagtgctgaaaccagggcagttgttcgcgttggacgagtggtgcatgaccgacaagtatgatccaggcaactcgaggcaccggagcatcaaggccgagatcgagctcggcaatggccttccagacatcagaaccaccaaacagtgcatccaggctctcaaagacgcgggctttgaggttgtatcggtgaaggatctggcagaggattcgccgttgccatggtacctgcctcttgattccagccagttctcactcaatggcttccgtctcacccgtgtcggccgcttcatcactcacatgctggtaaagacgctcgagtgcctccatgttgccccacagggcagcctgagggtctccagctttcttgagaccgcggccgaagggcttgtgaagggcgccaaggaagggatcttcacgcccattttcttcgtcttggctcggaaacctctggacaagcagccagagatctga

SEQ ID NO: 91748 - protein, 348 aa, Oryza sativa
MSKTSALDLASGLGGKIRKEQVKSAVDQYENYHEIYGGEVESRTSNYADLANKYYDLVTSFYEYGWGESFHFGSRWQGETLRESLKRHEHFLALQLGLKKGMKVLDVGCGIGGPLREIARFSSASVTGLNNNAYQISRGKELNFSVGLSETCNFVKADFMNMPIPDATFDAAYAIEATCHAPDAVGVYREICRVLKPGQLFALDEWCMTDKYDPGNSRHRSIKAEIELGNGLPDIRTTKQCIQALKDAGFEVVSVKDLAEDSPLPWYLPLDSSQFSLNGFRLTRVGRFITHMLVKTLECLHVAPQGSLRVSSFLETAAEGLVKGAKEGIFTPIFFVLARKPLDKQPEI

SEQ ID NO: 91749 - DNA, 1023 bp, Oryza sativa
  CDS (1)..(1023)
atggatttggcatccaatctcggtggcaagattgacaaagccgaagttctctctgccgttcagaagtatgagaagtatcatgtttgctatggaggtcaagaggaagagagaaaagctaattataccgatatggttaataaatactatgatcttgttaccagcttttatgagtttggctggggggaatctttccattttgcacccagatggaaaggagaatctcttcgagagagcatcaaaagacatgaacacttccttgcttcacaacttggactgaagccagggcagaaggttttggatgttggatgtggaattgggggaccattaagagaaatttctcgattcagcttaacttcaattaccgggttgaataacaatgagtaccagataacaagaggaaaggaactcaatcgcattgctggagtggacaagacttgcaattttgtcaaggctgacttcatgaaaatgccattaccagacaacagttttgatgcagtgtatgcgattgaagccacttgccatgcaccagatgcttatggatgctataaagagatttttagagtgttaaagcctggtcaatgttttgctgcttatgaatggtgcatgaccgattcttttgatccccaaaacccagagcaccaaaaaatcaaggcagaaattgagattggtgatgggctacctgacattcgattgactgctaagtgtcttgaagctctgaagcaagcaggttttgaggtaatatgggagaaagatctagcagtggactctcctcttccttggtatttgcctttagacaaaagtcatttctcactgagtagcttccgtctaactgctgtcgggcgacttttcaccaaaaacatggtcaaggttctggagtatgttggactggctccaaagggtagtctaagggttcaagatttcctagagaaggctgcagagggactagttgaaggaggaaagagagagattttcacaccaatgtacttcttcttggcccggaagcctgattcagacaggaactaa

SEQ ID NO: 91750 - protein, 340 aa, Oryza sativa
MDLASNLGGKIDKAEVLSAVQKYEKYHVCYGGQEEERKANYTDMVNKYYDLVTSFYEFGWGESFHFAPRWKGESLRESIKRHEHFLASQLGLKPGQKVLDVGCGIGGPLREISRFSLTSITGLNNNEYQITRGKELNRIAGVDKTCNFVKADFMKMPLPDNSFDAVYAIEATCHAPDAYGCYKEIFRVLKPGQCFAAYEWCMTDSFDPQNPEHQKIKAEIEIGDGLPDIRLTAKCLEALKQAGFEVIWEKDLAVDSPLPWYLPLDKSHFSLSSFRLTAVGRLFTKNMVKVLEYVGLAPKGSLRVQDFLEKAAEGLVEGGKREIFTPMYFFLARKPDSDRN

SEQ ID NO: 91751 - DNA, 1116 bp, Zea mays
  CDS (1)..(1116)
atggaggcggcgacgatggcgtggacggcggcggtggtcggggcggggctggtgtactggttcgtgtgggtgatgggcgcggcggaggtgaagggcaagcgggcggtggatctcaagatgggatccataacgcgggacaaggtgcaggacaagtacacccagtactggtccttcttccgccggcccaaggagacggccaccacggcggcgtcggcggagaaggtgccggccttcgtggacaccttctacaacctggtgacggacatctacgagtggggctggggccagtcgttccacttctcgccgtccctgcccggccgctcccaccgcgacgccacgcgcgtccacgaggagcgcgtcgccgacctcctcggcgcccggccgggccaccgcctcctcgacgtgggctgcggcgtcggcgggcccatgcgcgccatcgccgcgcactcggggtccgacgtcgtcggcatcaccatcaacgagtaccaggtgaagcgcgcccgcgcgcacaaccgcaaggccggcctcgactccccccgctgcgaggtcgtctgcggcaacttcctctccatgcccttcccggacgcgtccttcgacggcgcctactccatcgaggccacctgccacgcgcccaggctgcaggacgtctacggcgaggtctaccgcgtgctcaagccggggcgcctctacgtctcctacgaatgggtcaccaccccgctgtaccgcgccgaggacccgggccacgtcgagtgcgtccacggcatcgagcgcggcgacgcgctcccggggctccgccgccaggacgagatcgcgtccatcgccgaggaggccggcttcgaggtgctcaaggagcaggacctggcgctgccccccgcgctgccctggtggacgcgcctcaagatgggccgcatcgcctactggcgcaactccatcgtcgtccgcgtgctcaccctgctccggatcgcgcccaagggcgtctccgaggtgcacgagatgctgtacgagaccgcgcagcacctcacccgcggcggcgagaccggcatcttcacgcccatgcacatggtgctcctccgcaagccgcccgccgccgcatccaccgacgaggaggccaaatag

SEQ ID NO: 91752 - protein, 371 aa, Zea mays
MEAATMAWTAAVVGAGLVYWFVWVMGAAEVKGKRAVDLKMGSITRDKVQDKYTQYWSFFRRPKETATTAASAEKVPAFVDTFYNLVTDIYEWGWGQSFHFSPSLPGRSHRDATRVHEERVADLLGARPGHRLLDVGCGVGGPMRAIAAHSGSDVVGITINEYQVKRARAHNRKAGLDSPRCEVVCGNFLSMPFPDASFDGAYSIEATCHAPRLQDVYGEVYRVLKPGRLYVSYEWVTTPLYRAEDPGHVECVHGIERGDALPGLRRQDEIASIAEEAGFEVLKEQDLALPPALPWWTRLKMGRIAYWRNSIVVRVLTLLRIAPKGVSEVHEMLYETAQHLTRGGETGIFTPMHMVLLRKPPAAASTDEEAK

SEQ ID NO: 91753 - DNA, 1071 bp, Brassica napus
  CDS (1)..(1071)
atggacagtgtcgcactcttcttcactggagctctcgtagccggcggaatctactggttcctgtgcgtcctgggaccagcggagcgtaaaggcaaacgagcgttggatctatcgggcgggtccatctcggcggagaaagttcaagacaagtacaaacagtactggtcgttcttccgccgtccgaaagagatcgaaaccgccgagaaagtcccggacttcgtggacacgttctacaacctcgtcaccgacatctacgagtggggatggggacagtccttccacttctctccttccatccgaggcaaatcccaccgcgacgccacgcgcctccacgaagagatggccgtagatctgatccaagtgaaaccgggtcaaaagatcctcgatgtcggatgcggcgtcggaggtccgatgcgcgcgattgcatcccactcgcgagccaacgtggtggggatcacgatcaacgagtaccaggtgaagagagcgcgtgaccacaacagaaaagcaggactcgaagcgctctgcgaggtcgtgtgtggtaacttcctccagatgcccttcgatgataacacctacgaaggcgcgtactctatcgaagcgacgtgtcacgcgccgaaactggaagaagtctacgccgagatctacagggtgttgaaacccggatctttgtacgtatcgtacgagtgggtcaccactgataagttcaacgccgaggatgaggaacacgtggaggtcatccaaggcatcgagaggggtgacgcgcttcctgggcttagggcttactcggatatagccgaggccgccaagaaagttggcttccaagttgtcaaggagaaggatctagcggctccaccggctgagccgtggtggactaggcttaagatgggtcggctcgcttattggaggaaccacattgtggttcagattctgtctgctgttggagttgcgcctaagggaaccgtcgatgttcacgagatgttgtttaagactgctgatttcttgtccagaggaggcgaaactgaaattttctctccgatgcatatgattctctgccggaaacctatgtcttaa

SEQ ID NO: 91754 - protein, 356 aa, Brassica napus
MDSVALFFTGALVAGGIYWFLCVLGPAERKGKRALDLSGGSISAEKVQDKYKQYWSFFRRPKEIETAEKVPDFVDTFYNLVTDIYEWGWGQSFHFSPSIRGKSHRDATRLHEEMAVDLIQVKPGQKILDVGCGVGGPMRAIASHSRANVVGITINEYQVKRARDHNRKAGLEALCEVVCGNFLQMPFDDNTYEGAYSIEATCHAPKLEEVYAEIYRVLKPGSLYVSYEWVTTDKFNAEDEEHVEVIQGIERGDALPGLRAYSDIAEAAKKVGFQVVKEKDLAAPPAEPWWTRLKMGRLAYWRNHIVVQILSAVGVAPKGTVDVHEMLFKTADFLSRGGETEIFSPMHMILCRKPMS

SEQ ID NO: 91755 - DNA, 1029 bp, Brassica napus
  CDS (1)..(1029)
atgtcaaagactggctctctggatctcgcctccaaccttggtggaaacatcgataagtccgatgttctcaccgccgtcgaaaagtatgagcagtatcatgacttccatggaggtgacgaggaagagcgaaaagccaattacactgacatggttaataagtactatgaccttgctactagcttttatgagtatggttggggagagtccttccactttgcacacagatggaagggagaatcacttcgagagagtatcaaacgtcacgagcactttcttgctcttcagcttggcgttaaaccaggacaaaaggtactggatgtaggatgtggaattggtggaccactgagagaaattgcacgattcagcaattcatctgttactgggctcaacaataatgaataccagatcaccagaggcaaggaactaaaccgacttgcaggtgtcgacaagacatgtaactttgtcaaggctgacttcatgaagatgccattccctgaaaacacttttgatgcagtttatgctattgaggcaacctgccacgcacctgatgcatatggatgctacaaagagatattcagagtgctaaagcccggacaatgttttgctgcctatgagtggtgcatgactgatgcatttgaccctgctaacgcccaacatcagaaaataaaggcagagatagagatcggagatggtctccctgacattaggcttacttcaaaatgcctcgaagccctgaaacaggctggttttgaagtgatatgggaaaaggatctggcggaggactcgccagtcccatggtacttacctctggacaaaaaccacttctcgctcagtagcttccgcctaacagctgttggacggttcataaccaaaaacatggtgaaggtccttgagtacataagacttgcacctaaaggaagccaaagggtgtcagattttctggagaaggccgcagaaggattagtcgacggtggaaggagggagattttcacgccaatgtatttcttcttggcccggaagccagagtga

SEQ ID NO: 91756 - protein, 342 aa, Brassica napus
MSKTGSLDLASNLGGNIDKSDVLTAVEKYEQYHDFHGGDEEERKANYTDMVNKYYDLATSFYEYGWGESFHFAHRWKGESLRESIKRHEHFLALQLGVKPGQKVLDVGCGIGGPLREIARFSNSSVTGLNNNEYQITRGKELNRLAGVDKTCNFVKADFMKMPFPENTFDAVYAIEATCHAPDAYGCYKEIFRVLKPGQCFAAYEWCMTDAFDPANAQHQKIKAEIEIGDGLPDIRLTSKCLEALKQAGFEVIWEKDLAEDSPVPWYLPLDKNHFSLSSFRLTAVGRFITKNMVKVLEYIRLAPKGSQRVSDFLEKAAEGLVDGGRREIFTPMYFFLARKPE

SEQ ID NO: 91757 - DNA, 1071 bp, Brassica napus
  CDS (1)..(1071)
atggacagtgtcgcactcttcttcactggagctctcgtagccggcggaatctactggttcctgtgcgtcctgggaccagcggagcgtaaaggcaaacgagcgttggatctatcgggcgggtccatctcggcggagaaagttcaagacaagtacaaacagtactggtcgttcttccgccgtccgaaagagatcgaaaccgccgagaaagtcccggacttcgtggacacgttctacaacctcgtcaccgacatctacgagtggggatggggacagtccttccacttctctccttccatccgaggcaaatcccaccgtgacgccacgcgcctccacgaagagatggccgtagatctgatccaagtgaaaccgggtcaaaagatcctcgatgtcggatgcggcgtgggaggtccgatgcgcgcgattgcatcccactcgcgagccaacgtggtggggatcacgatcaacgagtaccaggtgaagagagcgcgtgaccacaacaggaaagcaggactcgacgcgctctgcgaggtcgtgtgtggtaacttcctccagatgcccttcgatgataataccttcgacggcgcgtactctatcgaagcgacgtgtcacgcgccgaacctggaagaagtctacgccgagatctacagggtgttgaaacccggatctttgtatgtatcgtacgagtgggtcaccactgataagttcaacgcccaggatgaggaacacgtggaggtcatccaagggatcgagaggggtgacgcgcttcctggccttagggcttactccgatatagcccaggccgccaagaaagttgggttccaaattgtcaaggagaaggatcttgccgctccaccggctcagccgtggtggactaggcttaagatgggtcgcctcgcttattggaggaaccacgttgtcgttcagatcttgtctgccgttggagttgcgcctaagggaaccgtcgatgttcatgagatgttgtttaagactgctgatttcttgtccagaggaggcgaaactgaaattttctctcccatgcatatgattctctgccggaaacctatgtcttaa

SEQ ID NO: 91758 - protein, 356 aa, Brassica napus
MDSVALFFTGALVAGGIYWFLCVLGPAERKGKRALDLSGGSISAEKVQDKYKQYWSFFRRPKEIETAEKVPDFVDTFYNLVTDIYEWGWGQSFHFSPSIRGKSHRDATRLHEEMAVDLIQVKPGQKILDVGCGVGGPMRAIASHSRANVVGITINEYQVKRARDHNRKAGLDALCEVVCGNFLQMPFDDNTFDGAYSIEATCHAPNLEEVYAEIYRVLKPGSLYVSYEWVTTDKFNAQDEEHVEVIQGIERGDALPGLRAYSDIAQAAKKVGFQIVKEKDLAAPPAQPWWTRLKMGRLAYWRNHVVVQILSAVGVAPKGTVDVHEMLFKTADFLSRGGETEIFSPMHMILCRKPMS

SEQ ID NO: 91759 - DNA, 1083 bp, Brassica napus
  CDS (1)..(1083)
atggactcggtgacgctctactgcaccgccgccctagtcgccggcggcatctactggttcgtctgcgtcttaggtccagcagaacgaaagggcaaacgagccttagatctctccggcggctccatctccgccgagaacgtcaaagacaactacaaccaatactggtcgttcttccgcaaaccgaaagagatcgagaccgccgagaaagtccccgacttcgtcgacacgttctacaacctcgtcaccgacatctacgagtggggatggggacagtccttccacttctccccctccatcccgggcaaatccgacaaggacgccacgaggatccacgaagagatggcagtggatctcatcaaagtcaaaccggggcaaaagatcctagacgcggggtgcggagtcggtgggccgatgagagccatcgcggcccattcgaaggcccatgttaccggaatcacaatcaacgactaccaagtgaaacgggccaagctccacaataaaaaagcgggcttggaccatctatgcgacgtcgtttgcggtaattttttacaaatgccgttcgatgataactccttcgacggggcttactccatcgaggccacgtgtcacgctcccaagctggaggaagtgtacgcggagatctacagggtgatgaagcccggatctttgtacgtttcgtacgagtgggtcacgacggataagtacagagacgacgacgaagagcacagggaggtgattcaagggatcgagaggggagacgctcttcccggtatgagaaggtactcggacatcgctgcggcggcgaggagagtcgggttcgaggtcgtgcaagagaaggatttggctaaaccgcccgctaaaccgtggtggaacaggcttaagatgggtcggattgcgtactggaggaaccatgttgtggttgtggttctgtctgctgtcgggatcgctccgaaaggaaccgttgatgttcatgagatgttgtttaagactgctgattacttgtctagaggtggcgagactggtatcttctcgccgatgcatatgattctctgtagaaaaccagagaaaacttcttctgaatga

SEQ ID NO: 91760 - protein, 360 aa, Brassica napus
MDSVTLYCTAALVAGGIYWFVCVLGPAERKGKRALDLSGGSISAENVKDNYNQYWSFFRKPKEIETAEKVPDFVDTFYNLVTDIYEWGWGQSFHFSPSIPGKSDKDATRIHEEMAVDLIKVKPGQKILDAGCGVGGPMRAIAAHSKAHVTGITINDYQVKRAKLHNKKAGLDHLCDVVCGNFLQMPFDDNSFDGAYSIEATCHAPKLEEVYAEIYRVMKPGSLYVSYEWVTTDKYRDDDEEHREVIQGIERGDALPGMRRYSDIAAAARRVGFEVVQEKDLAKPPAKPWWNRLKMGRIAYWRNHVVVVVLSAVGIAPKGTVDVHEMLFKTADYLSRGGETGIFSPMHMILCRKPEKTSSE

SEQ ID NO: 91761 - DNA, 1023 bp, Glycine max
  CDS (1)..(1023)
atggatttggcatccaatctcggtggcaagattgacaaagccgaagttctctctgccgttcagaagtatgagaagtatcatgtttgctatggaggtcaagaggaagagaggaaagctaattataccgatatggttaataaatactacgatcttgttaccagcttttatgagtttggctggggggaatctttccattttgcacccagatggaaaggggaatctcttcgagagagcatcaagcgacatgaacacttccttcctttacaacttggactgaagccagggcagaaggttttggatgttggatgtggaattgggggaccattaagagaaatttctcgatttagctcaacttcaattaccgggttgaataacaatgagtaccagataacaagaggaaaggaactcaatcgcattgctggagtggacaagacttgcaattttgtcaaggctgacttcatgaaaatgccattcccagacaacagttttgatgcagtgtatgcgattgaagccacttgccatgcaccggatgcttatggatgctataaagagatttttagagtgttaaagcctggtcaatattttgctgcttatgaatggtgcatgaccgattcttttgatccccaaaacccagagcaccaaaaaatcaaggcagaaattgagattggtgatgggctacctgacattcgattgactgctaagtgtcttgaagctctgaagcaagcaggttttgaggtaatatgggagaaagatctagcagtggactctcctcttccttggtatttgcctttagacaaaagtcacttctcactgagtagcttccgtctaactgctgtcgggcgacttttcaccaaaaacatggtcaaggttctggagtatgttggactggctccaaagggtagtctaagggttcaagacttcctggagaaggctgcagagggactagttgaaggagggaagagagagattttcacaccaatgtacttcttcctggcacggaagcctgatttagacaggaactaa

SEQ ID NO: 91762 - protein, 340 aa, Glycine max
MDLASNLGGKIDKAEVLSAVQKYEKYHVCYGGQEEERKANYTDMVNKYYDLVTSFYEFGWGESFHFAPRWKGESLRESIKRHEHFLPLQLGLKPGQKVLDVGCGIGGPLREISRFSSTSITGLNNNEYQITRGKELNRIAGVDKTCNFVKADFMKMPFPDNSFDAVYAIEATCHAPDAYGCYKEIFRVLKPGQYFAAYEWCMTDSFDPQNPEHQKIKAEIEIGDGLPDIRLTAKCLEALKQAGFEVIWEKDLAVDSPLPWYLPLDKSHFSLSSFRLTAVGRLFTKNMVKVLEYVGLAPKGSLRVQDFLEKAAEGLVEGGKREIFTPMYFFLARKPDLDRN

SEQ ID NO: 91763 - DNA, 1092 bp, Glycine max
  CDS (1)..(1092)
atggactccctctctctcttctgcaccggagcccttctcgccggcggcctctactggttcgtctgtgttctgggccccgccgagcagaagggcaaacgcgccaccgatctatccggcggctccatctccgccgagaaagtccaagacaactacaagcagtactggtccttcttccgccgccccaaggagatcgagaccgccgacaaagttcccgacttcgtcgacaccttctacaatctagtcaccgacatctacgagtggggctggggccagtccttccacttctccccctccatccccggtaagtcccaccgcgaggccacgcgcctccacgaggagatggccgtcgatctcatcgaggccaagcccggcaacaaaatcctggacgtgggctgcggcgtgggcgggcccatgcgggccatcgcggcccactcccgcgcgaacgtggtgggcatcaccatcaacgagtaccaggtcaatcgagcaaggatgcacaacaagaaggctgggttggactctctctgcgaggtcgtgtgtgggaatttccttaagatgccgtttgtcgacaacagcttcgacggagcgtactccatcgaggccacgtgtcacgctcccaagctggaagaagtgtacgccgaaatcttccgagttctgaaaccgggggcgctctacgtttcctacgagtgggtgacgacggataagtacagcggcgatgaccctgaacacgtggaggtcattcaggggattgagaggggtgacgcgttgcctggcctcagaagctacgccgaaatagccgaaacggcgcgtaaggtagggtttgctgttgtgaaggagcgggatctggccaagccgccggctcttccctggtggagccgattgaagatgggtaggatcgcgtactggcggaaccatattgtggtcactgttctcgccgctttgggaatcgcgcctaaggggaccgtcgatgttcatgagatgctcttcaagaccgctgactatttgaccagagggggtgactctgggattttctctccgatgcacatgatcctctgcagaaagccccatgacaaggacgaacaaaactctggttag

SEQ ID NO: 91764 - protein, 363 aa, Glycine max
MDSLSLFCTGALLAGGLYWFVCVLGPAEQKGKRATDLSGGSISAEKVQDNYKQYWSFFRRPKEIETADKVPDFVDTFYNLVTDIYEWGWGQSFHFSPSIPGKSHREATRLHEEMAVDLIEAKPGNKILDVGCGVGGPMRAIAAHSRANVVGITINEYQVNRARMHNKKAGLDSLCEVVCGNFLKMPFVDNSFDGAYSIEATCHAPKLEEVYAEIFRVLKPGALYVSYEWVTTDKYSGDDPEHVEVIQGIERGDALPGLRSYAEIAETARKVGFAVVKERDLAKPPALPWWSRLKMGRIAYWRNHIVVTVLAALGIAPKGTVDVHEMLFKTADYLTRGGDSGIFSPMHMILCRKPHDKDEQNSG

SEQ ID NO: 91765 - DNA, 1023 bp, Glycine max
  CDS (1)..(1023)
atggatttggcatccaatctcggtggcaagattgacaaagccgaagttctctctgccgttcagaagtatgagaagtatcatgtttgctatggaggtcaagaggaagagaggaaagctaattataccgatatggttaataaatactacgatcttgttaccagcttttatgagtttggctggggggaatctttccattttgcacccagatggaaaggggaatctcttcgagagagcatcaagcgacatgaacacttccttcctttacaacttggactgaagccagggcagaaggttttggatgttggatgtggaattgggggaccattaagagaaatttctcgatttagctcaacttcaattaccgggttgaataacaatgagtaccagataacaagaggaaaggaactcaatcgcattgctggagtggacaagacttgcaattttgtcaaggctgacttcatgaaaatgccattcccagacaacagttttgatgcagtgtatgcgattgaagccacttgccatgcaccggatgcttatggatgctataaagagatttttagagtgttaaagcctggtcaatattttgctgcttatgaatggtgcatgaccgattcttttgatccccaaaacccagagcaccaaaaaatcaaggcagaaattgagattggtgatgggctacctgacattcgattgactgctaagtgtcttgaagctctgaagcaagcaggttttgaggtaatatgggagaaagatctagcagtggactctcctcttccttggtatttgcctttagacaaaagtcacttctcactgagtagcttccgtctaactgctgtcgggcgacttttcaccaaaaacatggtcaaggttctggagtatgttggactggctccaaagggtagtctaagggttcaagacttcctggagaaggctgcagagggactagttgaaggagggaagagagagattttcacaccaatgtacttcttcctggcacggaagcctgatgtagacaggaactaa

SEQ ID NO: 91766 - protein, 340 aa, Glycine max
MDLASNLGGKIDKAEVLSAVQKYEKYHVCYGGQEEERKANYTDMVNKYYDLVTSFYEFGWGESFHFAPRWKGESLRESIKRHEHFLPLQLGLKPGQKVLDVGCGIGGPLREISRFSSTSITGLNNNEYQITRGKELNRIAGVDKTCNFVKADFMKMPFPDNSFDAVYAIEATCHAPDAYGCYKEIFRVLKPGQYFAAYEWCMTDSFDPQNPEHQKIKAEIEIGDGLPDIRLTAKCLEALKQAGFEVIWEKDLAVDSPLPWYLPLDKSHFSLSSFRLTAVGRLFTKNMVKVLEYVGLAPKGSLRVQDFLEKAAEGLVEGGKREIFTPMYFFLARKPDVDRN

SEQ ID NO: 91767 - DNA, 1068 bp, Zea mays
  CDS (1)..(1068)
atggccaagtcaggggcgctagaacttgctcggagcaccggagggtcgcttagcaaggaccaagtcaaatccgccgttgatcagtatgtcaaataccacgacctccatggaggcaaacaagaatcaaggaagtcaaattacaccgatttggcaaacaagtactatgatcttgtcactggcttttacgaatatggatggggcgactcattccatcttgctggcggatatccgggtgagacttcccgtgaagccattaagcggcaccagcattttttggcactacaattggggctcaagaagggtatgaaggttttggatgtgggatgtggaattgggggacctttaatagaaatcgccagattcagctcaacatcgataactggactgaacaacaatgactaccacatctcaaggggcaaggagctcattttttcagcaggtttgagtgagcaatgctgcttcttgaagggggacttcatggacatgccaatatctgataacacctttgatgcggcctatgcaatacaggctacatgtcatgcaccagatgcacaaggcgtctatagtgaggtctaccgtgtgctgaaacctgggcagtattttgcactggatgaatggtgcttgaccgaccgatttgatcccaacaacgccaagcatttggccatcaaggctgagattgagctcggtgatggcctacctgacatccgtaccactcgccaatgtgtccaagctatgaaagatgcaggatttgaggtcgtttttgcaaaggatcttgctcaagtttttccttgcccgtggtaccgggtgatggatcccacctacttttcatgggctcacttccaatgcacacgcccaggacggatcgtcacccgtgcaattgtcaatacactagagttcctccgtattgccccagcaggcagcatgggagcctacaacgtcctgatgagtgcctctgatggccttctaaaaggtggccgggaaggtatcttcacagcgacctttttcgtcctgggccgcaagcctctcaaggaagttgatatagtaagcctctcaaggaagttgatatag

SEQ ID NO: 91768 - protein, 355 aa, Zea mays
MAKSGALELARSTGGSLSKDQVKSAVDQYVKYHDLHGGKQESRKSNYTDLANKYYDLVTGFYEYGWGDSFHLAGGYPGETSREAIKRHQHFLALQLGLKKGMKVLDVGCGIGGPLIEIARFSSTSITGLNNNDYHISRGKELIFSAGLSEQCCFLKGDFMDMPISDNTFDAAYAIQATCHAPDAQGVYSEVYRVLKPGQYFALDEWCLTDRFDPNNAKHLAIKAEIELGDGLPDIRTTRQCVQAMKDAGFEVVFAKDLAQVFPCPWYRVMDPTYFSWAHFQCTRPGRIVTRAIVNTLEFLRIAPAGSMGAYNVLMSASDGLLKGGREGIFTATFFVLGRKPLKEVDIVSLSRKLI

SEQ ID NO: 91769 - DNA, 1116 bp, Zea mays
  CDS (1)..(1116)
atggaggcggcgacgatggcgtggacggcggcggtggtcggggcggggctggtgtactggttcgtgtgggtgatgggcgcggcggaggtgaagggcaagcgggcggtggatctcaagatgggatccatcacgcgggacaaggtgcaggacaagtacacccagtactggtccttcttccgccgccccaaggagacggccaccacggcggcgtcggcggagaaggtgccggccttcgtggacaccttctacaacctggtgaccgacatctacgagtggggctggggccagtcgttccacttctcgccgtccctgcccggccgctcccaccgcgacgccacgcgcgtccacgaggagcgcgtggccgacctcctcggcgcccggccgggccaccgcctcctcgacgtgggctgcggcgtcggcgggcccatgcgcgccatcgccgcgcactcggggtccgacgtcgtcggcatcaccatcaacgagtaccaggtgaagcgcgcccgcgcgcacaaccgcaaggccggcctcgactccccccgctgcgaggtcgtctgcggcaacttcctctccatgcccttcccggacgcgtccttcgacggcgcctactccatcgaggccacctgccacgcgcccaggctgcaggacgtctacggcgaggtctaccgcgtgctcaagccggggcgcctctacgtctcctacgagtgggtcaccaccccgctgtaccacgccgaggacccgggccacgtcgagtgcgtccacggcatcgagcgcggcgacgcgctcccggggctccgccgccaggacgagatcgcggccatcgccaaggaggccggcttcgaggtgctcaaggagcaggacctggcgctgccccccgcgctgccctggtggacgcgcctcaagatgggccgcatcgcctactggcgcaactccatcgtcgtccgcgtgctcaccctgctccggatcgcgcccaagggcgtctccgaggtgcacgagatgctgtacgagaccgcgcagcacctcacccgcggcggcgagaccggcatcttcacgcccatgcacatggtgctcctccgcaagccgcccgccgccgcatccaccgaggaggaggccaaatag

SEQ ID NO: 91770 - protein, 371 aa, Zea mays
MEAATMAWTAAVVGAGLVYWFVWVMGAAEVKGKRAVDLKMGSITRDKVQDKYTQYWSFFRRPKETATTAASAEKVPAFVDTFYNLVTDIYEWGWGQSFHFSPSLPGRSHRDATRVHEERVADLLGARPGHRLLDVGCGVGGPMRAIAAHSGSDVVGITINEYQVKRARAHNRKAGLDSPRCEVVCGNFLSMPFPDASFDGAYSIEATCHAPRLQDVYGEVYRVLKPGRLYVSYEWVTTPLYHAEDPGHVECVHGIERGDALPGLRRQDEIAAIAKEAGFEVLKEQDLALPPALPWWTRLKMGRIAYWRNSIVVRVLTLLRIAPKGVSEVHEMLYETAQHLTRGGETGIFTPMHMVLLRKPPAAASTEEEAK

SEQ ID NO: 91771 - DNA, 1113 bp, Zea mays
  CDS (1)..(1113)
atggaggcggcgacgatggtgtggacggcggcggtggtcggggcggggctggtgtactggttcgtctgggtgatgggcgcggcggaggtgaagggcaagcgggcggtggatctcaagatgggatccatcacgcgggacaaggtgcaggacaagtacacgcagtactggtccttcttccgccgccccaaggagacggccaccacggcggcgtcggcggagaaggtgccggccttcgtcgacaccttctacaacctcgtgaccgacatctacgagtgggggtggggccagtccttccacttctccccgtccctccccggccgctcccaccgcgacgccacgcgcgtccacgaggagcgcgtcgccgacctcctcggcgccaggccgggccaccgcctcctggacgtcggctgcggcgtcggcgggcccatgcgcgccatcgccgcgcactcgggatccaacgtcgtcggcatcaccatcaacgagtaccaggtgaaccgcgcccgcgcgcacaaccgcaaggccggcctcgactccccgcgctgcgaggtcgtctgcggcaacttcctctccatgccgttcccggacgcctccttcgacggcgcctactccatcgaggccacctgccacgcgcccaggctgcaggacgtgtacggcgaggtctaccgcgtgctcaagccggggggactctacgtctcctacgagtgggtcaccaccccgctgtaccgcgccgaggacccggaccacgtcgagtgcatccacggcatcgagcgcggcgacgcgctcccggggctccgccgccaggacgagatcgcgtccatcgccaaggaggtcggcttcgaggtgctcaaggagcaggaccttgcgctgccccccgcgctgccctggtggacgcgcctcaagatgggccgcatcgcctactggcgcaactccctcgtcgtccgcgtgctcaccatgctccgggtcgcgcccaagggcgtctccgaggtgcacgagatgctctacgagaccgcgcagcacctcacccgcggcggcgagaccggcatcttcacgcccatgcacatggtgctcctccgcaagcccgccgccgccgcctccaccgaggaggccaactag

SEQ ID NO: 91772 - protein, 370 aa, Zea mays
MEAATMVWTAAVVGAGLVYWFVWVMGAAEVKGKRAVDLKMGSITRDKVQDKYTQYWSFFRRPKETATTAASAEKVPAFVDTFYNLVTDIYEWGWGQSFHFSPSLPGRSHRDATRVHEERVADLLGARPGHRLLDVGCGVGGPMRAIAAHSGSNVVGITINEYQVNRARAHNRKAGLDSPRCEVVCGNFLSMPFPDASFDGAYSIEATCHAPRLQDVYGEVYRVLKPGGLYVSYEWVTTPLYRAEDPDHVECIHGIERGDALPGLRRQDEIASIAKEVGFEVLKEQDLALPPALPWWTRLKMGRIAYWRNSLVVRVLTMLRVAPKGVSEVHEMLYETAQHLTRGGETGIFTPMHMVLLRKPAAAASTEEAN

SEQ ID NO: 91773 - DNA, 26 bp, Artificial sequence
  primer
atgagtgaaacagaattgagaaaaag

SEQ ID NO: 91774 - DNA, 25 bp, Artificial sequence
  primer
ttattgagttgcttcttgggaagtt

SEQ ID NO: 91775 - protein, 342 aa, Artificial sequence
  consensus sequence
  Variant (2)..(26): Xaa in position 2 to 26 is any amino acid
  Variant (27)..(33): Xaa in position 27 to 33 is any or no amino acid
  Variant (35)..(35): Xaa in position 35 is any amino acid
  Variant (37)..(37): Xaa in position 37 is any amino acid
  Variant (39)..(40): Xaa in position 39 to 40 is any amino acid
  Variant (43)..(43): Xaa in position 43 is any amino acid
  Variant (47)..(47): Xaa in position 47 is any amino acid
  Variant (52)..(56): Xaa in position 52 to 56 is any amino acid
  Variant (58)..(66): Xaa in position 58 to 66 is any amino acid
  Variant (69)..(79): Xaa in position 69 to 79 is any amino acid
  Variant (81)..(83): Xaa in position 81 to 83 is any amino acid
  Variant (90)..(90): Xaa in position 90 is any amino acid
  Variant (94)..(94): Xaa in position 94 is any amino acid
  Variant (96)..(96): Xaa in position 96 is any amino acid
  Variant (98)..(106): Xaa in position 98 to 106 is any amino acid
  Variant (108)..(110): Xaa in position 108 to 110 is any amino acid
  Variant (112)..(112): Xaa in position 112 is any amino acid
  Variant (115)..(116): Xaa in position 115 to 116 is any amino acid
  Variant (118)..(133): Xaa in position 118 to 133 is any amino acid
  Variant (134)..(135): Xaa in position 134 to 135 is any or no amino acid
  Variant (137)..(139): Xaa in position 137 to 139 is any amino acid
  Variant (141)..(142): Xaa in position 141 to 142 is any amino acid
  Variant (144)..(144): Xaa in position 144 is any amino acid
  Variant (145)..(146): Xaa in position 145 to 146 is any or no amino acid
  Variant (148)..(151): Xaa in position 148 to 151 is any amino acid
  Variant (154)..(155): Xaa in position 154 to 155 is any amino acid
  Variant (157)..(157): Xaa in position 157 is any amino acid
  Variant (162)..(162): Xaa in position 162 is any amino acid
  Variant (166)..(170): Xaa in position 166 to 170 is any amino acid
  Variant (172)..(172): Xaa in position 172 is any amino acid
  Variant (175)..(175): Xaa in position 175 is any amino acid
  Variant (182)..(186): Xaa in position 182 to 186 is any amino acid
  Variant (190)..(191): Xaa in position 190 to 191 is any amino acid
  Variant (193)..(201): Xaa in position 193 to 201 is any amino acid
  Variant (203)..(208): Xaa in position 203 to 208 is any amino acid
  Variant (211)..(211): Xaa in position 211 is any amino acid
  Variant (213)..(215): Xaa in position 213 to 215 is any amino acid
  Variant (217)..(226): Xaa in position 217 to 226 is any amino acid
  Variant (228)..(231): Xaa in position 228 to 231 is any amino acid
  Variant (234)..(239): Xaa in position 234 to 239 is any amino acid
  Variant (243)..(247): Xaa in position 243 to 247 is any amino acid
  Variant (248)..(249): Xaa in position 248 to 249 is any or no amino acid
  Variant (252)..(268): Xaa in position 252 to 268 is any amino acid
  Variant (269)..(286): Xaa in position 269 to 286 is any or no amino acid
  Variant (288)..(295): Xaa in position 288 to 295 is any amino acid
  Variant (298)..(298): Xaa in position 298 is any amino acid
  Variant (300)..(302): Xaa in position 300 to 302 is any amino acid
  Variant (304)..(306): Xaa in position 304 to 306 is any amino acid
  Variant (308)..(310): Xaa in position 308 to 310 is any amino acid
  Variant (312)..(313): Xaa in position 312 to 313 is any amino acid
  Variant (315)..(316): Xaa in position 315 to 316 is any amino acid
  Variant (319)..(322): Xaa in position 319 to 322 is any amino acid
  Variant (323)..(328): Xaa in position 323 to 328 is any or no amino acid
  Variant (332)..(333): Xaa in position 332 to 333 is any amino acid
  Variant (335)..(339): Xaa in position 335 to 339 is any amino acid
YXXXXXXXXXXXXXXXXXXXXXXXXXXXXXXXXYXLXTXXYEXGWGXSFHFXXXXXGXXXXXXXXXHEXXXXXXXXXXXGXXXLDVGCGXGGPXRXIXXXXXXXXXGXXXNXYQXXRXXXXXXXXXXXXXXXXXXVXXXFXXMXXXFXXXXFDXXYXIEATXHAPXXXXXYXEIXRVLKPGXXXXXYEWXXTXXXXXXXXXHXXXXXXIEXGXXXPXXXXXXXXXXAXXXXGFXXXXXXDLAXXXXXXXPWXXXXXXXXXXXXXXXXXXXXXXXXXXXXXXXXXXXVXXXXXXXXAPXGXXXVXXXLXXXAXXLXXGGXXXXXXXXXXFTPXXMXXXXXRKP

SEQ ID NO: 91776 - protein, 49 aa, Artificial sequence
  protein pattern
  Variant (2)..(5): Xaa in position 2 to 5 is any amino acid
  Variant (8)..(8): Xaa in position 8 is any amino acid
  Variant (9)..(9): Xaa in position 9 is Ala, Ile or Val
  Variant (11)..(11): Xaa in position 11 is Ala or Ser
  Variant (16)..(16): Xaa in position 16 is any amino acid
  Variant (20)..(22): Xaa in position 20 to 22 is any amino acid
  Variant (23)..(23): Xaa in position 23 is Asp, Glu or Gly
  Variant (24)..(24): Xaa in position 24 is any amino acid
  Variant (26)..(26): Xaa in position 26 is any amino acid
  Variant (28)..(28): Xaa in position 28 is Ile or Val
  Variant (29)..(29): Xaa in position 29 is any amino acid
  Variant (30)..(30): Xaa in position 30 is Lys or Arg
  Variant (32)..(32): Xaa in position 32 is Leu or Met
  Variant (36)..(37): Xaa in position 36 to 37 is any amino acid
  Variant (38)..(38): Xaa in position 38 is Phe or Tyr
  Variant (39)..(39): Xaa in position 39 is Ala, Gly or Val
  Variant (40)..(40): Xaa in position 40 is Ala, Ser or Val
  Variant (44)..(46): Xaa in position 44 to 46 is any amino acid
  Variant (47)..(47): Xaa in position 47 is Asp, Glu, Asn, Pro, Ser or Thr
  Variant (48)..(48): Xaa in position 48 is any amino acid
  Variant (49)..(49): Xaa in position 49 is Phe or Tyr
FXXXXFDXXYXIEATXHAPXXXXXYXEXXXVXKPGXXXXXYEWXXXXXX

SEQ ID NO: 91777 - protein, 42 aa, Artificial sequence
  protein pattern
  Variant (2)..(14): Xaa in position 2 to 14 is any amino acid
  Variant (15)..(16): Xaa in position 15 to 16 is any or no amino acid
  Variant (18)..(18): Xaa in position 18 is Asp or Asn
  Variant (19)..(19): Xaa in position 19 is Leu or Val
  Variant (20)..(20): Xaa in position 20 is Ala, Cys, Ser or Val
  Variant (22)..(22): Xaa in position 22 is Asp, Gly or Ser
  Variant (23)..(23): Xaa in position 23 is Phe, Ile or Leu
  Variant (26)..(26): Xaa in position 26 is Phe, Trp or Tyr
  Variant (30)..(30): Xaa in position 30 is Ala, Asp, Glu, Gln, Ser or Thr
  Variant (31)..(31): Xaa in position 31 is Cys or Ser
  Variant (34)..(34): Xaa in position 34 is Phe or Leu
  Variant (35)..(35): Xaa in position 35 is Ala, Cys, Gly or Ser
  Variant (36)..(39): Xaa in position 36 to 39 is any amino acid
  Variant (40)..(40): Xaa in position 40 is Gly or Asn
  Variant (41)..(41): Xaa in position 41 is Glu, Lys or Arg
  Variant (42)..(42): Xaa in position 42 is Ala, Asn, Pro, Ser or Thr
EXXXXXXXXXXXXXXXYXXXTXXYEXGWGXXFHXXXXXXXXX

SEQ ID NO: 91778 - protein, 40 aa, Artificial sequence
  protein pattern
  Variant (3)..(3): Xaa in position 3 is any amino acid
  Variant (5)..(5): Xaa in position 5 is Ser, Thr or Val
  Variant (6)..(7): Xaa in position 6 to 7 is any amino acid
  Variant (8)..(8): Xaa in position 8 is Thr or Val
  Variant (9)..(11): Xaa in position 9 to 11 is any amino acid
  Variant (13)..(14): Xaa in position 13 to 14 is any amino acid
  Variant (15)..(15): Xaa in position 15 is any or no amino acid
  Variant (17)..(18): Xaa in position 17 to 18 is any amino acid
  Variant (19)..(19): Xaa in position 19 is any or no amino acid
  Variant (21)..(21): Xaa in position 21 is Ser, Thr or Val
  Variant (22)..(22): Xaa in position 22 is any amino acid
  Variant (24)..(24): Xaa in position 24 is Ala or Gly
  Variant (25)..(25): Xaa in position 25 is Asp, Glu, Lys or Arg
  Variant (26)..(27): Xaa in position 26 to 27 is any amino acid
  Variant (28)..(28): Xaa in position 28 is Ile or Leu
  Variant (30)..(30): Xaa in position 30 is Ser or Thr
  Variant (32)..(32): Xaa in position 32 is Ile, Leu, Met or Val
  Variant (33)..(33): Xaa in position 33 is any amino acid
  Variant (34)..(34): Xaa in position 34 is Phe, Leu or Met
  Variant (35)..(35): Xaa in position 35 is any amino acid
  Variant (36)..(36): Xaa in position 36 is Phe, Ile, Leu or Val
  Variant (37)..(38): Xaa in position 37 to 38 is any amino acid
APXGXXXXXXXLXXXAXXXLXXGXXXXXFXPXXXXXXXKP

SEQ ID NO: 91779 - protein, 18 aa, Artificial sequence
  protein pattern
  Variant (2)..(3): Xaa in position 2 to 3 is any amino acid
  Variant (4)..(4): Xaa in position 4 is any or no amino acid
  Variant (6)..(7): Xaa in position 6 to 7 is any amino acid
  Variant (8)..(9): Xaa in position 8 to 9 is any or no amino acid
  Variant (11)..(11): Xaa in position 11 is any amino acid
  Variant (13)..(13): Xaa in position 13 is Asp or Asn
  Variant (14)..(14): Xaa in position 14 is Ala or Gly
  Variant (15)..(15): Xaa in position 15 is Ile or Leu
  Variant (16)..(16): Xaa in position 16 is Pro or Ser
  Variant (17)..(17): Xaa in position 17 is any amino acid
  Variant (18)..(18): Xaa in position 18 is Ile, Leu or Met
HXXXIXXXXEXGXXXXXX

SEQ ID NO: 91780 - protein, 20 aa, Artificial sequence
  protein pattern
  Variant (2)..(3): Xaa in position 2 to 3 is any amino acid
  Variant (4)..(4): Xaa in position 4 is any or no amino acid
  Variant (6)..(9): Xaa in position 6 to 9 is any or no amino acid
  Variant (12)..(12): Xaa in position 12 is Asp, Glu or Gln
  Variant (13)..(13): Xaa in position 13 is Ile, Leu or Val
  Variant (14)..(17): Xaa in position 14 to 17 is any amino acid
AXXXAXXXXGFXXXXXXDLA

SEQ ID NO: 91781 - DNA, 1257 bp, Saccharomyces cerevisiae
  CDS (1)..(1257)
atggactatttacatgtatataacaacaaccaggcgcacgttcccagaacacctccaggcaggcagtgcctatcgcccgttctgcccccaatcatattggcgttagatcaacaacattcgctgacatttgggtactccagccccaggtgcttgccaacacccatattgccttctatgagcacaaatacgcccgtccattggtcacaacaggttgtcactatccctgtcgctgtacgaaatcatgccgcaatgatgcctattatcacacctatgacctccccaagacctcagtttgaagcaacggctccctcaccccctttggccccggtcgccataaagctgccagatttgaaactaccaccgtcgcctgtgcccagcacagtagaggacagagtttcacatcctatcctgcccaaaattgtgatcgggaatggcggcggccgtgatgttgagcgagatagtaccgaggaattaattaggaagattccaaactacattggttgtgcaaaaacaaaggcacaattgagcaaagttaggtctggtaaacaactaattgcatgcgcacaggaatatcaccatccagtaaacaaggacgagatcgaaaatatcaacaacattctaaacttcagggactttattttcaagcatccaaaatcctccttcgagttcctatgtaccctgtcgtttgagcagttcgttagagtatattcattcattagtttcatctacaggacaaagaaaatcaataagaacaagtacgaactcgtttgtgagatgaatgttcacgagcaactcagcaataagcgtatacaaagaacaaggactcctgaaaagtacaaaatacatttgatctgcgagtcaaaactcatactgaccttcaaccactgtacgaagacagtaaaatttgagtctatcaatggcgggcactgccatccgatttcagccaaccacattatcaagccctccctcttccttacccactgcattaataaatgctaccagaccgtgtcagaccctaccgatttgaaattggcattgagagacgccttagaagcccttgatcatgaaaggataggattgtctttcttaaagaggagacatttcaagtgctcacaccaagcatcatcactctcgaatgccagcgccacattgaagaaacaagaagatcatgacacatttggtgtacatacaggaataattcatacggcaaatttcttcatgtttaatgcatctagcgatatattccagaggaactaa

SEQ ID NO: 91782 - protein, 418 aa, Saccharomyces cerevisiae
MDYLHVYNNNQAHVPRTPPGRQCLSPVLPPIILALDQQHSLTFGYSSPRCLPTPILPSMSTNTPVHWSQQVVTIPVAVRNHAAMMPIITPMTSPRPQFEATAPSPPLAPVAIKLPDLKLPPSPVPSTVEDRVSHPILPKIVIGNGGGRDVERDSTEELIRKIPNYIGCAKTKAQLSKVRSGKQLIACAQEYHHPVNKDEIENINNILNFRDFIFKHPKSSFEFLCTLSFEQFVRVYSFISFIYRTKKINKNKYELVCEMNVHEQLSNKRIQRTRTPEKYKIHLICESKLILTFNHCTKTVKFESINGGHCHPISANHIIKPSLFLTHCINKCYQTVSDPTDLKLALRDALEALDHERIGLSFLKRRHFKCSHQASSLSNASATLKKQEDHDTFGVHTGIIHTANFFMFNASSDIFQRN

SEQ ID NO: 91783 - DNA, 27 bp, Artificial sequence
  primer
atggactatttacatgtatataacaac

SEQ ID NO: 91784 - DNA, 25 bp, Artificial sequence
  primer
ttagttcctctggaatatatcgcta

SEQ ID NO: 91785 - DNA, 1764 bp, Saccharomyces cerevisiae
  CDS (1)..(1764)
atgagttccgtcaataaagatactattcatgttgctgaaagaagtcttcataaagaacaccttaccgaaggtggtaacatggccttccacaaccatttgaatgattttgctcatattgaagatcctctggaaagaagaagattggctttggagtccatcgatgacgaaggtttcggttggcaacaagttaagaccatctccattgctggtgttggtttcttgacagattcttatgatatttttgccattaatttgggtatcactatgatgtcctacgtttactggcacggtagtatgccaggtccaagtcaaaccttgttgaaggtttccacttctgttggtactgttattggtcaatttggttttggtactttagctgatattgttggtcgtaagagaatttatggtatggaacttattatcatgattgtctgtaccattctgcaaaccactgttgctcattctcctgctattaacttcgttgctgttttaacattctaccgtattgtcatgggtattggtatcggtggtgactacccactatcttctattattacttctgaatttgccactaccaaatggagaggtgccatcatgggtgctgtctttgctaaccaagcttggggtcaaatctccggtggtatcatcgctcttatcttggttgctgcttacaagggcgaactagaatacgcaaactctggtgctgaatgtgatgctagatgtcaaaaggcttgtgaccaaatgtggagaatccttattgggttgggtaccgttctagggttggcatgtttgtatttcagattaactattccagaatctcctagatatcaattggatgttaacgctaagttggaacttgctgctgccgcacaagaacaagatggcgaaaagaaaattcacgacaccagtgatgaagacatggcaattaacggtttggaaagagcttctactgccgtcgaatctcttgacaatcatcctccaaaggcttcgttcaaagatttctgcagacattttggtcaatggaagtacggtaagattttgctaggtactgctggttcatggtttaccttagatgttgctttctacgggttgagtttaaacagtgctgttattctgcaaaccatcggttatgccggttccaaaaacgtttacaagaaactgtatgatactgctgtcggtaatctgattttgatttgtgctggttcattacctggttactgggtatccgtcttcactgtcgatataatcggtagaaaaccaattcaattagccggtttcatcatcttgaccgctttgttctgtgtcatcggtttcgcataccataaacttggtgaccatggtctgttggctctttacgtcatttgtcaattcttccaaaacttcggtccaaacacaaccacctttattgttcctggtgagtgtttcccaactcgttacagatctactgctcatggtatttctgctgcatctggtaaggtcggtgccattattgcacaaaccgctttgggtactctaatcgaccataactgtgctagagacggtaagccaaccaactgttggttacctcacgtcatggaaattttcgccttattcatgttgttgggtatcttcacaaccttgttgatcccagaaactaagagaaagactctagaagaaattaacgagctataccacgatgaaatcgatcctgctacgctaaacttcagaaacaagaataatgacattgaatcttccagcccatctcaacttcaacatgaagcataa

SEQ ID NO: 91786 - protein, 587 aa, Saccharomyces cerevisiae
MSSVNKDTIHVAERSLHKEHLTEGGNMAFHNHLNDFAHIEDPLERRRLALESIDDEGFGWQQVKTISIAGVGFLTDSYDIFAINLGITMMSYVYWHGSMPGPSQTLLKVSTSVGTVIGQFGFGTLADIVGRKRIYGMELIIMIVCTILQTTVAHSPAINFVAVLTFYRIVMGIGIGGDYPLSSIITSEFATTKWRGAIMGAVFANQAWGQISGGIIALILVAAYKGELEYANSGAECDARCQKACDQMWRILIGLGTVLGLACLYFRLTIPESPRYQLDVNAKLELAAAAQEQDGEKKIHDTSDEDMAINGLERASTAVESLDNHPPKASFKDFCRHFGQWKYGKILLGTAGSWFTLDVAFYGLSLNSAVILQTIGYAGSKNVYKKLYDTAVGNLILICAGSLPGYWVSVFTVDIIGRKPIQLAGFIILTALFCVIGFAYHKLGDHGLLALYVICQFFQNFGPNTTTFIVPGECFPTRYRSTAHGISAASGKVGAIIAQTALGTLIDHNCARDGKPTNCWLPHVMEIFALFMLLGIFTTLLIPETKRKTLEEINELYHDEIDPATLNFRNKNNDIESSSPSQLQHEA

SEQ ID NO: 91787 - DNA, 1626 bp, Oryza sativa (japonica cultivar-group)
  CDS (1)..(1626)
atgggaaggcaggaccagcagctgcaggtgctgaacgcgctcgacgcggccaagacgcaatggtaccacttcacggcgatcatcgtcgccggcatggggttcttcaccgacgcctacgacctcttctgcatctcgctcgtcaccaagcttctcggccgcatctactacaccgaccccgccagccccacccccggctcgctgccgcccaacatcgccgccgcggtgaatggcgtcgcgctctgcggcaccctctccggccagctcttcttcggatggctcggcgacaagctcggccgcaagagcgtctacgggatgacgctgctgctcatggtgatttgctccatcgcctcagggctctccttctcgcacacgccgacgagcgtcatggccacgctctgcttcttccgcttctggctcggcttcggcatcggcggtgactacccgctgagcgccaccatcatgtccgagtacgccaacaagaagacccgcggcgcgttcatcgccgccgtcttcgccatgcaggggttcggcatcctcgccggcggcgttgtcacgctcgccatgtccgcggggttccaggccgcgttcccggccccagcgtacgaggtcaatgccgctgcgtccaccgtgccgcaggccgactacgtgtggcgcatcatcctgatgctcggtgcgctgccggccatactgacgtactactggcggatgaagatgccggagacggcgcggtacacggcgctcgtcgccaaggacgcgaagcaggcgtcgtcggacatggccaaggtgctgcaggtggaaatcgaggtggaggaggagaagctccaggacatcacgaggggcagggactacggcctcttctcggcgcggttcgccaagcgccatggcgcgcacctcctgggcacggcggcgacgtggttcctcgtcgacgtcgcgtactacagccagaacctgttccagaaggacatcttcaccagcatccactggatccccaaggcgcgcaccatgagcgagctcgaggaggtgttccgcatctcccgcgcgcagacgctcatcgcgctctgcggcaccgtgccgggctactggttcaccgtcttcctcatcgacatcatcggccgcttcaagatccagctcctcggcttcgccgggatgacggcgttcatgctcggcctcgccatcccgtaccaccactggaccatgcctggcaaccaggtcatcttcgtcttcctctacggcttcaccttcttcttcgccaactttgggccgaacgcgacgacgttcatcgtgccggccgagatcttcccggcgcgtctccggtcaacctgccacggcatctccgccgcgtccggcaaggccggcgcgatcatcggagcattcggtttcctctacgcggcgcagccacaggacaaggcgcatgtcgacgccggctacaaacctgggattggcgtgcggaacgcgctcttcgtgctcgccgggtgcaacctcgttgggttcctcatgacatggatgctcgtgccggaatcgaaagggaagtcgctggaggagatgtccggcgaggccgacgacgaggaagcttctgccaacggcggtgccaccgccgtcaactcgtccggagttgagatggtgtaa

SEQ ID NO: 91788 - protein, 541 aa, Oryza sativa (japonica cultivar-group)
MGRQDQQLQVLNALDAAKTQWYHFTAIIVAGMGFFTDAYDLFCISLVTKLLGRIYYTDPASPTPGSLPPNIAAAVNGVALCGTLSGQLFFGWLGDKLGRKSVYGMTLLLMVICSIASGLSFSHTPTSVMATLCFFRFWLGFGIGGDYPLSATIMSEYANKKTRGAFIAAVFAMQGFGILAGGVVTLAMSAGFQAAFPAPAYEVNAAASTVPQADYVWRIILMLGALPAILTYYWRMKMPETARYTALVAKDAKQASSDMAKVLQVEIEVEEEKLQDITRGRDYGLFSARFAKRHGAHLLGTAATWFLVDVAYYSQNLFQKDIFTSIHWIPKARTMSELEEVFRISRAQTLIALCGTVPGYWFTVFLIDIIGRFKIQLLGFAGMTAFMLGLAIPYHHWTMPGNQVIFVFLYGFTFFFANFGPNATTFIVPAEIFPARLRSTCHGISAASGKAGAIIGAFGFLYAAQPQDKAHVDAGYKPGIGVRNALFVLAGCNLVGFLMTWMLVPESKGKSLEEMSGEADDEEASANGGATAVNSSGVEMV

SEQ ID NO: 91789 - DNA, 1584 bp, Oryza sativa (japonica cultivar-group)
  CDS (1)..(1584)
atggcgggagggcagctcaacgtgctgagcacgctcgaccaggcgaagacgcaatggtaccacttcatggcgatcgtcatcgccggcatgggcttcttcaccgacgcctacgacctcttctgcatttccctcgtcaccaagctgctcggccgcatctactacaccgacgattccaaggacacccccggcgcgctcccgcccaacgtgtcggccgccgtcaccggcgtcgcgctctgcggcacgctcgccggccagcttttcttcggatggctcggcgacaagctcggacgcaagagcgtgtatggtttcacgctgattctgatggtcgtgtgctcggtcgcgtccgggctctcgttcgggagctcggccaagggcgtcgtgtctacgctctgcttcttccggttctggctcggcttcggcatcggcggcgactacccgctcagcgccaccatcatgtcggagtacgcgaacaagaggacgcgcggggccttcatcgccgccgtgttcgccatgcaggggttcgggatcctcttcggcgccatcgtcgcgctcgcggtgtcggcggggttccggcacgcgtacccggcgccgtcctactccgacaaccacgccgcgtcgctcgtcccgcaggccgactacgtgtggcgcatcatcctcatgttcggcaccgtcccggcggcgctcacctactactggcggatgaagatgcccgagacggcgcggtacacggcgctcatcgcccgcaacgcgaagcaggcggcggccgacatgtccaaggtgctgcacacccagattgaggagagcgcggaccgcgccgagacggtggccgtcggcggcgagagctggggcctcttctcgcgccagttcctgcgccgccacggcctccacctcctcgccaccaccagcacgtggttcctcctcgacatcgccttctacagccagaacctgttccagaaggacatcttcagcaaggtcgggtggatcccgccggcgaagaccatgaacgcgctcgaggagctctaccgcatcgcccgcgcccaggcgctcatcgcgctctgcggcaccatcccgggctactggttcaccgtcgcattcatcgagatcatgggcaggttctggatccagatcatgggcttcgccatgatgacggcgttcatgctcggcctcgccatcccgtaccaccactggacgacgccggggcaccacaccggcttcatcgtcatgtacggattcaccttcttcttcgcgaacttcgggccaaacagcaccaccttcatcgtgccggcggagatatacccggcgcggctccggtcgacgtgccacggcatctccgccgccgccgggaaggccggcgccatcatcggagcgttcgggttcctgtacgcggcgcaggaccagcacaagcccgagcctgggtaccccagggggatcggcatcaagaacgcgctcttcgtgctcgccggcacaaacttcctcgggacgatcatgacgctgctcgtgccggagtccaagggcatgtcgctcgaggttatctcgcaggaggtcgccgacggcgacgacgaggaggcggcctacccgaagtaa

SEQ ID NO: 91790 - protein, 527 aa, Oryza sativa (japonica cultivar-group)
MAGGQLNVLSTLDQAKTQWYHFMAIVIAGMGFFTDAYDLFCISLVTKLLGRIYYTDDSKDTPGALPPNVSAAVTGVALCGTLAGQLFFGWLGDKLGRKSVYGFTLILMVVCSVASGLSFGSSAKGVVSTLCFFRFWLGFGIGGDYPLSATIMSEYANKRTRGAFIAAVFAMQGFGILFGAIVALAVSAGFRHAYPAPSYSDNHAASLVPQADYVWRIILMFGTVPAALTYYWRMKMPETARYTALIARNAKQAAADMSKVLHTQIEESADRAETVAVGGESWGLFSRQFLRRHGLHLLATTSTWFLLDIAFYSQNLFQKDIFSKVGWIPPAKTMNALEELYRIARAQALIALCGTIPGYWFTVAFIEIMGRFWIQIMGFAMMTAFMLGLAIPYHHWTTPGHHTGFIVMYGFTFFFANFGPNSTTFIVPAEIYPARLRSTCHGISAAAGKAGAIIGAFGFLYAAQDQHKPEPGYPRGIGIKNALFVLAGTNFLGTIMTLLVPESKGMSLEVISQEVADGDDEEAAYPK

SEQ ID NO: 91791 - DNA, 1587 bp, Oryza sativa (japonica cultivar-group)
  CDS (1)..(1587)
atggcgggatcgcagctcaacgttttggtcaagctcgaccaggccaagacgcaatggtaccatttcatggcgatcgtcatcgccgggatggggttcttcacagacgcctacgacctcttttgcatcgcgctggtcaccaagctgttgggtcgcctttactacaccgacatcaccaagcccaacccagggacactcccgcccaacgtgtcgtccgccgtcaccggcgtcgcgctctgcggcacgctcgccggccagctcttcttcggatggctcggcgacaagctcggccgcaagagcgtctatggattcacgctcatcctcatggtcgtgtgctccatcgcctccggtctctcgtttggccacacgcccaagagcgtgattgccacgctctgcttcttccgcttctggctcggcttcggcatcggcggcgactacccgctcagcgccaccatcatgtcggagtacgcgagcaagaagacccgcggggccttcatcgccgccgtgttcgccatgcaggggttcgggatcctcttcggcgccatcgtcgcgctcgtcgtctcggccggcttccgtcacgcgtacccggcgccgtcgtacgcccagaaccccgccgcgtcgctcgcgccgcaggctgactacacgtggcggctcatcctcatgttcggcaccatcccggctgggctcacctactactggcgcatgaaaatgcccgagacggcgcggtacacggcgctcgtcgcccgcaacgccaagcaggcggcggctgacatgtccaaggtgctccacgccgagatcgaggagcggccggaggtggtcgagagccaggtggtcgccggggagacctggggcctcttctcacggcagttcatgaagcgccacgggatgcacctcctggcgaccaccagcacgtggttcctgctcgacatcgccttctacagccagaacctgttccagaaggacatcttcagcaaggtcgggtggataccgccggcgaagaccatgaacgcgctcgaggaactctaccgcatctcccgcgcccaggcactcatcgcactctgcggaaccatcccgggctactggttcaccgtcgccttcatcgacatcgtcggcaggttctggatccagatcatgggcttcttcatgatgaccgtgttcatgctcgcgctcggcgtgccctacgaccactggacgcacccggcgcaccacaccggcttcgtcgtgctctacgcactcaccttcttcttcgccaacttcgggcccaacagcaccaccttcatcgtgccggctgagatcttcccggcgaggctccggtcgacgtgccacggcatctccgccgcgtccggcaaggccggcgcgatcatcggcgcgttcgggttcctgtacgctgcgcaggaccagcacaatcccgacgcgggatactcccgcggcatcggcatccggaacgcgctcttcgtgctcgccggcacaaacttcctcggtatgctcatgacgctgctggtgccggagtccaagggcttgtcgctggaggagatgtccaaggacaacgtcgtcgacgagaccgcccaagaagcgatcgcccaagcgtga

SEQ ID NO: 91792 - protein, 528 aa, Oryza sativa (japonica cultivar-group)
MAGSQLNVLVKLDQAKTQWYHFMAIVIAGMGFFTDAYDLFCIALVTKLLGRLYYTDITKPNPGTLPPNVSSAVTGVALCGTLAGQLFFGWLGDKLGRKSVYGFTLILMVVCSIASGLSFGHTPKSVIATLCFFRFWLGFGIGGDYPLSATIMSEYASKKTRGAFIAAVFAMQGFGILFGAIVALVVSAGFRHAYPAPSYAQNPAASLAPQADYTWRLILMFGTIPAGLTYYWRMKMPETARYTALVARNAKQAAADMSKVLHAEIEERPEVVESQVVAGETWGLFSRQFMKRHGMHLLATTSTWFLLDIAFYSQNLFQKDIFSKVGWIPPAKTMNALEELYRISRAQALIALCGTIPGYWFTVAFIDIVGRFWIQIMGFFMMTVFMLALGVPYDHWTHPAHHTGFVVLYALTFFFANFGPNSTTFIVPAEIFPARLRSTCHGISAASGKAGAIIGAFGFLYAAQDQHNPDAGYSRGIGIRNALFVLAGTNFLGMLMTLLVPESKGLSLEEMSKDNVVDETAQEAIAQA

SEQ ID NO: 91793 - DNA, 1617 bp, Oryza sativa (japonica cultivar-group)
  CDS (1)..(1617)
atggccggcgagctcaaggtgctgaacgcgctcgactcggcgaagacgcagtggtaccatttcacggcgatcgtgatcgccggcatggggttcttcaccgacgcctacgacctcttctccatctccctcgtcaccaagctgctcggccgcatctactacttcaacccggcgtccaagagccccggctccctcccgcccaacgtctccgccgccgtcaatggcgtcgccttctgcggcaccctcgccggccagctcttcttcggttggctcggcgacaagatggggcgcaagaaggtgtacggcatgacgctcatgctcatggtcatctgctgcctcgcttccggcctctcgttcgggtcgtcggcgaaaggcgtcatggccacgctctgcttcttccgcttctggctcggcttcggcatcggcggcgactacccgctctcggcgaccatcatgtcggagtacgctaataagcgcacccgtggagcgttcatcgccgccgtgttcgccatgcagggcttcggcaacctcaccggcggcatcgtggccatcatcgtgtccgccgcgttcaagtcgcggttcgacgcgccggcgtacagggacgaccggaccggctccaccgtgccgcaggccgactacgcgtggcgcatcgtgctcatgttcggcgccatcccggcgctgctcacctactactggcggatgaagatgccggagacggcgcgctacaccgcgctggtcgccaagaacgcgaagcaggccgccgcggacatgacgcaggtgctcaacgtcgagatcgtggaggagcaggagaaggctgacgaggtcgcgcggcgcgagcagttcgggctcttctcccgccagtttttgagacgccatgggcgccacctgctgggcacgacggtgtgctggttcgtgctggacatcgccttctactcgtcgaacctgttccagaaggacatctacacggcggtgcagtggctgcccaaggcggacaccatgagcgccctggaggagatgttcaagatctcccgggcacagacgctcgtggcgctgtgcggcaccattccgggctactggttcaccgtcttcttcatcgacatcatcggccgcttcgtcatccagctcggcggcttcttcttcatgacggcgttcatgctcggcctcgccgtgccgtaccaccactggacgacgccggggaaccacatcggcttcgtggtcatgtacgccttcaccttcttcttcgccaacttcgggcccaactccacgaccttcatcgtgccggcggagatcttcccggcgaggctgcgttccacctgccacggcatctcggcggcggcggggaaggccggcgccatcgtcgggtcgttcgggttcctgtacgcggcgcagagcacggacgcgagcaagacggacgccggctacccgccgggcatcggcgtgcgcaactcgctcttcttcctcgccggatgcaacgtcatcgggttcttcttcacgttcctggtgccggagtcgaaggggaagtcgctggaggagctctccggcgagaacgaggacgatgacgatgtgccggaagcgcccgcgacggccgatcaccggactgcgccggcgccgccagcttga

SEQ ID NO: 91794 - protein, 538 aa, Oryza sativa (japonica cultivar-group)
MAGELKVLNALDSAKTQWYHFTAIVIAGMGFFTDAYDLFSISLVTKLLGRIYYFNPASKSPGSLPPNVSAAVNGVAFCGTLAGQLFFGWLGDKMGRKKVYGMTLMLMVICCLASGLSFGSSAKGVMATLCFFRFWLGFGIGGDYPLSATIMSEYANKRTRGAFIAAVFAMQGFGNLTGGIVAIIVSAAFKSRFDAPAYRDDRTGSTVPQADYAWRIVLMFGAIPALLTYYWRMKMPETARYTALVAKNAKQAAADMTQVLNVEIVEEQEKADEVARREQFGLFSRQFLRRHGRHLLGTTVCWFVLDIAFYSSNLFQKDIYTAVQWLPKADTMSALEEMFKISRAQTLVALCGTIPGYWFTVFFIDIIGRFVIQLGGFFFMTAFMLGLAVPYHHWTTPGNHIGFVVMYAFTFFFANFGPNSTTFIVPAEIFPARLRSTCHGISAAAGKAGAIVGSFGFLYAAQSTDASKTDAGYPPGIGVRNSLFFLAGCNVIGFFFTFLVPESKGKSLEELSGENEDDDDVPEAPATADHRTAPAPPA

SEQ ID NO: 91795 - DNA, 1626 bp, Oryza sativa (japonica cultivar-group)
  CDS (1)..(1626)
atggcgcggcaggagcagcagcagcacctgcaggtgctgagcgcgctggacgcggcgaagacgcagtggtaccacttcacggcgatcgtcgtcgccggcatgggcttcttcaccgacgcctacgacctcttctgcatctccctcgtcaccaagctgctcggccgcatctactacaccgacctcgccaaggagaaccccggcagcctgccgcccaacgtcgccgcggcggtgaacggagtcgcgttctgcggcacgctggcggggcagctcttcttcgggtggctcggcgacaagctcggccggaagagcgtgtacgggatgacgctgctgatgatggtcatctgctccatcgcgtcggggctctcgttctcgcacacgcccaccagcgtcatggcgacgctctgcttcttccggttctggctcggattcggcatcggcggcgactacccgctgtcggcgacgatcatgtcggagtacgccaacaagaagacccgcggcgcgttcatcgccgccgtgttcgcgatgcaggggttcggcatcctcgccggcggcatcgtcaccctcatcatctcctccgcgttccgcgccgggttcccggcgccggcgtaccaggacgaccgcgcgggctccaccgtccgccaggccgactacgtgtggcggatcatcctcatgctcggcgccatgccggcgctgctcacctactactggcggatgaagatgccggagacggcgcgctacaccgccctcgtcgccaagaacgccaagcaggccgccgccgacatgtccaaggtgctccaggtcgagatccaggaggagcaggacaagctggagcagatggtgacccggaacagcagcagcttcggcctcttctcccgccagttcgcgcgccgccacggcctccacctcgtcggcaccgccacgacatggttcctcctcgacatcgccttctacagccagaacctgttccagaaggacatcttcaccagcatcaactggatccccaaggccaagaccatgtcggcgctggaggaggtgttccgcatcgcgcgcgcccagacgctcatcgccctgtgcggcaccgtcccgggctactggttcaccgtcttcctcatcgacatcgtcggccgcttcgccatccagctgctagggtttttcatgatgaccgtgttcatgctcggcctcgccgtgccgtaccaccactggacgacgaaggggaaccacatcggcttcgtcgtcatgtacgccttcaccttcttcttcgccaacttcggccccaactccaccaccttcatcgtgccggcggagatcttcccggcgaggctgcgttccacctgccacggcatctcggcggcggcggggaaggccggcgccatcatcggatcgttcgggttcctgtacgcggcgcaggacccgcacaagcccgacgccgggtacaaacccgggatcggggtgaggaactcgctgttcgtgctcgccggatgcaacctgctcgggttcatctgcacgttcctcgtgccggagtcgaaggggaagtcgctggaggagatgtccggcgaggcggaggacgacgacgacgaggtggccgccgccggcggtggcgccgccgtgcggccgcagacggcgtag

SEQ ID NO: 91796 - protein, 541 aa, Oryza sativa (japonica cultivar-group)
MARQEQQQHLQVLSALDAAKTQWYHFTAIVVAGMGFFTDAYDLFCISLVTKLLGRIYYTDLAKENPGSLPPNVAAAVNGVAFCGTLAGQLFFGWLGDKLGRKSVYGMTLLMMVICSIASGLSFSHTPTSVMATLCFFRFWLGFGIGGDYPLSATIMSEYANKKTRGAFIAAVFAMQGFGILAGGIVTLIISSAFRAGFPAPAYQDDRAGSTVRQADYVWRIILMLGAMPALLTYYWRMKMPETARYTALVAKNAKQAAADMSKVLQVEIQEEQDKLEQMVTRNSSSFGLFSRQFARRHGLHLVGTATTWFLLDIAFYSQNLFQKDIFTSINWIPKAKTMSALEEVFRIARAQTLIALCGTVPGYWFTVFLIDIVGRFAIQLLGFFMMTVFMLGLAVPYHHWTTKGNHIGFVVMYAFTFFFANFGPNSTTFIVPAEIFPARLRSTCHGISAAAGKAGAIIGSFGFLYAAQDPHKPDAGYKPGIGVRNSLFVLAGCNLLGFICTFLVPESKGKSLEEMSGEAEDDDDEVAAAGGGAAVRPQTA

SEQ ID NO: 91797 - DNA, 1431 bp, Thermoplasma volcanium GSS1
  CDS (1)..(1431): transl_table=11
atggctaaaggcatcattgaagagcttgataattcaaagataaattcctttcatctacgcacctggttgattgcaggtatgggattcttcacggatgcatacgatctttttgtaataggtacagttatatcaatactcccactagctgggtgggataaactcaacacatacgatatttcaatattatcctcaatatctcttcttgcttctgtaataggtgcagtgatatttggaaggcttctcgacgcactaggaagaaaaagagtctatggatttgagctgatgttgcttatattgggagctttaggcagtgcatttgtggttccagtaaacggtataaattaccttatagcatggagatttatacttggactaggaattgggggggactacgcaggaagttcaactataatgactgaattttctaatacgaagaataggggacaacttgtaggcatggtcttttctctccaaggcgtcggtcttatagcagggcctttaataacgctaggccttctaagctttatacacaacctagaccttgtatggagggtgctgtttttcataggtgctgtgcctgctttcatagtactgtacggcaggcgggcaataggcgaaacacccagatacgcacttagagtaaagggagatgcgagttcagcaatgcagagtgtcgaaaaaatttcaggagattcaaaggtttcagtatcaagggaagatttagagatgtcaaatataaaatggacggatttattcaaaaacagatactttatgctttcacttattggaacggcagggacatggtttttgcttgattgggcgttttatggaaattcgataatgtctcatgaaatgttgagcgcccttatcccgtcatctatgtcaggcttaaacaagttaaagctatctacgttttacacgcttataatattcgccgtttctgcttttcctgcatattggatagctacttttactgtagacagaatcggaagaaaaaggatgcaggtaattggttttctaataatgggcataacatttggtattctcggcatattcaggtaccttatgtcccctacattcgttacttatttccttttagtgtatggaataagctattttttcacagagttcggcccaaacgtgactaccttcatttatgctccagagatgtttccaacagcaatacgcggactcggatctggaatatcctctgcagggggtaaaactggggcattcataggaaccgcgctaaacgtaattatatttacactttatggggaaggcgaacttttccttatacttgctggaatatcgatgttaggtatgttaatgactttagtacttctacctgaaacatctagaagaaaactcgaggatatttcaggcgagggtagatatatagtaagaactgcttccggatttaaaaaatag

SEQ ID NO: 91798 - protein, 476 aa, Thermoplasma volcanium GSS1
MAKGIIEELDNSKINSFHLRTWLIAGMGFFTDAYDLFVIGTVISILPLAGWDKLNTYDISILSSISLLASVIGAVIFGRLLDALGRKRVYGFELMLLILGALGSAFVVPVNGINYLIAWRFILGLGIGGDYAGSSTIMTEFSNTKNRGQLVGMVFSLQGVGLIAGPLITLGLLSFIHNLDLVWRVLFFIGAVPAFIVLYGRRAIGETPRYALRVKGDASSAMQSVEKISGDSKVSVSREDLEMSNIKWTDLFKNRYFMLSLIGTAGTWFLLDWAFYGNSIMSHEMLSALIPSSMSGLNKLKLSTFYTLIIFAVSAFPAYWIATFTVDRIGRKRMQVIGFLIMGITFGILGIFRYLMSPTFVTYFLLVYGISYFFTEFGPNVTTFIYAPEMFPTAIRGLGSGISSAGGKTGAFIGTALNVIIFTLYGEGELFLILAGISMLGMLMTLVLLPETSRRKLEDISGEGRYIVRTASGFKK

SEQ ID NO: 91799 - DNA, 1416 bp, Sulfolobus solfataricus P2
  CDS (1)..(1416): transl_table=11
atggataaaggaatttcaaaaacaccctttggatctatagattcgttgaagttaactttcaatcatataaaagtctggtatacttcaggtatgggattttttactgatgcctatgatttattcataataagtgcgattctagatgttttattacagttacatgaccctaatttcccacttaatagcgtaacagaaggtcttttagcgtcttcagcattatgggctgcaataatcgggcaattagtatttggttttctaggtgacaaaataggaaggaaggcaatatatggggttgaggcaattttaatgacagtaggtgctttactctccgcactctctcctaatatatattggcttataattttcagatcaattatgggtttagggataggtggggattatccaatctctgccaccataatgagtgaatacgctaatgttaaagataggggtaagctgatagctttagtttttgcaaatcaaggattaggttctttagctgcagtttcagttggtattggttctgttctagcgtttcccttagatatttcttggagagtaatggcagccataggtgcaataccggctgcgactgtaatctaccttagaagaaaaacaccagaaactcctagatattcaatgttggtgaaaggtaatgttcaagaggctaagaaagctgctgagttcctgggtgcaaaaattgaagaaaagagagcttattcgaaaccattatcattgtcagaattcctctccaagtattggttaatacttattggaactgcggttccgtggtttattctcgatatagctttctatggaactggtatatactctggtgcaataactcaattgatattaggaaaacctactagtatagcaaatttaatattggaacaaggtttaccatatatggtaggatttttcggttactttactgcagtagcattaatggacaaattagggagaaaaatcatacagttgcaaggttttatattaatgactataatttacgcagttgtttcttcgttcctaatagttagtggaactaaagtagttggtttgacaattccagctggaattggattcttgatatatgcactatcattcttcttcatagactttggtcctaatactacgacttttatactgccagctgaagcttatccaactagggctagaactactggccatggaattagtgcggcttcaggcaaattaggggcagcaataactacttacctattcccttcacttttagcctcaatgggaataaagaatattttactaatgctttctgcgctatcactagtaggcgcaattgtgacaataatagctgttaaagaaactaagggcaaaagtttagaggaaataagcaaggaagaggtaattgttcaagaagaacaattctcgacataa

SEQ ID NO: 91800 - protein, 471 aa, Sulfolobus solfataricus P2
MDKGISKTPFGSIDSLKLTFNHIKVWYTSGMGFFTDAYDLFIISAILDVLLQLHDPNFPLNSVTEGLLASSALWAAIIGQLVFGFLGDKIGRKAIYGVEAILMTVGALLSALSPNIYWLIIFRSIMGLGIGGDYPISATIMSEYANVKDRGKLIALVFANQGLGSLAAVSVGIGSVLAFPLDISWRVMAAIGAIPAATVIYLRRKTPETPRYSMLVKGNVQEAKKAAEFLGAKIEEKRAYSKPLSLSEFLSKYWLILIGTAVPWFILDIAFYGTGIYSGAITQLILGKPTSIANLILEQGLPYMVGFFGYFTAVALMDKLGRKIIQLQGFILMTIIYAVVSSFLIVSGTKVVGLTIPAGIGFLIYALSFFFIDFGPNTTTFILPAEAYPTRARTTGHGISAASGKLGAAITTYLFPSLLASMGIKNILLMLSALSLVGAIVTIIAVKETKGKSLEEISKEEVIVQEEQFST

SEQ ID NO: 91801 - DNA, 1485 bp, Sulfolobus tokodaii str. 7
  CDS (1)..(1485): transl_table=11
atgtcaaataacccctttaaatcgttggattctttgaaactttcctttaatcacataaagatatggtatactgcaggaatgggtttttttactgatgcatatgatctactaatcataggttatataatagccactatagagtatgcacatacttatgcaggaatcattataccaggttttactgaatatttgattgggcataatgcagccttttggacaggtttattagcatcttcagcaatttggacagcaattataggtcagttattatttggttatttgggtgacagattaggaagaaagagtgtttacggtattgaagctatgctgttaacactaggcgcttttctaagtgcattagcatggaatttaccagcacttatagcattcagaatgttaatgggatttggaattggtggagattacccaatatcttcaactataatgagtgaatatgctaatgttaaggacagaggaaaattagtatccttagtatttgctaatcaaggtattggatctatagtagctgcagttgtaggtattgtatcagccttaacattaccaccagatattgcatggagagtgatggcaggtattggtgctattccagctgctacagttatctatttaaggagaaaagttcccgagactcccagatattctctacttgctaagggaaacatagaagaagctaaaaaagctgccgaattacttggaacaaaattagatgtagataagcgtgtaatatcaaagagacttagtatttctgaattctttgcaaaatatggtttattattaataggaaccgctggaacgtggtttattctagatatagcattctacggtactggaacatactcttctgctgtattagctccaatctttggtagtccgtttccagctactcatgtaactttatcattagcggagttccaagcagatttagctaaagatttatttctaggtgcaataccattcttagttggatttccaggatatttcacagcagtagctttaatggataaattaggtaggaaagtaattcaattacaaggcttcgtaatgatggctttaatttacggaattgtggcatcaatagctctaacttctggaactaaaataactggatttataataccatcaactttggcatttgcaatatattcgctatcctacttctttatagacttcggtcctaatacaactacatttgttataccagctgaagtttatccagtaagatatagaacaactggtcatggaatatcagctgccagtggtaaattaggagcagctataacaacctatctattcccattgttattagcatcaataggtattaagaatattttgataatgctagcaatagtaagcattattggtgcagtactaacgtatttctttgtaccagaacctaaacataagcctttagaggaagtagcaaaagaggaattagaagaagaacaaaatgtgcaaagtcaataa

SEQ ID NO: 91802 - protein, 494 aa, Sulfolobus tokodaii str. 7
MSNNPFKSLDSLKLSFNHIKIWYTAGMGFFTDAYDLLIIGYIIATIEYAHTYAGIIIPGFTEYLIGHNAAFWTGLLASSAIWTAIIGQLLFGYLGDRLGRKSVYGIEAMLLTLGAFLSALAWNLPALIAFRMLMGFGIGGDYPISSTIMSEYANVKDRGKLVSLVFANQGIGSIVAAVVGIVSALTLPPDIAWRVMAGIGAIPAATVIYLRRKVPETPRYSLLAKGNIEEAKKAAELLGTKLDVDKRVISKRLSISEFFAKYGLLLIGTAGTWFILDIAFYGTGTYSSAVLAPIFGSPFPATHVTLSLAEFQADLAKDLFLGAIPFLVGFPGYFTAVALMDKLGRKVIQLQGFVMMALIYGIVASIALTSGTKITGFIIPSTLAFAIYSLSYFFIDFGPNTTTFVIPAEVYPVRYRTTGHGISAASGKLGAAITTYLFPLLLASIGIKNILIMLAIVSIIGAVLTYFFVPEPKHKPLEEVAKEELEEEQNVQSQ

SEQ ID NO: 91803 - DNA, 1431 bp, Thermoplasma acidophilum DSM 1728
  CDS (1)..(1431): transl_table=11
atggcacaaggactgctccagcagcttgataatgcaaaggttggaaagttccatctgagggcatgggtcatatctggaatgggctttttcacggatgcatatgatcttttcataataggcacagtagtatcactgctaccgcttgctggctggaactccctaacaacagcggatatttcgctgatatcttcagtcgcccttcttgcatcggtcataggggcatttacctttggcaggttgctggatctgctcggaaggagcagagtttacggtttcgaactcatgcttctcataataggtgctgttggcagtgcatttcttgttcctgtcaacggtgtcctgtatctgctcatttggaggttcatacttggtctcggcataggcggagattacgcaggcagctccaccataatggctgagttttcaaatgcaaagaacaggggccagctcatcggcatggtcttctccatgcagggcttcggcctcgtcttcgggccggtgatagcgcttgtgatgcttagatacatacccagcatagaccttgtatggaggctgttgctgtttctgggtgcaatacctgccgcgatcgttctctatggaaggaggacgataggtgagacgccgaggtattcaataaatgtgtcaggagacatctcttcagcaaaaaaagcgatccaggagatatccggaaaatccacagtgcaggcaaatccggatgagctgattggtgagcacataagctggaagaagatgttcacggacaggtacttccttatgacgctcataggcacggccggcgcatggtttgcccttgactgggcattttatggcaactcgataatgagccaccagatgctatctgccatagttcctgcgtctctcggaggggtggcgaaggtaaagatgaccactttctatgccctcataatatttgccgtatccgcccttcctggatactggattgcgacgtttactgtggacagaataggaagaaagccccttcagatactcgggttcttcatgatggcgttatcctacatcatactgggcgtattcagattcatatctgcgccttcttacataatctggttcatgatcatatacggccttagctacttcttcacggaattcgggccaaacgttaccactttcatatacgggccagaaatgttcccgacgtctctgaggggcatgggctcaggtctgtcatctgcaggtggcaaactgggagcgttcatagggactgcacttaacgttgtgatatacgcgatcttcggtgaaagtgtgttgttcatcattctcgcattcatatccattgccggcgcacttctgaccatgttcttcctcccggagacgtccggcaggagtcttgaggatatctccggcgagagaaactacaaaagggcactgagcagtggatccaagaagtga

SEQ ID NO: 91804 - protein, 476 aa, Thermoplasma acidophilum DSM 1728
MAQGLLQQLDNAKVGKFHLRAWVISGMGFFTDAYDLFIIGTVVSLLPLAGWNSLTTADISLISSVALLASVIGAFTFGRLLDLLGRSRVYGFELMLLIIGAVGSAFLVPVNGVLYLLIWRFILGLGIGGDYAGSSTIMAEFSNAKNRGQLIGMVFSMQGFGLVFGPVIALVMLRYIPSIDLVWRLLLFLGAIPAAIVLYGRRTIGETPRYSINVSGDISSAKKAIQEISGKSTVQANPDELIGEHISWKKMFTDRYFLMTLIGTAGAWFALDWAFYGNSIMSHQMLSAIVPASLGGVAKVKMTTFYALIIFAVSALPGYWIATFTVDRIGRKPLQILGFFMMALSYIILGVFRFISAPSYIIWFMIIYGLSYFFTEFGPNVTTFIYGPEMFPTSLRGMGSGLSSAGGKLGAFIGTALNVVIYAIFGESVLFIILAFISIAGALLTMFFLPETSGRSLEDISGERNYKRALSSGSKK

SEQ ID NO: 91805 - DNA, 1431 bp, Thermoplasma acidophilum DSM 1728
  CDS (1)..(1431): transl_table=11
atgacagaaaacaacggaggtctggacgctataaatgaggctatcaacacgtctcatggtagtttccatctgaagaccgttcttatatccggattgggcttctttacggatgcctacgatctattcataatcggtgtggtcgtttctctgctttcgctggcaggctggacgaccgtggacactttctacaagggtctcataagctcaactgcgctaatatctgcagtcataggagccataatcttcggcaggctcctcgattacctgggcaggaagagagtctacgggcttgagctggcgatccttatagtcggtgccttgggcagcgctttcctgacgccttacaacaacgttatagccttaatagcgtggaggttcatcctgggtataggtatcggcggcgattacgccactagctcaaccataatagcagagtattcgaataccaagagcaggggcaagctcataggcagtgtattctcaatgcagagctttggactggttgcaggcccattggtagcgcttgcgttcatgcttcacggtattccgccggcaataacctggaaggccctgctggccataggggccataccggcagcaatcgtgatatacttcaggctgaagatgcccgagccgcctagatacacggcagcagcaaagggagacgtacacaaggctgcaaaggatctcaaggagtacaccggaatacatgttgaagtatcatccaaggataaatacgttgtgaaggccaaatggaccgcacttttcaaggacaggacttttctccttacgctgatcggtaccatgggtgcctggttcatgatggactgggcgctgtacggcaactcgataatgtcatcgacgatactttccgcacttgtaccatccacgattaaaggccttccagctctgataagatccacagaatacaccctgttgatatttgctggtgcagcattccctggctactggatagcaacttcagtgctggataagataggcaggaagaccatacagctcattggattcgcagttatggcactttcgtatgcactaattgcgataggctaccactcgataataggcaacataagcatgttcctggcgctgtacgggctcagctatttcttcatagagttcgggccaaacgtcaccacgttcgtgtatccgcccgaggtgtttccggtcacaacaagggggcttggaacaggtatgtcggcggcaggaggcaagataggcgcattcatcggtacctttgccgatgcgataatactcggcacagatgcgtctgcgcatctaccattcctgttctcgctcctcgccgtattcgcagttataggtttcgcactgacgctggtattgcttcctgagacaaagggaaggaatcttgaggacacgtcaggtgagaagaggtatacggtaaaggcctga

SEQ ID NO: 91806 - protein, 476 aa, Thermoplasma acidophilum DSM 1728
MTENNGGLDAINEAINTSHGSFHLKTVLISGLGFFTDAYDLFIIGVVVSLLSLAGWTTVDTFYKGLISSTALISAVIGAIIFGRLLDYLGRKRVYGLELAILIVGALGSAFLTPYNNVIALIAWRFILGIGIGGDYATSSTIIAEYSNTKSRGKLIGSVFSMQSFGLVAGPLVALAFMLHGIPPAITWKALLAIGAIPAAIVIYFRLKMPEPPRYTAAAKGDVHKAAKDLKEYTGIHVEVSSKDKYVVKAKWTALFKDRTFLLTLIGTMGAWFMMDWALYGNSIMSSTILSALVPSTIKGLPALIRSTEYTLLIFAGAAFPGYWIATSVLDKIGRKTIQLIGFAVMALSYALIAIGYHSIIGNISMFLALYGLSYFFIEFGPNVTTFVYPPEVFPVTTRGLGTGMSAAGGKIGAFIGTFADAIILGTDASAHLPFLFSLLAVFAVIGFALTLVLLPETKGRNLEDTSGEKRYTVKA

SEQ ID NO: 91807 - DNA, 1326 bp, Coxiella burnetii RSA 493
  CDS (1)..(1326): transl_table=11
atgaccaaccaggttcaaaaccctacactagaatctttagacgaacagaaacttaaccgcctgcattggcgtatggtgattaccgctgggacgggattttttacggatgcttatgatttattcgttatcggcgttgtcacggcattattgatgccgttatggcaccttagcgcctctcaaattgcgctattaaacggtgcttcgcttgcctcggcagctgtaggggcggtaatgtttggatggtttgccgataaatttggtcgaaagaaaatgtatggcattgaagtgcttatcctatttatcggcgctttgctttcggctgtttcgccgtcttttgcttggcttttggtttcccgaattatcgtaggcattggaatcggaggcgattatccaactagtgctgtcgtggcgagtgaatatgccaatcgaaaaaaccgtggctttttagtgctgctcgtgtttgcgatgcaggcggtagggttgattataggtccgctgtttgcctctttattgatggcgtttcatctgccgcatgcacttgtatggcgactattgctcgcctttggagcgctaccagcagcctctgttttttatttacgaagaagaatagcggaaacgccgcgatttttattaaacaaatctccggtggaagtaagtcgtgtggtcagtgacctggcgggtcattctgacacagcggtcgccactcctgtccagaaactcttctccccgaaatggcttaaatgcttgatcggaaccgctggtgcctggtttttgctagacgtcgctctttatggcaatggtgtctcctccgtgcttatcatgaaagcgattagtccgcacgcctcgttattaaaacacacccttctttctgcccttatttttctttgttttgcggttcccggctatttttccgctgcgacctatgtcgataagattggacgaaaaacgcttcaaatagcgggttttgtcatgatgggtttatgttatttactcattgccggaatcccgcatattagtgatcagttacctctctttgtgggaatctttggaatcagtttcttttttatcaatttcgggcctaatgcaacgacttttctgattccttccgaaatataccccattcacctacgtgcgcgagcacacgggttatccgccgccgtgggtaaagcaggcgcgtttatcggtgctttctttttacctttgttattaaaaaatatggggttggcctacacaatggcggtcgtagcaatcgcttcttttctcggtatttttgcaacttttttagtgcctgaaatgaaaggggtctctctggaaaaaccccagtag

SEQ ID NO: 91808 - protein, 441 aa, Coxiella burnetii RSA 493
MTNQVQNPTLESLDEQKLNRLHWRMVITAGTGFFTDAYDLFVIGVVTALLMPLWHLSASQIALLNGASLASAAVGAVMFGWFADKFGRKKMYGIEVLILFIGALLSAVSPSFAWLLVSRIIVGIGIGGDYPTSAVVASEYANRKNRGFLVLLVFAMQAVGLIIGPLFASLLMAFHLPHALVWRLLLAFGALPAASVFYLRRRIAETPRFLLNKSPVEVSRVVSDLAGHSDTAVATPVQKLFSPKWLKCLIGTAGAWFLLDVALYGNGVSSVLIMKAISPHASLLKHTLLSALIFLCFAVPGYFSAATYVDKIGRKTLQIAGFVMMGLCYLLIAGIPHISDQLPLFVGIFGISFFFINFGPNATTFLIPSEIYPIHLRARAHGLSAAVGKAGAFIGAFFLPLLLKNMGLAYTMAVVAIASFLGIFATFLVPEMKGVSLEKPQ

SEQ ID NO: 91809 - DNA, 1329 bp, Coxiella burnetii RSA 493
  CDS (1)..(1329): transl_table=11
atgcgatgggttatcgtcgtgaaggatgatgagagtaatatcaaagcattccattggcgaatcgtttttacggcgggaatggggttttttaccgatgcttatgatttatttatcatcggggttgttaccaccatcctcactccaatctggcatttaaccatttcccaattagctttattaaacggcgccgcgctggcggcggcggctgttggcgccatttcttttggtgttttgtctgacaaatttgggcgaaaaaggctgtatggtgtagaagttcttatcctttttttcggagctattctttctgcgtttcccccctcctacggatggcttttgttctctcgaatagtcgtcggtttaggcattggtggtgattatccttccagtgctattatcgccagcgaatatgcgcccagtcaaagacgtggttttttagtcttgctcgtctttgccatgcaagcgctcggtttggtggtcggccctttattggcttctcttttattggtcaccccgctttcgcacacgctggtttggcgcattttgctaggtattggggccatcccagcggcttctgttttctatcttcgacgacaaattgaagaaacgccccactatcttctgaaaaaatcgccgccggttgccgttagccgagtcgtgtcagatttaacaggcttcaccaaaaaaattaaagcccagcaagttcctcacccacagcactatttatttgaaaaaaaatggctcgtccgtctcattgggacggcgagtgcatggtttctgctggatgtcgccttttatggaaacagcgtttcatcggtccttattttaaaatggcttaatcctcaagctcaattagtcactaatacccttttaaccgctttaactttttttgtttttgctgtccctggttatctcttagccgctacttatatcgaccgcattgggagaaaatttttgcaaatgtttggattttttatgattgcagtggcttacggcgctatcgcgcttatccctcacttgactcagcacatcccgttatttattgccattttcggcatcagctttttcttcgttaattttggaccaaataccaccacttttttaattccttcggaaatctaccccaccagtttgcgcgcaagggcccatggaatttcagccgcttggggtaaggtaggcgcttttgtaggcgcttttttcttaccccacattttgcacacccaaggattacgctacaccatggcgcttcttgcagttgtttgtcttattggcattttagtcactttgttattaccggaaatgaaaggtaaagccattgatgtgatcgaataa

SEQ ID NO: 91810 - protein, 442 aa, Coxiella burnetii RSA 493
MRWVIVVKDDESNIKAFHWRIVFTAGMGFFTDAYDLFIIGVVTTILTPIWHLTISQLALLNGAALAAAAVGAISFGVLSDKFGRKRLYGVEVLILFFGAILSAFPPSYGWLLFSRIVVGLGIGGDYPSSAIIASEYAPSQRRGFLVLLVFAMQALGLVVGPLLASLLLVTPLSHTLVWRILLGIGAIPAASVFYLRRQIEETPHYLLKKSPPVAVSRVVSDLTGFTKKIKAQQVPHPQHYLFEKKWLVRLIGTASAWFLLDVAFYGNSVSSVLILKWLNPQAQLVTNTLLTALTFFVFAVPGYLLAATYIDRIGRKFLQMFGFFMIAVAYGAIALIPHLTQHIPLFIAIFGISFFFVNFGPNTTTFLIPSEIYPTSLRARAHGISAAWGKVGAFVGAFFLPHILHTQGLRYTMALLAVVCLIGILVTLLLPEMKGKAIDVIE

SEQ ID NO: 91811 - DNA, 1755 bp, Magnaporthe grisea 70-15
  CDS (1)..(1755)
atggcatccgagggcgtcgtcacaactcctgatgctgagcgcatcgcagcagtcaaggccaacaacttgactgctggcggcaacgcggccttcaagaacttcaacaaccagtttgcccacatcgacgaccgggccgagcgtcgccgactggctcttgcagagattgaccgtgcaccatttgggtggtaccatgtcaggactatctgcatcgcaggtataggtttcatgaccgactcgtacgacatttttgctgtcggtctgattacaagtctccttggcattgtctacttcaacggcaagatctcaagccaggatgacacagccatcaaagtcgctacctcttgcggaactgttgttggccaggtcggatttggagtcattgcagactggatcggacgaaagaagatatatggtgttgagcttatcatcattatcgtaaccactctgatccaggccttgtcctccaactctccggctgtttccatcatcggcctcttggttttctggcgtatcctcatgggcatcggcattggtggagactaccccctatcggctacgatcacttccgagtttgcgaccaccaagtggcgcggcttcatgatgaacgccgtgtttgccatgcaaggcattggtcagctttgcgctgccctggttctgctcgtcctctcggcggcattcaaatcgcagcttgaactggcctctagcccggccacttgttcaacgacaggtgcttgccttactgctgttgacaggatgtggaggcttatcattggctttggcgctattcctggttgcatcgctctctatttccgcttgacaatacccgagaccccacggtatacttttgacgtcgagaacgacgcagacaccgccaggggggcgctcaagtctgacgccaacgccactaccgctgtcactgagagccccgaggaggagacagcttcgcgagcagagttcatgaggcactacaagcagtggaagaacctgaaagtccttctcggctgtgccttgtcctggtttttcttggacattgcattctacggacttggtctcaacaaccccattattctgaacgcgatcggctggtcaggcggcagcaacatgtaccaggtcctttacaacactgccgttggcaacctcgttctcgttctcgccggtgccgtccccggatattgggtatcggccgggctcattgacactgtcggacgcaaacctatccagctttttggattctttgccctgacacttatcttcttcgtcattggcttcaagttctgggacctcaccggcaacgagcttttggctctctacaccatcgcccagttcttcttcaactgcggacccaacagcaccacctttatcatcccaggcgaagtcttcccgacacgctaccgatccactagtcacggcatttcagcagcatctggcaaaatgggtgccatcattgcacaagtcgtatttggacctttgaaggacattggtgccaacccgacccttgccaagacggacccgaagtgggctgccccgtggctcaaccacatcatgcagatctttgcctgcatcatggctctgggcttcttcacgacccttctgcttccagagacggcgaggaaaacccttgaagagctcgggggcacagatgctaccatcggccattcagtttccgacgtggttgaggagaaatcaagctctccggaatttaggagcaccagctcggacgatagggctgcctctgagcatcgtgctgacgcgtaa

SEQ ID NO: 91812 - protein, 584 aa, Magnaporthe grisea 70-15
MASEGVVTTPDAERIAAVKANNLTAGGNAAFKNFNNQFAHIDDRAERRRLALAEIDRAPFGWYHVRTICIAGIGFMTDSYDIFAVGLITSLLGIVYFNGKISSQDDTAIKVATSCGTVVGQVGFGVIADWIGRKKIYGVELIIIIVTTLIQALSSNSPAVSIIGLLVFWRILMGIGIGGDYPLSATITSEFATTKWRGFMMNAVFAMQGIGQLCAALVLLVLSAAFKSQLELASSPATCSTTGACLTAVDRMWRLIIGFGAIPGCIALYFRLTIPETPRYTFDVENDADTARGALKSDANATTAVTESPEEETASRAEFMRHYKQWKNLKVLLGCALSWFFLDIAFYGLGLNNPIILNAIGWSGGSNMYQVLYNTAVGNLVLVLAGAVPGYWVSAGLIDTVGRKPIQLFGFFALTLIFFVIGFKFWDLTGNELLALYTIAQFFFNCGPNSTTFIIPGEVFPTRYRSTSHGISAASGKMGAIIAQVVFGPLKDIGANPTLAKTDPKWAAPWLNHIMQIFACIMALGFFTTLLLPETARKTLEELGGTDATIGHSVSDVVEEKSSSPEFRSTSSDDRAASEHRADA

SEQ ID NO: 91813 - DNA, 2055 bp, Gibberella zeae PH-1
  CDS (1)..(2055)
atgccagactacgacgacatgctccccgagcctgcctccggctctcatcaggatcgaacttggggcggcaacaatgcttttcacaactttttcaacgatttctctcacatccccgacccaaatcttcgccgccgtcttgccttgtctgagattgataaggttccttttggcgcataccatatccgtgctgttttagtggcaggtgttggtttcttcctggattcatatgatatctttgctattaacctcatcacaatacttcttggagtcgtcttctggggagatccaaaccctcagaatgggtttagcggcaatgatggttacctccctgaccgagttaaccaagctttcaaagcatccaccagtgctggaattgtggtgggcatgatatggttttggccgacgacccctgctatggggtcaaccggcctcctgatcttctggcgcatcatcatgggaatcggcatcggcggtgattatccactatccagtgttattacatctgagttcgcacccacaaggtggcgtggtgctatggttgctgctgtcttttctatgcaaggacttggacaacttgcggctgctatcgttgccctgatcactaccgttgcgttcaagaatgcttttgtcggcgttgccgatgaaagcctatgcggtttcgaatgtcgattagctgccgaccgagcatggcgaattatcgttggggtcggcgccattcctgcttgtgccgccctctactaccgaattactattccagaaacgcctcgatacacattcgacgttgagctcgacgtcgaaaaagccgatgccgacatcaaagcatacgtagcgagcaagtccaaagggtcattcgatgtggttcatcaggttcgatccaagcgctcatctacgcgtggccttaatgtgcctcgcgcatcatggtctgatcttattgccttcttccgccaatggaccaacttgaaaatgctccttggcacaaccctttcgtggttcttcctggatctggctttttatggtctaggactcaacaatacctttatcctccacgcagtcggttacggtgctggcaacaatcttttcgaaaaacttcaaaaccaagcagtgggaatgatcatcttgacttgtgccggctcgctccctggctactggatggctattctcacagtcgacacaataggacgcaagccactgcaagtcattggtttccttctactcacaattctcttctgcgttcttggttttacatacaacaacctaacccaagggggcctacttgcactgtacatcgtcgggcagtttcttttcaacgctggcccaaacacaaccacgttcatcgttcctggcgaatgcttcccgacccgatatcgctccactggacacggaatcagtgccgctatgggcaagattggtgctatcgttgcccaagctattagcatccctatggttcgtcaaggagcctcagagaattgcaaagatgctgaatgcacaccaaatatgcatcggttgctccaactctttgctcttttcatgttattcggtacttttacctctttgttgattcccgaaaccaagggcatgaccttggaggagctgtctggggagccccggacgagctataactcgggatgtaatggaagcataagtctcggatcacctaaactcagggcatggaatcctttccatggtggtcagcctgcaggattctcatatcctaggtccagagcgagccagtttcgaaagagcgatcgtgttggcatcatgacgtcgccggagctcatggccgaaacgtctcgactccggaaaacgcgtctctggaggagacatcgcaaggccaagtcgagcagtggtacagacatcgccttgagcacccgaagctcgggcacggcggatgacgatatcttcccggcaggaccacctgctgctacaacaaccagtcctcctccgccaccgcctccaagttggggagctggctggggacggatagaccgaggagggccacctccgttgttgaactcggttcagctacaggatgttggtagcctccttacaaaatga

SEQ ID NO: 91814 - protein, 684 aa, Gibberella zeae PH-1
MPDYDDMLPEPASGSHQDRTWGGNNAFHNFFNDFSHIPDPNLRRRLALSEIDKVPFGAYHIRAVLVAGVGFFLDSYDIFAINLITILLGVVFWGDPNPQNGFSGNDGYLPDRVNQAFKASTSAGIVVGMIWFWPTTPAMGSTGLLIFWRIIMGIGIGGDYPLSSVITSEFAPTRWRGAMVAAVFSMQGLGQLAAAIVALITTVAFKNAFVGVADESLCGFECRLAADRAWRIIVGVGAIPACAALYYRITIPETPRYTFDVELDVEKADADIKAYVASKSKGSFDVVHQVRSKRSSTRGLNVPRASWSDLIAFFRQWTNLKMLLGTTLSWFFLDLAFYGLGLNNTFILHAVGYGAGNNLFEKLQNQAVGMIILTCAGSLPGYWMAILTVDTIGRKPLQVIGFLLLTILFCVLGFTYNNLTQGGLLALYIVGQFLFNAGPNTTTFIVPGECFPTRYRSTGHGISAAMGKIGAIVAQAISIPMVRQGASENCKDAECTPNMHRLLQLFALFMLFGTFTSLLIPETKGMTLEELSGEPRTSYNSGCNGSISLGSPKLRAWNPFHGGQPAGFSYPRSRASQFRKSDRVGIMTSPELMAETSRLRKTRLWRRHRKAKSSSGTDIALSTRSSGTADDDIFPAGPPAATTTSPPPPPPPSWGAGWGRIDRGGPPPLLNSVQLQDVGSLLTK

SEQ ID NO: 91815 - DNA, 1707 bp, Gibberella zeae PH-1
  CDS (1)..(1707)
atggcccaagaagcgcgtcccgtcgcaaagacgagtggcggaaataatgcctttcacaacttccacaacgactttgcccacatcgccgaccccaatgagcgtcgccgtctcgcccttgcagagattgacaaggctccctttggatggtatcatgttcgagcatgcatcgtcgcaggtgtcggtttcttcactgactcgtacgatatcttctgtgtctccatgttgaccatcatgctcggcatcgtctactatcccgggaagggtaagttgcccaccagctctgacaatgccatcaagctgtctacttctgccggtacggtgataggacagcttggctttggtatgctggccgatattgtcggtcgaaagcgcatgtatggtctggagttgatcgtcatcatctttgctacgcttgctcaggccctgactgctggatcgccttccacctcccttgttggacttatcatcttctggcgtgttatcatgggcgtgggtatcggtggtgactatccattgtcttccatcattacttcagagttcgctactaccaagtggcgaggtgccatgatggctgccgtctttgccatgcaaggtatcggccaacttgtcgcagctcttgtcatgatgttcctcactctcggcttcaagtcttctcttgagcaagctgccgatacaaagagctgcactggagattgccaaattgctgttgacaagatgtggcgaacacttgttggcttcggagctgtccccgcttgcattgccctctactaccgtcttactatccctgagactcctcgttacacctttgacgtcgcccgtgacgtcgagcaggccgatgaggacgtcaaggcttatatcaacggcaagagcgaaggcaacaccgacgaagtcacccgtgcccagaaccttcaatccgccaagactaacctcgaagtccccaaggccagctggagagacttctttcagcactacagcaagtggaagaacgcctctctgcttcttggaactgctggttcatggttctgtctcgatgtggctttctatggtctctctttgaataacggaaccatcctcaaggttattggatattccaccaaggatgctactaatgtctacgagtttctccacaacacagctgtcggaaatatcattattgtcttggcaggagctgttccaggttactgggtttctgtggcgactattgatactcttggacgaaagacgattcaacttggtggtttcattatcctaactatccttttcattgtcatgggctttgcttacaaccacatcccttccaacggacttttggctatttacgttcttgcccaattctttttcaactttggccccaacaccactactttcatcgtccctggtgaagtattccctactcgataccgttcaacctcccacggtatctctgctgccagcggtaaaatcggttccatcatcggccaaggtgccatttccatcctccgaacccacggagccacagataagaacgaggcaccttggatggaccacgttcttgagatttacgctcttttcatgcttcttggtatcttcactactctgttgattcccgagactgctcgcaagactcttgaggagctttcgggtgaagatgactacgccaaccatgatcatgcgttggagtcagagactcaggctagtcacgacaaggctggacgaaccagcgtttag

SEQ ID NO: 91816 - protein, 568 aa, Gibberella zeae PH-1
MAQEARPVAKTSGGNNAFHNFHNDFAHIADPNERRRLALAEIDKAPFGWYHVRACIVAGVGFFTDSYDIFCVSMLTIMLGIVYYPGKGKLPTSSDNAIKLSTSAGTVIGQLGFGMLADIVGRKRMYGLELIVIIFATLAQALTAGSPSTSLVGLIIFWRVIMGVGIGGDYPLSSIITSEFATTKWRGAMMAAVFAMQGIGQLVAALVMMFLTLGFKSSLEQAADTKSCTGDCQIAVDKMWRTLVGFGAVPACIALYYRLTIPETPRYTFDVARDVEQADEDVKAYINGKSEGNTDEVTRAQNLQSAKTNLEVPKASWRDFFQHYSKWKNASLLLGTAGSWFCLDVAFYGLSLNNGTILKVIGYSTKDATNVYEFLHNTAVGNIIIVLAGAVPGYWVSVATIDTLGRKTIQLGGFIILTILFIVMGFAYNHIPSNGLLAIYVLAQFFFNFGPNTTTFIVPGEVFPTRYRSTSHGISAASGKIGSIIGQGAISILRTHGATDKNEAPWMDHVLEIYALFMLLGIFTTLLIPETARKTLEELSGEDDYANHDHALESETQASHDKAGRTSV

SEQ ID NO: 91817 - DNA, 1743 bp, Candida glabrata CBS 138
  CDS (1)..(1743)
atgagcagaaacgagaaggacgagatcgaagtagacaccagggagaagaaagtccctgtgcacatcacggaaggtggtaacatggccttccacaactacttgaacgatttcgcacacattgaggacccattggagagaaggaggctggctttgcagaagatcgacgagaggccgttcggctgggaccaagtccgtaccattctgatcgcgggtgtcggtttccttacagactcgtacgatatcttcgccatcaacttgtctatatcaatgatgtcctacgtgttctggcaaggtaacatgccaaactccacacagacgctgctgaaggtctccacctctgtcggtacagtcatcggtcaattgggtttcggtaccatggccgacattgtcggtcgtaagaagatatacggtttggaactgatagtcatgatcgctactaccatcttgcagaccaccattggccgttccccaggtattaacttcccagccgtgctgaccttctaccgtattgtgatgggtatcggtatcggtggtgactacccattgagttccatcatcacatctgagttcgctaccactaagtggagaggtgccatcatgggtgccgtgttcgctaaccaggcatggggtcagatcgcgggcggtctggttgcgttgatcgttatccgtgcttacaaaggtgatttgatctatgccaactctggtgccgagtgtgactacgcctgtcaaaaggcctgtgaccaaatgtggagaatcctaattggtttcggtgccgtcccaggtattatcggtctatacttcagattgaccatccctgaatccccaagatacgccctagatgtcaaggaagaagttgacttgccatctaacattgagaaggtccgtgccactgccgacgatgagcacttggaggacctagaaagatcatccactgttgtcgaagacggtatcgtcgtcccaccaccaaagaaggcctcctggaaggatttcagaagccatttcggtaagtggaagtacggtaagattctattgggtaccgccggttcttggttcgtgctggatgtggccttctacggtttaagtttgaacaccgccattatcttgcaaaccattggttatgctggttccaagaacgtgtaccacaagcttgacgactccgctgtcggtaacctgatcttgatctgtgctggttccctgccaggttactgggccactgtgtttactgttgataccattggtagaaagcctatccagatgatgggtttcatcatcctaaccgcgttgttctgtgtcattggtttcgcttaccacaagatcagcgaccacggtctgctggctctgtacgttatctgtcaattcttccagaacttcggtcctaacgttactactttcatcgtccctggtgaagtgttcccaaccagatacagatccactgcgcacggtatctctgctgcgtgcggtaaagtcggtgccatcattgcacagaccgccttgggtactctgatcgaccacaactgtgccagagacggcaagcctaagaactgttggttgccacacgttatggagatcttcgcgctgttcatgctgctcggtatcttcttgacgttgctgatcccagagaccaagagaatgaccctggaggagatctctgagaagtaccacgacgaagtggacatctccaagctggccccagttactgtcgccgacagcacttcctcgtcctctgtctcacacatggtttga

SEQ ID NO: 91818 - protein, 580 aa, Candida glabrata CBS 138
MSRNEKDEIEVDTREKKVPVHITEGGNMAFHNYLNDFAHIEDPLERRRLALQKIDERPFGWDQVRTILIAGVGFLTDSYDIFAINLSISMMSYVFWQGNMPNSTQTLLKVSTSVGTVIGQLGFGTMADIVGRKKIYGLELIVMIATTILQTTIGRSPGINFPAVLTFYRIVMGIGIGGDYPLSSIITSEFATTKWRGAIMGAVFANQAWGQIAGGLVALIVIRAYKGDLIYANSGAECDYACQKACDQMWRILIGFGAVPGIIGLYFRLTIPESPRYALDVKEEVDLPSNIEKVRATADDEHLEDLERSSTVVEDGIVVPPPKKASWKDFRSHFGKWKYGKILLGTAGSWFVLDVAFYGLSLNTAIILQTIGYAGSKNVYHKLDDSAVGNLILICAGSLPGYWATVFTVDTIGRKPIQMMGFIILTALFCVIGFAYHKISDHGLLALYVICQFFQNFGPNVTTFIVPGEVFPTRYRSTAHGISAACGKVGAIIAQTALGTLIDHNCARDGKPKNCWLPHVMEIFALFMLLGIFLTLLIPETKRMTLEEISEKYHDEVDISKLAPVTVADSTSSSSVSHMV

SEQ ID NO: 91819 - DNA, 1701 bp, Debaryomyces hansenii CBS767
  CDS (1)..(1701)
atgagcagtattactcaagaaatccaagctcacgaagtgtctaactcgggtggtaagaccgctttcaaagattacatcggaaagtacgcccacattgaagacccattggaaagaagaagattggcattggaagatattgataatgctggatttggatggacccaaataaagatgatcatgattgccggtgttggtttcatgactgattcatacgatattttcgcgattaacttgtctgttactatattatcgtatgtgtactggtctggtgttatgccagattccaccactaccttgattaaagtttcaacctcggttggtaccgttatcggtcaattagggtttggtattatggctgatgtcgttggtcgtaaaaagatttatggtttggaattgattgtgatgattgcagccaccattttccaatgttgtcttggtgaagcccctggtgtgaactttgtggcaatcttctccgtattgagaatcattatgggtatcggtattggaggtgattatccattatcgtccattatttcttctgaattcgctaccacgaaatggagaggtgccattatgggtgctgttttctctaaccaaggtcttggccaaattttagccggtattgttaccattgtctgcgttgccggttacaaaaatcaattgattggtgctactattgactctgccaccaaaattgccgactgtgatgctacttgtcaaaaggcttgtgaccaaatgtggagaattgtcgttggtttcggttgtgttccaggtgtcattgccttatactacagattgaccattgctgaatccccaagataccacttagatgttgatgaacatgatgaccttgaaaaagttgttgaagctgaagttgtccttgacaaggctgccgctgacattgctccaccaaaggcttctttcgttgaattctggaagcatttcggtcaatggagatacggtaagattttaatcggtactgctggttcttggtttatgttggatgttgcttattatggtttaggtttaaacactgctaccattttacaaaccattggttacgccggtggtgacaatgtgtatgatgttttatacaactctgctgctggtaacttaattttagtttgtgccggttccttgccaggttactgggccactgttgccactgttgacattattggtcgtaaaccaattcaaatcggtggtttcgttatcttgactattttattatgtgctatcgggtttggttatgataaattgaagaacgagacgactaatggtttattagccttatatgtcttatgtcaattcttccaaaatttcggtccaaatactactaccttcatcgtccctggtgaagttttcccaaccagatatagatcttctgctcatggtatttcagccgcttctggtaaagtcggtgctatcattgctcaaacctgtattggtactttaattaaccacggctgtgctgccgatgataagaactgtttcttacctcatgttatggaaatctttgcattattcatgttgattggtatctttacctcattattaatcccagaaaccaagagaaagaccttggaagagatcgctgaaagatatcatggtgaaattgataccactaagttagttcaagacagaatgaccgaagcccctcgtggccaagatgattctttcagctccgatgctaagcaatag

SEQ ID NO: 91820 - protein, 566 aa, Debaryomyces hansenii CBS767
MSSITQEIQAHEVSNSGGKTAFKDYIGKYAHIEDPLERRRLALEDIDNAGFGWTQIKMIMIAGVGFMTDSYDIFAINLSVTILSYVYWSGVMPDSTTTLIKVSTSVGTVIGQLGFGIMADVVGRKKIYGLELIVMIAATIFQCCLGEAPGVNFVAIFSVLRIIMGIGIGGDYPLSSIISSEFATTKWRGAIMGAVFSNQGLGQILAGIVTIVCVAGYKNQLIGATIDSATKIADCDATCQKACDQMWRIVVGFGCVPGVIALYYRLTIAESPRYHLDVDEHDDLEKVVEAEVVLDKAAADIAPPKASFVEFWKHFGQWRYGKILIGTAGSWFMLDVAYYGLGLNTATILQTIGYAGGDNVYDVLYNSAAGNLILVCAGSLPGYWATVATVDIIGRKPIQIGGFVILTILLCAIGFGYDKLKNETTNGLLALYVLCQFFQNFGPNTTTFIVPGEVFPTRYRSSAHGISAASGKVGAIIAQTCIGTLINHGCAADDKNCFLPHVMEIFALFMLIGIFTSLLIPETKRKTLEEIAERYHGEIDTTKLVQDRMTEAPRGQDDSFSSDAKQ

SEQ ID NO: 91821 - DNA, 1734 bp, Yarrowia lipolytica CLIB122
  CDS (1)..(1734)
atggccgataacaacgtgaccgaaggtggaaacgccgccttccacaactatgtcaacgactttgctcacattgaggaccccaacgagcgacgacgactcgccctggagaagattgacaacgccagcttcggctgggagcacattcgagccatcaccgtcgccggtgttggtttcatgactgatgcctacgatatcttcgccattaacctgggtatcaccatgatgggatacgtctactggggtcagaccatcaacggtcccggtaagccccccacctccactgccactctgctcaaggtgtccacctcagttggtaccgtcattggacagtttggtttcggtattcttgccgatatcgttggccgaaagcgaatctacggctccgagctcatgctcatgattggagccaccatctcccagtgtatggccggccattccgaggctatcaactttgttgccgttcttaccttctggcgaattgtcatgggtatcggtatcggaggtgactaccctctgtcttccattatcacttccgagttcgccaccacccgatggcgaggtgccatgatggctgctgtcttcgccaaccagggctggggtcagctcatgggtgccatcgtctccattgtttgcatggctggtttcaagaaccagctcgagccctctcacagcgccaaggactgtggcaaggtctgtcgacaggccctggacatgtcctggcgaattctggtcggatggggttgtgtccctgccatggccgctctctacttccgactgaccattcccgagaccccccgatacacctttgatgtgtctcgagacattgaaaaggcccagaaggacattgaaaagtacaccaacggtgacaccagcggcgataactccgacaagaacgatgagattgaggctctgcgagccaaggccgaggccctggccacccagcaggcttcttacgctccccccaaggcttccttcaaggatttctgccgacatttcggacagtggaagcacggaaagattctcattggtaccgccggctcgtggttcttcctggatattgccttctacggtcttggtctgaacaactcccagattcttaaggctatccatttcgataagggagacaacctgtactctactctgatgaagaactccatcggtaacctgattcttgtctgtgccggagccattcccggatactggatttctgtggtcaccatcgataccattggccgaaagcccattcagattggaggtttcctcattctggttgctctcttctgtattatcggtttcggatactacaagatccacgatggaggtctgcttgcatgctacattctgtgtcagctctttgaaaactttggccccaacaccaccaccttcattgttcccggagaggtgttccccacccgataccgatcttcggcccacggtatctctgccgctgctggtaagatcggagctattatcgcccaggtcgttattggtactctgattgaccacaactgtgctcgagacggtaagcccgccggatgttggcttaaccacgtcatggagattttcgccctcttcatgctctgtggattcttcgtctccttcctcattcccgagaccaagcgaaagaccctcgaacagctgtccgaggagctgcatggtgagatccagtggcgacccccccacgagatggagcactcttctcatgacttcaatgaggaggagaagtcggtctaa

SEQ ID NO: 91822 - protein, 577 aa, Yarrowia lipolytica CLIB122
MADNNVTEGGNAAFHNYVNDFAHIEDPNERRRLALEKIDNASFGWEHIRAITVAGVGFMTDAYDIFAINLGITMMGYVYWGQTINGPGKPPTSTATLLKVSTSVGTVIGQFGFGILADIVGRKRIYGSELMLMIGATISQCMAGHSEAINFVAVLTFWRIVMGIGIGGDYPLSSIITSEFATTRWRGAMMAAVFANQGWGQLMGAIVSIVCMAGFKNQLEPSHSAKDCGKVCRQALDMSWRILVGWGCVPAMAALYFRLTIPETPRYTFDVSRDIEKAQKDIEKYTNGDTSGDNSDKNDEIEALRAKAEALATQQASYAPPKASFKDFCRHFGQWKHGKILIGTAGSWFFLDIAFYGLGLNNSQILKAIHFDKGDNLYSTLMKNSIGNLILVCAGAIPGYWISVVTIDTIGRKPIQIGGFLILVALFCIIGFGYYKIHDGGLLACYILCQLFENFGPNTTTFIVPGEVFPTRYRSSAHGISAAAGKIGAIIAQVVIGTLIDHNCARDGKPAGCWLNHVMEIFALFMLCGFFVSFLIPETKRKTLEQLSEELHGEIQWRPPHEMEHSSHDFNEEEKSV

SEQ ID NO: 91823 - DNA, 1728 bp, Yarrowia lipolytica CLIB122
  CDS (1)..(1728)
atggacgctcagaacaagactgccggtggtaacgccgctttccacaacttcgtgaacgacttcgctcacattgaggaccccaatgagcgacgacgactcgcgctggagaagattgactccgcttctttcggatggtaccacatccgagccatcatggttgccggtatcggtttcatgacagactcttacgatatcttcgccatcaacctgggtatcaccatgatgtcctacgtttactggggccagggaactggccacgatggtcacattcccgattccaccaacaccctgctcaaggtctccacttctgtcggtaccgtcatcggtcagcttggtttcggtattcttgctgatgttgtcggccgaaagaagatctacggtgttgagctgattctcatgatcggtgctaccattgctcagtgtatgactggccactctcaggccatctccttcgttgccgtcctcaccttctggcgaattgtcatgggtatcggtatcggaggtgactatcctctgtcttccattatcacttctgagttcgctaccaccaagtggcgaggagccatgatgggtgctgtcttcgccaaccagggctggggccagctcatgggctccatcgtcgccatctgttgtgttgctggcttcaagaactctcttgagccctaccacggcgccaacgactgtggctttgactgtcagcaggctctcgataagtcttggcgaatccttgtcggatggggttgtgtccccgccatgtgcgctctgtacttccgactgaccattcccgagaccccccgatacacctttgacgtttctcgagacattgagaaggctcaggctgacattgacaagtacacttctggcgagcacggaaacgcctcccccgaggagattgaggctctcaaggcccaggctgaggagctccagacccagcagaacgcttacaacccccccgttgcctctgccggcgacttcttccgacatttctcccagtggaagcacggaaagattctgcttggtactgccggttcttggttcctgctcgatgttgccttctacggactgggtcttaacaactccaccattctgcacaccattggtttcgataagggtgacaacctgtactccaccctcatgaagaactccgtcggtaacctgattcttatctgtgccggtgccatccccggatactggctctctgttgtcaccgtcgacttcattggccgaaagcccatccagattggaggtttcaccatcctgactgctctcttctgtattattggtttcggttacgacaagattggagagggaggtctgctcgcctgttacattctgtgtcagctctttgagaactttggtcccaacgtgaccaccttcattgtccccggagagtgctaccccacccgataccgatcttccgctcacggtatctctgctgcttccggtaaggtcggtgccatcattgcccaggtcgttattggtactctggtcaaccacaactgtgaccgagacggaaagcccaagggatgttggctcaaccacgtcatggagatcttcgccctcttcatgctgctcggtatcggtacttctttcctgattcccgagaccaagcgacgaacccttgaggatcttgctgaggagctgcacggtgaggtccagtggcgaccccctgtggaggaccaggctgaggatgtctccgacttcaacgacaacgagaagtctgtctaa

SEQ ID NO: 91824 - protein, 575 aa, Yarrowia lipolytica CLIB122
MDAQNKTAGGNAAFHNFVNDFAHIEDPNERRRLALEKIDSASFGWYHIRAIMVAGIGFMTDSYDIFAINLGITMMSYVYWGQGTGHDGHIPDSTNTLLKVSTSVGTVIGQLGFGILADVVGRKKIYGVELILMIGATIAQCMTGHSQAISFVAVLTFWRIVMGIGIGGDYPLSSIITSEFATTKWRGAMMGAVFANQGWGQLMGSIVAICCVAGFKNSLEPYHGANDCGFDCQQALDKSWRILVGWGCVPAMCALYFRLTIPETPRYTFDVSRDIEKAQADIDKYTSGEHGNASPEEIEALKAQAEELQTQQNAYNPPVASAGDFFRHFSQWKHGKILLGTAGSWFLLDVAFYGLGLNNSTILHTIGFDKGDNLYSTLMKNSVGNLILICAGAIPGYWLSVVTVDFIGRKPIQIGGFTILTALFCIIGFGYDKIGEGGLLACYILCQLFENFGPNVTTFIVPGECYPTRYRSSAHGISAASGKVGAIIAQVVIGTLVNHNCDRDGKPKGCWLNHVMEIFALFMLLGIGTSFLIPETKRRTLEDLAEELHGEVQWRPPVEDQAEDVSDFNDNEKSV

SEQ ID NO: 91825 - DNA, 1596 bp, Ustilago maydis 521
  CDS (1)..(1596)
atggctttcggtaaggacatggacgcctgggccggcgacactggcctggcccttgttgaaaagaacgagaaaaagtcgcgctttgccgtctcgtgggccgaagccaagcttctcacgattgctggtgtcggtttcttgatggacgcttgggacttattcatcatcaacatcatctactcgattatcctgatcgcttactatcccaaaggcaccaagaacatcgactggggtctcgagggcggcgtgctaaaggccgccgccaacattggtaacattgttggtcagctcttctttggtttctgcggtgacatgttcggtcgctccgctgtctacggcaaggaactcttcattgttatcgtagccgtcatcctccagatctcggctccagactctattggcggtcatggcatcactatctggcttactgtcttccgtttcatcatgggcatcggcattggcggtgactaccccatgtcagccacaatcgtctcggaccgagcgcatctcaagaaccgtggcttccttctcagctggatcttctccaaccagggttggggtaacctcactggtgccctcttcgccgttattgtcattgctggctaccgccactacgtcgacgctggcgacgtacacaagctttcgggcgcttggcgcattcttcagggcctcaccctgattcctgccttcatcgtgctctatttccgtctcacccttgtcgagtcgacccgtttcactcaggctcgtaaactccaggacgaccctgagcttattgccaagggtcagaacaacctcaaccgctccaactcggacgacgatggcattatcaaggagaaggcccttggcggcgacatgacccccatcgagaacaccgccgttggcatgtcctttaagtcgatcggaaagcccaagaacgagttcatcgactacttctcccagtggaagaatgccaagaagctcttcggttgtgctgccacctggttcctggtcgacattaccttctacggtatcaatctcaaccagtcttccatccttaacgctattggcttcaccaacggttccacctggggcaaactcatgaaaactgcgactggaaacctcatcatcacttgcgccggtttcttgcctggttacttcttcaccatgttcactgtcgacattgtcggccgtagggctatccaactctttggtttcatcatgaacgctctgttcctcggcatcctcgccggtcgcttcgatcacctcaagcaccagactggtcccttcttcgtcgtcttcgtcttcttgcaacttactttcaactggggtgccaacgcaacaacgttcatcgtccctgccgaagccttccccacccgagttcgtgccaccgctcacggtttctgtgccgcgtgcggtaagtgcggtgccattctgtcgtcgctgctcttttcgcaccttgccaccaagaccagtcttggaaaccagggtgtcttctggatcttctttggtgtctcgatcctcggtgccattgtgacctacttatttgttcccgagaccaacgagtacgacgctgatgaggaagaccgcaaggagcttgctgcccgcgccggtgttcagtag

SEQ ID NO: 91826 - protein, 531 aa, Ustilago maydis 521
MAFGKDMDAWAGDTGLALVEKNEKKSRFAVSWAEAKLLTIAGVGFLMDAWDLFIINIIYSIILIAYYPKGTKNIDWGLEGGVLKAAANIGNIVGQLFFGFCGDMFGRSAVYGKELFIVIVAVILQISAPDSIGGHGITIWLTVFRFIMGIGIGGDYPMSATIVSDRAHLKNRGFLLSWIFSNQGWGNLTGALFAVIVIAGYRHYVDAGDVHKLSGAWRILQGLTLIPAFIVLYFRLTLVESTRFTQARKLQDDPELIAKGQNNLNRSNSDDDGIIKEKALGGDMTPIENTAVGMSFKSIGKPKNEFIDYFSQWKNAKKLFGCAATWFLVDITFYGINLNQSSILNAIGFTNGSTWGKLMKTATGNLIITCAGFLPGYFFTMFTVDIVGRRAIQLFGFIMNALFLGILAGRFDHLKHQTGPFFVVFVFLQLTFNWGANATTFIVPAEAFPTRVRATAHGFCAACGKCGAILSSLLFSHLATKTSLGNQGVFWIFFGVSILGAIVTYLFVPETNEYDADEEDRKELAARAGVQ

SEQ ID NO: 91827 - DNA, 1392 bp, Picrophilus torridus DSM 9790
  CDS (1)..(1392): transl_table=11
atggtagaggatcaaaacatattaaatcaggctgatagggcacccacagggagattccatttaaaggccatatttgtggccagcatgggtttctttacagatgcctacgatttatttgctatatctacagcactgccattgattgtttccgcatccgtctttgatgtaacaaaccattttgttcagggacttgttggtgcggccgtattgattggagccgtcataggagcccttacattcggcaggataggcgacatacgtggcaggaaatacgtctatggagttgaaatggcaatactggtaacatttgcagtaatctcggcattctcagtaaacatctggatgctgataatcacaagactgcttcttggcataggcataggcggagattatccaataagctcaacaataatgagcgagtactcaaatgtaaagagcaggggcaagatggttcagaccgtttttgcaatgcagggctttggcctgcttcttggagccgtcataggacttattgcaattcacacaatgccggttaactatgcatggaggttcatgcttggattcggagcaataccggcggcgtccgttatatatctaagaagaaagataaaggaaacaccaaggtattcactgcagaccaaaggtgatgtaaaggcagccgcagcagccgttgaggatataacaggatcaaagatagatgtaaaggactcaaatataaacgtttcaaaaaaatccggaatattaacaaaatacattgcgcttttgataggaactgccggaagctggtttttatttgatatggcattctatggaacatcaataaacaactcaataatattcaatgcaataggctatggaagcgtaacaaatgctgttctatcagcatcaaacacggcaataggaaatataataatagcggcagcatttgaaatacctggatactggatagcatttggattaatagaccgcgtcggcaggaaatttttacagtggatgggcttcagcgtcatgggaataatatatctaatatttgcactggcatttgcaccgcttaaggcagatataccattgttcatagggctttatggattatcattcctgttcgcaaacatagggcctaactcaacaacgtttatactaccaacggaattattcccaacgcaggttagaacaacagcgcatggtatatcagcaggtgccggtaaaacaggtgctgcaatatttacatttgcactgccatcaatagaggctgcccttggacttaaaggcgtctttgcacttcttacaggattttcattcatagcagttattataacattgctgttcataagggaaacaaagcagaagagccttgaacagacaagcaggcaggattcagttatggcacattaa

SEQ ID NO: 91828 - protein, 463 aa, Picrophilus torridus DSM 9790
MVEDQNILNQADRAPTGRFHLKAIFVASMGFFTDAYDLFAISTALPLIVSASVFDVTNHFVQGLVGAAVLIGAVIGALTFGRIGDIRGRKYVYGVEMAILVTFAVISAFSVNIWMLIITRLLLGIGIGGDYPISSTIMSEYSNVKSRGKMVQTVFAMQGFGLLLGAVIGLIAIHTMPVNYAWRFMLGFGAIPAASVIYLRRKIKETPRYSLQTKGDVKAAAAAVEDITGSKIDVKDSNINVSKKSGILTKYIALLIGTAGSWFLFDMAFYGTSINNSIIFNAIGYGSVTNAVLSASNTAIGNIIIAAAFEIPGYWIAFGLIDRVGRKFLQWMGFSVMGIIYLIFALAFAPLKADIPLFIGLYGLSFLFANIGPNSTTFILPTELFPTQVRTTAHGISAGAGKTGAAIFTFALPSIEAALGLKGVFALLTGFSFIAVIITLLFIRETKQKSLEQTSRQDSVMAH

SEQ ID NO: 91829 - DNA, 1392 bp, Picrophilus torridus DSM 9790
  CDS (1)..(1392): transl_table=11
atgaatagtattgattcagctcttgaaaatgccgggaattcaaagttccattacagggttgttttcatatcaggtctcggtttctttacagatgcctatgaccttttcatcattggtgttgttataaatttgctgccgctgtctggatggcatttaagcatacaggaaagggcaatactggactcaatgtccctgcttgcagctgtttttggtgccctgctttacggcaggctccttgattttcttggaaggaaggctgtttacggcagcgagattataattcttgtcataggagccattggtagcgccgttgcaacgccatataataatgtaattgcactgataatatggagattcctacttggctttggcataggcggtgactattcaacaagctcgacaataatgacggagtactcaaacagaaaatccaggggaagattcataggcatggttttttcaatgcagagtataggtcttgttgcgggcccattgataacgatattatttttgacatcaagcatacctgtttatattacatggagggcactgcttttcataggtgcaataccggcaatgcttgttatatactttagaaggaccatgcctgagccgccaaggtacaccgcaagcgtccgtggtgattttaaaagggcatctgaaaatcttaaaaagttcgccggcatagattcagaggcaacaggcagaattgtgtcaataagatggacacggcttttcatggataaaaggttttttataacgttgattggaaccagtgttacatggttccttatggactgggccttgtatggaaattcaataatgtcaaatgaaatattatcatatattgttccttcgtatatcacaggtatacaaagcataataagaacttcagagtactcagcaatgatcttcggtattgctgcctttcccggatactgggctgctgcatttttaatagataagattggcagaaggttaatacagatacttgggttttccattatggggctgtcatatatattaatagcgctaacaggcatagcctctgcatcttacatatcatattttcttctggtctatggattaagctacttcttcatagagtttgggccgaacatgacaacctttgtttatccaccggagctgtttccaataacaacaaggggtcttggaactggaatatcagctgcaggcggtaagataggggcctttgctggaacattaaccgataccataatactggcattttacaatgtaaattatttaatgattatacttgcatttctttcatttgcgggtgctgtaataacctttgcactgcttcctgaaacaaagagaaaaccgcttagcgagacatctggtgagagaagatattcaattgcaaaatag

SEQ ID NO: 91830 - protein, 463 aa, Picrophilus torridus DSM 9790
MNSIDSALENAGNSKFHYRVVFISGLGFFTDAYDLFIIGVVINLLPLSGWHLSIQERAILDSMSLLAAVFGALLYGRLLDFLGRKAVYGSEIIILVIGAIGSAVATPYNNVIALIIWRFLLGFGIGGDYSTSSTIMTEYSNRKSRGRFIGMVFSMQSIGLVAGPLITILFLTSSIPVYITWRALLFIGAIPAMLVIYFRRTMPEPPRYTASVRGDFKRASENLKKFAGIDSEATGRIVSIRWTRLFMDKRFFITLIGTSVTWFLMDWALYGNSIMSNEILSYIVPSYITGIQSIIRTSEYSAMIFGIAAFPGYWAAAFLIDKIGRRLIQILGFSIMGLSYILIALTGIASASYISYFLLVYGLSYFFIEFGPNMTTFVYPPELFPITTRGLGTGISAAGGKIGAFAGTLTDTIILAFYNVNYLMIILAFLSFAGAVITFALLPETKRKPLSETSGERRYSIAK

SEQ ID NO: 91831 - DNA, 1581 bp, Capsicum frutescens
  CDS (1)..(1581)
atggctggtgaggctaataacaatctacaagttcttaatgcacttgatttggctaaaactcaactttatcatttcacagcaattattattgctggcatgggatttttcactgatgcttatgatctctttagcatttcacttgtcacaaagttacttggacgtttatactacacgaaaccggatttgttgaagcccgggacactccctccgggtgtgtcttcatcggtcacgggtgttgccttagttgggaccctcgcgggccagctattcttcggctggctcggagacaaaatggggcgaaaaaaggtgtatggtataactttggtactcatggttgtgagttcacttgcttccggactctcctttggtaatactcctaagggtgttatggctacactttgtttctttaggttttggcttggatttggcattggtggcgattaccctttatcggccacgattatgtctgaatacgctaacaagaagacgcgtggtgcattcatagccgcggtcttcgctatgcaagggttcggaatcttgttcagtgggataattgcactgattgtttcggcaggttttgatcatgcttataaggcccctactttcgcggaaaatgcagctctgtctactgtgccacaagccgactacatttggcgtgtaatcctcatgttcggggcgttgcctgcaggactcacttactactggcgcatgaagatgcctgaaactgctcgttacacggctctagtggcgaaagatgctaaaagagccgcgcaggacatggggaaagtactgcaggttgacattgatcctgaggcagcgaaaatcgagcaattgtcaagagatgaagccaataaattcggcctgttttcgtgggaatttgtgcgtcgccatggagtgcacctattcggaacatgttctacatggtttttactagacattgctttctacagccagaatcttttccaaagagatgtgttctcagcaattggatggattcctccggccgcaacaatgaatgctgttcaggaagtttacaaaatctccagagcgcaaaccttgattgcgctctgtagtacggtgccagggtattgggtcaccgtggcattgattgatatcatcggaaggttcagtatccaattgataggatttttcttcatgaccgtgttcatgttcgcgatcgctatcccctaccatcattggacattgaaggacaaccgtattggattcgtcataatgtactcccttacatttttcttcgcgaattttggacctaacgcgactacatttgtggtaccggctgagattttcccagccaggcttaggtcaacatgtcatggtatttccgcggctgctggtaaggctggagctatagtgggagcatacggattcctatacgctgcgcaaaacaaagatccaaagaaaaccgatgcaggataccccacgggtatcggaataaagaactcgctcattgttctagggtgcatcaatgcactaggaatgatttgcacattttgtgtgccagagccaaaaggaaaatctcttgaagaagcatcacaagaaactatctctggagaaacatga

SEQ ID NO: 91832 - protein, 526 aa, Capsicum frutescens
MAGEANNNLQVLNALDLAKTQLYHFTAIIIAGMGFFTDAYDLFSISLVTKLLGRLYYTKPDLLKPGTLPPGVSSSVTGVALVGTLAGQLFFGWLGDKMGRKKVYGITLVLMVVSSLASGLSFGNTPKGVMATLCFFRFWLGFGIGGDYPLSATIMSEYANKKTRGAFIAAVFAMQGFGILFSGIIALIVSAGFDHAYKAPTFAENAALSTVPQADYIWRVILMFGALPAGLTYYWRMKMPETARYTALVAKDAKRAAQDMGKVLQVDIDPEAAKIEQLSRDEANKFGLFSWEFVRRHGVHLFGTCSTWFLLDIAFYSQNLFQRDVFSAIGWIPPAATMNAVQEVYKISRAQTLIALCSTVPGYWVTVALIDIIGRFSIQLIGFFFMTVFMFAIAIPYHHWTLKDNRIGFVIMYSLTFFFANFGPNATTFVVPAEIFPARLRSTCHGISAAAGKAGAIVGAYGFLYAAQNKDPKKTDAGYPTGIGIKNSLIVLGCINALGMICTFCVPEPKGKSLEEASQETISGET

SEQ ID NO: 91833 - DNA, 1599 bp, Solanum melongena
  CDS (1)..(1599)
atggctaaagatcaatttcaagtactaaatgcccttgatgttgccaaaacacaattgtaccatttcacagcaattgtgattgctggaatgggatttttcactgatgcatatgaccttttctgcatttcacttgtgacgaaattactcggtcgaatatactatcatcatgaaggtgaccctaagccaggaatactccctcctggtgtctcagctgcagtgaatggtgtggcgtttgtagggaccctctcggggcagttgtttttcgggtggctaggtgataaaatggggaggaagagagtttatggaatgactcttatgattatggtcatttgctcgattgcgtcggggctttcttttggtaagacacctagaggtgttgtggctacactttgtttttttcgattttggcttggttttggtattggtggcgattaccctttatctgctacgatcatgtctgaatacgcgaataaaaagacacgtggggcttttattgctgcggttttcgctatgcaaggttttgggattttgactggtggaattgttgcacttattgttgctggtgcatttaaaaatgcttaccctgcaccaatatattcagtgaatggtaaagattcaacccctcctgaagctgattatgtatggagaattgtcgtcatgtttggggctatcccggctttgcttacttattattggcgtatgaagatgcctgagacagcgcgttacacagccttagtagccaagaatgctaccaaggctgccaccgatatgtccaaagtgttgaatgttgagattgaagcagaggaagacaaaattgttgaagaaaaagggaacaattttggtttgctttctaaggaatttcttcgtcggcatggtctacacttgctaggaacaactagtacatggtttttattagacattgctttctacagtcagaatcttttccagaaggatatttttagtaaaattggatggatacctcatccagagacgatgaacgcgttggatgaggtattcaaaattgcaagggcacaaactcttattgccctttgcagtactgtacctggttactggtttacagttgcattcatcgataaaatgggtcgatttgcaattcaattgatggggtttttctttatgacagtattcatgttcgcgttagccattccatataaccactggactaaaaaggaaaacagaattggttttgtgatcatgtactcactcacctttttcttcgcaaattttggtccaaatgccacaacatttgttgtccccgcggagatttttccagctaggctgagatcaacgtgccacgggatatcagctgcagctggaaaagctggtgcaattgttggtgcatttggatttttgtatgctgctcaatctactgatccatcaaaagttgacgcgggttatcgacctggaattggtgtgaaaaatgcacttattgtcttaggttgtgtcaatttacttggaatgttgttcacattgttggtaccagaatcaaaagggaagtcattggaagaactgtcaaaggaaaatcaaggagaagaagaaataactaggggggaaaatggacacacaattccagtttga

SEQ ID NO: 91834 - protein, 532 aa, Solanum melongena
MAKDQFQVLNALDVAKTQLYHFTAIVIAGMGFFTDAYDLFCISLVTKLLGRIYYHHEGDPKPGILPPGVSAAVNGVAFVGTLSGQLFFGWLGDKMGRKRVYGMTLMIMVICSIASGLSFGKTPRGVVATLCFFRFWLGFGIGGDYPLSATIMSEYANKKTRGAFIAAVFAMQGFGILTGGIVALIVAGAFKNAYPAPIYSVNGKDSTPPEADYVWRIVVMFGAIPALLTYYWRMKMPETARYTALVAKNATKAATDMSKVLNVEIEAEEDKIVEEKGNNFGLLSKEFLRRHGLHLLGTTSTWFLLDIAFYSQNLFQKDIFSKIGWIPHPETMNALDEVFKIARAQTLIALCSTVPGYWFTVAFIDKMGRFAIQLMGFFFMTVFMFALAIPYNHWTKKENRIGFVIMYSLTFFFANFGPNATTFVVPAEIFPARLRSTCHGISAAAGKAGAIVGAFGFLYAAQSTDPSKVDAGYRPGIGVKNALIVLGCVNLLGMLFTLLVPESKGKSLEELSKENQGEEEITRGENGHTIPV

SEQ ID NO: 91835 - DNA, 1797 bp, Aspergillus niger
  CDS (1)..(1797)
atgggcaagtttcgcacgcgatggtacaagactgatcgagctcaggattttgagcatgagcaggatcgagatgttcgcgctcggcaggtgtacgacacaatcgaccgccagggatttcaatacttgatcgtctttgttgcaggcgttggcttctttctcgatggatacaccctatttgcaagcaacatggcacttccaatgatctcctacgtctactggaagaaagaggtgtcttcgatcaagattactttatttaacattgcaacattaggcgggacgctactgggacaggtcttgtttgggtacctggctgaccggaacggacgtaagaagatgtatggcttggagctgatactcatgatcacgtcaacactgggcgtcgttatggcctcccgcggggagaatgattcgatgagcatctacgcatggctcatatggtggcgtatagttgtcgggattggtgtcggagccgactatcctttgagttcagtcatcacaagcgaatttgcccccaccaagcaccgagcacgaatgatggcttcggtgttcttcatgcaacctttagggcagatctgggcaaaccttgtgtcgttgattgtcatcgccaccagccgttcagataccaatgatttgaccatgtctgtcgatagaatgtggcgctacgtcattggtatcggtgtgattccggcagcaatagcaacttgcttccggttcttcgttccggagtcgccacgcttcctcatggagatcgacgatgatccagtgaaagtcgagttcgatgcaaccgcactctttaccgaaccaaatgctgtttcctcctccccgactctcgaaaccgaaagctggcacaatttcccggggcaagcatattccctgactacgatcacggcggaagaccgatcctccacatcccagaccggcatccttcaaccagcgactttaaactctcactggcgcttaacgtggaaggacatcgtacaatacttctgggtggaaggtaattggcgaactctagctgggacagctatgtcctggttcttcttagactttggtttctatggtatcagtctctccagcccgcaatttttggccaaaacctggggatccattcatttgagcgcgcctgcgccttactgggagacgaacgacagtcctggtgcaagcgtctatgacatgttcttcgcaagttgcactcacgcgctggtcatcttgaatgtgggtagctttgccggcgggcttctcctcatcttagtgatccacaaactggacagagtcgctctacaaaaatactcttttctcgcactctccgcactcttcatcgccctgggttgcatgcttatcaccatacaaaaagaaggtcctgtggccgttgtcttgtacgtcattggccaggcgctcttcaactttggacccaacgctacaacgtacatcatcccggctgaaatattccccacccgctaccgtgctacctgtcacggacttagcgccggcgctggcaagatcggctctatagtggttcaggtcttttccgcctactacaacttcggtggtggtttcggagaggaaccggtaaagcggcacggctacattatgatcgtctttgctggatgcatgctctttggggcgatagtaacatgctggataccacctatccaaagaaagcctgatggatccggtagaggcaaactgtggggaggcaagacggagacgctggagactttggctcttggtcgactcggcttggacagtcgatatgcgaatcagggcagaaggcgaaggagggacgttgttacatga

SEQ ID NO: 91836 - protein, 598 aa, Aspergillus niger
MGKFRTRWYKTDRAQDFEHEQDRDVRARQVYDTIDRQGFQYLIVFVAGVGFFLDGYTLFASNMALPMISYVYWKKEVSSIKITLFNIATLGGTLLGQVLFGYLADRNGRKKMYGLELILMITSTLGVVMASRGENDSMSIYAWLIWWRIVVGIGVGADYPLSSVITSEFAPTKHRARMMASVFFMQPLGQIWANLVSLIVIATSRSDTNDLTMSVDRMWRYVIGIGVIPAAIATCFRFFVPESPRFLMEIDDDPVKVEFDATALFTEPNAVSSSPTLETESWHNFPGQAYSLTTITAEDRSSTSQTGILQPATLNSHWRLTWKDIVQYFWVEGNWRTLAGTAMSWFFLDFGFYGISLSSPQFLAKTWGSIHLSAPAPYWETNDSPGASVYDMFFASCTHALVILNVGSFAGGLLLILVIHKLDRVALQKYSFLALSALFIALGCMLITIQKEGPVAVVLYVIGQALFNFGPNATTYIIPAEIFPTRYRATCHGLSAGAGKIGSIVVQVFSAYYNFGGGFGEEPVKRHGYIMIVFAGCMLFGAIVTCWIPPIQRKPDGSGRGKLWGGKTETLETLALGRLGLDSRYANQGRRRRRDVVT

SEQ ID NO: 91837 - DNA, 1933 bp, Catharanthus roseus
  CDS (70)..(1698)
tgtgaagaaagtatttttctttcaaggatataaagaggttggatttgtgattatcggcaaaaaacagtcatggctaaggaacaattgcaggtgcttaatgcacttgatgtcgctaaaacacaatggtaccatttcactgctattgtgattgctggaatgggtttctttactgatgcatatgatctcttttgcatctctttggttacaaaattgctcgggcggatttactatcacgtggatggggcagtaaagcctggaactttgcctcctaatgtgtcagctgcagttaatggtgttgcattttgtggaacccttgctggtcagttattctttgggtggcttggagataagatgggaagaaaaagagtttacggtatgactctaatgctgatggtcattgcatcaatagcatcaggtctttcctttggtgataaaccgaaggctgttatggctactctttgcttcttccggttctggcttggtttcggtattggtggtgattatcctttatctgccacgatcatgtccgagtatgctaacaaaaagactcgtggagctttcattgctgcagtctttgctatgcaaggttttggaattctagccggtggaatggttgctatcattgtatctgcatcgttcaaggctggttttcctgcacctgcatatcaagatggtgctgttgcatcaactgtccctgaagctgattatgtttggcgtataattttgatgttcggtgctattcctgctgcgctgacctattattggcgaatgaagatgcccgagacagctcgttacactgctctagttgccaagaatgctaaacaggcggcaaatgatatgtctaaggtattgcaagttgaactagaagcagaacaagaaaaagtcgagaaatttgctcaagaaccagcaaatacttttggtttattcactaaagagttccttaaacgtcatggacttcacttgctaggaactgctactacatggttcttgttagacattgcgttttatagtcaaaatcttttccaaaaggatatcttcagcgcaattggatggattcctccggcacaaacaatgaatgcaattgaagaggttttcagaattgcaagggctcaaactcttattgctctctgtagtactgtccccggatattggttcacagtgttcttaatcgacagaataggaagattcataatccagtggatgggatttttcttcatgacagtatttatgtttgccttagcaattccatacaatcactggactcacaaggataacaggattggctttgtgatcatgtattcattaactttcttctttgcaaatttcggtccaaatgccacaacctttgttgtcccggctgaaattttcccggctaggttaaggtctacatgccatggtatatcggctgctgctggaaaggctggtgcaatcattggagcatttggatttctatatgctgctcaaccttccgatccatccaagacggacaaaggctatccacctggcattggtgtaaagaatgccctcattgttctaggctgcgtcaacttccttggcatggttttcactttcctagtcccagaagctaaaggtaaatcattggaagaagtatctaaagaaaatgaggaagaagtggaaaatggaacagaattgagacaacaaagtggtcatgacacaaggactgttccagtactataaatcacgacctttatccacaacctttaagacatcttcttaaggtgaaaaaagaatgaagaaacaggatcctaagtgcatagcttttgctcttttcatgtaccatgcttgtggtaattagtctacccttgtatgtaataatgcaagataattctatgtttaagtttgcagagtcaaagagattagtgtgaaaggaattaggtctactactgcctaattgcatcttaattatgttttg

SEQ ID NO: 91838 - protein, 542 aa, Catharanthus roseus
MAKEQLQVLNALDVAKTQWYHFTAIVIAGMGFFTDAYDLFCISLVTKLLGRIYYHVDGAVKPGTLPPNVSAAVNGVAFCGTLAGQLFFGWLGDKMGRKRVYGMTLMLMVIASIASGLSFGDKPKAVMATLCFFRFWLGFGIGGDYPLSATIMSEYANKKTRGAFIAAVFAMQGFGILAGGMVAIIVSASFKAGFPAPAYQDGAVASTVPEADYVWRIILMFGAIPAALTYYWRMKMPETARYTALVAKNAKQAANDMSKVLQVELEAEQEKVEKFAQEPANTFGLFTKEFLKRHGLHLLGTATTWFLLDIAFYSQNLFQKDIFSAIGWIPPAQTMNAIEEVFRIARAQTLIALCSTVPGYWFTVFLIDRIGRFIIQWMGFFFMTVFMFALAIPYNHWTHKDNRIGFVIMYSLTFFFANFGPNATTFVVPAEIFPARLRSTCHGISAAAGKAGAIIGAFGFLYAAQPSDPSKTDKGYPPGIGVKNALIVLGCVNFLGMVFTFLVPEAKGKSLEEVSKENEEEVENGTELRQQSGHDTRTVPVL

SEQ ID NO: 91839 - DNA, 1924 bp, Solanum lycopersicum
  CDS (20)..(1636)
tctttaaggaagtttagtcatggcgaacgatttgcaagtgctaaatgcactagatgtcgcgaagacacaactgtatcacttcacagcgattgtgattgctggcatgggtttttttactgatgcttatgaccttttctgcatttctatggtcactaaattgcttggtcgtctttactaccatcatgacggtgcattgaaacctggctctctgccccctaatgtttcagcagctgttaatggagtcgccttctgtggcacccttgctggacagttgttcttcgggtggcttggagataaaatgggaaggaagaaagtctatggaatgacccttatgattatggtcatttgttcaattgcctcggggctttcatttggccatacaccaaaaggtgttatgactacgctttgtttcttcagattctggctaggatttggcattggtggtgattatcccctttctgccaccatcatgtctgagtatgctaacaaaaagacccgtggagcgttcattgctgctgtgtttgctatgcaaggtttcggaattctggctggtggaatggtggcaatcattgtttctgcagcattcaagggcgcattccctgcaccagcatatgaggttgatgctattggttcaacagtccctcaggctgatttcgtgtggcgtataattctcatgtttggtgcaatccctgctggacttacttattactggcgtatgaagatgcctgaaactgcccgttacactgccttggtcgccaagaacttgaaacaggcagctaacgacatgtccaaggtgttgcaagtcgaaattgaagcagagccagagaaagttacagctatttctgaagcaaaaggagccaatgactttggtttgttcactaaggagttcctccgtcgccatggacttcacttgcttggaactgctagcacatggttcttgttggacattgctttctacagtcaaaaccttttccagaaggacattttcagtgcaattggatggattccaccagcacaaaccatgaacgcgttggaagaagtttacaagattgcaagggcacaaacacttattgctctttgtagtactgttcctggttactggttcacagttgcattcatcgataagattggtcgatttgcaattcagttgatgggattcttcttcatgacagtcttcatgtttgccttagccattccataccatcactggactctcaaggatcacagaattggcttcgtggtcatgtactcattcacctttttcttcgccaattttggtccaaacgccacaacattcgtcgtccctgctgagattttcccagccaggcttaggtccacatgccatggaatatcagcagcagcaggtaaagcaggagctatggttggtgcatttggattcttatacgctgctcagcccacggatccaacaaagactgacgccggttaccctcctggccattggtgtgaggaactcgttgatcgtccttggttgtgtaacttcctcggtatgctgttcacattcttggttccagaatccaatgggaagtcattggaagatttgtcgagggaaaacgaaggggaagaggaaactgtagctgaaataagagcaacaagtggaaggacagttcctgtgtgagttttagacaagttatcagttagtatacactacaatgcagtttgagttaatttgtggtatttgggattagaaagagattgtttgttggtttgttataagaagatggaataagctcttatctttttgtttgtttgtttgggtaattaaacattattaccttacttctgcaaatctcagaaattctgagattatataaagtaaccaaaggaggttctttggttgtctatctctttttataaaacatttcttgactctaaaaaaaaaaaaaaaaaactcgagactagttca

SEQ ID NO: 91840 - protein, 538 aa, Solanum lycopersicum
MANDLQVLNALDVAKTQLYHFTAIVIAGMGFFTDAYDLFCISMVTKLLGRLYYHHDGALKPGSLPPNVSAAVNGVAFCGTLAGQLFFGWLGDKMGRKKVYGMTLMIMVICSIASGLSFGHTPKGVMTTLCFFRFWLGFGIGGDYPLSATIMSEYANKKTRGAFIAAVFAMQGFGILAGGMVAIIVSAAFKGAFPAPAYEVDAIGSTVPQADFVWRIILMFGAIPAGLTYYWRMKMPETARYTALVAKNLKQAANDMSKVLQVEIEAEPEKVTAISEAKGANDFGLFTKEFLRRHGLHLLGTASTWFLLDIAFYSQNLFQKDIFSAIGWIPPAQTMNALEEVYKIARAQTLIALCSTVPGYWFTVAFIDKIGRFAIQLMGFFFMTVFMFALAIPYHHWTLKDHRIGFVVMYSFTFFFANFGPNATTFVVPAEIFPARLRSTCHGISAAAGKAGAMVGAFGFLYAAQPTDPTKTDAGYPPGHWCEELVDRPWLCNFLGMLFTFLVPESNGKSLEDLSRENEGEEETVAEIRATSGRTVPV

SEQ ID NO: 91841 - DNA, 1707 bp, Gibberella zeae
  CDS (1)..(1707)
atggcccaagaagcgcgtcccgtcgcaaagacgagtggcggaaataatgcctttcacaacttccacaacgactttgcccacatcgccgaccccaatgagcgtcgccgtctcgcccttgcagagattgacaaggctccctttggatggtatcatgttcgagcatgcatcgtcgcaggtgtcggtttcttcactgactcgtacgatatcttctgtgtctccatgttgaccatcatgctcggcatcgtctactatcccgggaagggcaagttgcccaccagctctgacaatgccatcaagctgtctacttctgccggtacggtgataggacagtttggctttggtatgctggccgatattgtcggtcgaaagcgcatgtatggtctggagttgatcgtcaccatctttgctacgcttgctcaggccctgactgctggatcgccttccacctcccttgttggacttatcatcttctggcgtgttatcatgggcgtgggtatcggtggcgactatccattgtcttccatcattacttcagagttcgctactaccaagtggcgaggtgccatgatggctgccgtctttgccatgcaaggtatcggccaacttgtcgcagctcttgtcatgatgttcctcactctcggcttcaagtcttctcttgagcaagctgccgatacaaagagctgcactggagattgccaaattgctgttgacaagatgtggcgaacacttgttggcttcggagctgtccccgcttgcattgccctctactaccgtcttactatccctgagactcctcgttacacctttgacgtcgcccgtgacgtcgagcaggccgatgaggacgtcaaggcttatatcaacggcaagagcgaaggcaacaccgacgaagtcacccgtgcccagaaccttcaatccgctaagactaacctcgaagtccccaaggccagctggagagacttcttccagcactacagcaagtggaagaacgcctctctgcttcttggaactgctggttcatggttctgtctcgatgtggctttctatggtctctctttgaataacggaaccatcctcaaggttattggatattctaccaaggatgctactaatgtctacgagtttctccacaacacagctgtcggaaatatcattattgtcttggcaggagctgttccaggttactgggtttctgtggcgactattgatactcttggacgaaagacgattcaacttggtggtttcattatcctgactatccttttcattgtcatgggctttgcttacaaccacatcccttccaacggacttttggctatttacgttcttgcccaattctttttcaactttggccccaacaccactactttcatcgtccctggtgaagtattccctactcgataccgttcaacctcccacggtatctctgctgccagcggtaaaatcggttccatcatcggccaaggtgccatttccatcctccgaacccacggagccacagataagaacgaggcaccttggatggaccacgttcttgagatttacgctcttttcatgcttcttggtatcttcactactctgttgattcccgagactgctcgcaagactcttgaggagctttcgggtgaagatgactacgccaaccatgatcatgcgttggagtcagagactcaggctagtcacgacaaggctagacgaaccagcgtttag

SEQ ID NO: 91842 - protein, 568 aa, Gibberella zeae
MAQEARPVAKTSGGNNAFHNFHNDFAHIADPNERRRLALAEIDKAPFGWYHVRACIVAGVGFFTDSYDIFCVSMLTIMLGIVYYPGKGKLPTSSDNAIKLSTSAGTVIGQFGFGMLADIVGRKRMYGLELIVTIFATLAQALTAGSPSTSLVGLIIFWRVIMGVGIGGDYPLSSIITSEFATTKWRGAMMAAVFAMQGIGQLVAALVMMFLTLGFKSSLEQAADTKSCTGDCQIAVDKMWRTLVGFGAVPACIALYYRLTIPETPRYTFDVARDVEQADEDVKAYINGKSEGNTDEVTRAQNLQSAKTNLEVPKASWRDFFQHYSKWKNASLLLGTAGSWFCLDVAFYGLSLNNGTILKVIGYSTKDATNVYEFLHNTAVGNIIIVLAGAVPGYWVSVATIDTLGRKTIQLGGFIILTILFIVMGFAYNHIPSNGLLAIYVLAQFFFNFGPNTTTFIVPGEVFPTRYRSTSHGISAASGKIGSIIGQGAISILRTHGATDKNEAPWMDHVLEIYALFMLLGIFTTLLIPETARKTLEELSGEDDYANHDHALESETQASHDKARRTSV

SEQ ID NO: 91843 - DNA, 1881 bp, Oryza sativa
  CDS (70)..(1683)
acagtgctaacggcctgcagcagagtgcagcgactcccctgaagaaacagagtagctgagattggcgccatggccggcgagctcaaggtgctgaacgcgctcgactcggcgaagacgcagtggtaccatttcacggcgatcgtgatcgccggcatggggttcttcaccgacgcctacgatctcttctccatctccctcgtcaccaagctgctcggccgcatctactacttcaacccggcgtccaagagccccggctctctcccgcccaacgtctccgccgccgtcaatggcgtcgccttctgcggcaccctcgccggtcagctcttcttcggctggctcggcgacaagatggggcgcaagaaggtgtacgggatgacgctcatgctcatggtcatctgctgcctcgcctccggcctctcgttcgggtcgtcggcgaaaggcgtcatggccacgctctgcttcttccgcttctggctcggcttcggcatcggcggcgactacccgctctcggcgaccatcatgtcggagtatgctaacaagcgtacccgtggcgcgttcatcgccgccgtgttcgccatgcaggggttcggcaacctcaccggcggcatcgtggccatcatcgtgtcggcgttcaaggcgaggttcgacgcgccggcgtacagggacgaccgggccggctccaccgtgccgcaggccgactacgcgtggcgcatcgtgctcatgttcggcgccatcccggcgctgctcacctactactggcggatgaagatgccggagacggcgcgctacaccgcgctggtggccaagaacgcgaagcaggccgccgccgacatgacgcaggtgctcaacgtcgagatcgtggaggagcaggagaaggccgacgaggtcgcgcggcgcgagcagttcgggctcttctcccgccagttcttgagacgccatgggcgccacctgctgggcacgacggtgtgctggttcgtgctggacatcgccttctactcgtcgaacctgttccagaaggacatctacacggcggtgcagtggctgcccaaggcggacaccatgagcgccctggaggagatgttcaagatctcccgggcacagacgctcgtggcgctgtgcggcaccatcccgggctactggttcaccgtcttcttcatcgacatcatcggccgcttcgtcatccaactcggcggcttcttcttcatgacggcgttcatgctcggcctcgccgtgccgtaccaccactggacgacgccggggaaccacatcggcttcgtggtcatgtacgccttcaccttcttcttcgccaacttcgggcccaactccacgaccttcatcgtgccggcggagatcttcccggcgaggctgcgttccacctgccacggcatctcggcggcggcggggaaggccggcgccatcgtcgggtcgttcgggttcctgtacgcggcgcagagcacggacgcgagcaagacggatgccggctacccgccgggcatcggcgtgcgcaactcgctcttcttcctcgccggatgcaacgtcatcggcttcttcttcacgttcctggtgccggagtcgaaggggaagtcgctggaggagctctccggcgagaacgaggacgatgacgatgtgccggaggcgccctcgacggccgatcaccggactgcgccggcgccgccagcttgataccccgcggcaaaacccaaatggtcaatcatcagcgttttgttgtaatatatgtgcaatggatgattattctggttctggtagtgtaccgaacaaaattacaaatactagtcgtcaacccgtgcgagtgatattataaatgacacttagattatgtattaaatatattttttaaaattattgtggcttaaattttgt

SEQ ID NO: 91844 - protein, 537 aa, Oryza sativa
MAGELKVLNALDSAKTQWYHFTAIVIAGMGFFTDAYDLFSISLVTKLLGRIYYFNPASKSPGSLPPNVSAAVNGVAFCGTLAGQLFFGWLGDKMGRKKVYGMTLMLMVICCLASGLSFGSSAKGVMATLCFFRFWLGFGIGGDYPLSATIMSEYANKRTRGAFIAAVFAMQGFGNLTGGIVAIIVSAFKARFDAPAYRDDRAGSTVPQADYAWRIVLMFGAIPALLTYYWRMKMPETARYTALVAKNAKQAAADMTQVLNVEIVEEQEKADEVARREQFGLFSRQFLRRHGRHLLGTTVCWFVLDIAFYSSNLFQKDIYTAVQWLPKADTMSALEEMFKISRAQTLVALCGTIPGYWFTVFFIDIIGRFVIQLGGFFFMTAFMLGLAVPYHHWTTPGNHIGFVVMYAFTFFFANFGPNSTTFIVPAEIFPARLRSTCHGISAAAGKAGAIVGSFGFLYAAQSTDASKTDAGYPPGIGVRNSLFFLAGCNVIGFFFTFLVPESKGKSLEELSGENEDDDDVPEAPSTADHRTAPAPPA

SEQ ID NO: 91845 - DNA, 1608 bp, Eucalyptus camaldulensis
  CDS (1)..(1608)
atggctaaagaaaatcttggggtgctaaatgcactcgatgtggccaagacacaatggtaccatttcaccgccatcatcattgccggcatggggttcttcaccgacgcgtatgatctcttttgcgtttccctcgtcacgaagctcctcggtcgcatatactactatgagggtaaggataagcctggctcgctccctccgaacgtggctgccgctgtcaacggcgtcgccttctgcggtactctagccggccagctcttcttcggctggcttggggacaaattaggtcggaagcgtgtctatggtttaaccctccttattatgatcatctgctccgtcggctccggcttgtcctttggggattcaccgaatagtgttatagcaaccctatgcttcttccgattctggctcgggtttgggatcggaggggattacccactctccgccaccatcatgtcggagtacgcgaacaagaagactcgtggggcattcatcgctgcagtgtttgcgatgcaagggtttgggattttggggggtgggatcgtcgctttgattgtctcctcagcattcgatcataagtttaaggccccgccttacgaagtcaatccagtgggctcgaccgttcctcaagccgattacgtgtggcgtatcattgtaatgctcggtgcattacccgcggcccttacttattattatagaatgaaaatgcctgaaactgctcgttacaccgccctcgtcgcaagaaacggaaagcaggcagctgcagacatgtctaaggtgttgcaagtggatattgaatcagaacaagagaaggtggagaaatttacgcaagatccccgcaacagctatggccttttctcgaaggaattcgcccgccgccacggcctccacctcgtggggacagccaccacgtggttcttgctcgacatcgctttctatagccaaaacctcttccaaaaggatattttcaccgcgatcgggtggctcccagcggcgaagaagatgaacgccattcacgaggtatacaaaattgctagggcacaaaccctgatcgctctttgcagtactgtgcctgggtattggttcactgtcgcgacgatcgattacatcggaagattcttcatccaaatgatgggtttcgccatgatgtcaatcttcatgtttgccatcgccatcccatacaaccactggaaacatcaccatataggattcgtcgtgatgtactcactcaccttcttcttcgccaacttcgggccaaacgcaacaacattcattgttcccgctgagatcttcccggcgcggttgagatccacatgccatggcatatcggcggctgcagggaaagctggagccattgttggggcttttgggttcttgtatgcggcgcaggataaaacaagccccgatgcaggttataagccgggtatcggcgtgaagaatgcattgcttgtgcttggggggattaatcttgcgggaatgttgttcactttgctcgtgccggagccaaagggcaggtcactggaggaaattggaggagagaacatggatgataatgagatgggtgaaggtagggagatgcagcctccttcattgggaccatttggtggttag

SEQ ID NO: 91846 - protein, 535 aa, Eucalyptus camaldulensis
MAKENLGVLNALDVAKTQWYHFTAIIIAGMGFFTDAYDLFCVSLVTKLLGRIYYYEGKDKPGSLPPNVAAAVNGVAFCGTLAGQLFFGWLGDKLGRKRVYGLTLLIMIICSVGSGLSFGDSPNSVIATLCFFRFWLGFGIGGDYPLSATIMSEYANKKTRGAFIAAVFAMQGFGILGGGIVALIVSSAFDHKFKAPPYEVNPVGSTVPQADYVWRIIVMLGALPAALTYYYRMKMPETARYTALVARNGKQAAADMSKVLQVDIESEQEKVEKFTQDPRNSYGLFSKEFARRHGLHLVGTATTWFLLDIAFYSQNLFQKDIFTAIGWLPAAKKMNAIHEVYKIARAQTLIALCSTVPGYWFTVATIDYIGRFFIQMMGFAMMSIFMFAIAIPYNHWKHHHIGFVVMYSLTFFFANFGPNATTFIVPAEIFPARLRSTCHGISAAAGKAGAIVGAFGFLYAAQDKTSPDAGYKPGIGVKNALLVLGGINLAGMLFTLLVPEPKGRSLEEIGGENMDDNEMGEGREMQPPSLGPFGG

SEQ ID NO: 91847 - DNA, 1602 bp, Sorghum bicolor
  CDS (1)..(1602)
atggaggtgctctcggcgctagacggcgccaggacgcagtggtaccacttcacggcgatcatcgtggcggggatgggcttcttcaccgacgcgtacgacctcttctgcatctccctcgtcaccaagctcatcggccgaatctactacaccgtcgacggctcgcccaagccgggcagcctgccgccgcacgtgtcctcgcccgtcaacggcgtggcgttcgtgggcacgctgtcggggcagctcttcttcggctggctcggcgaccgggtgggccggaagagcgtctacgggatgacgctcgtgacgatgatcgtctgctccgtcgcgtcgggcctctcgttcggctactcgccggcctgcgtcatggccacgctctgcttcttccgcttctggcttggcttcgggatcggcggcgactacccgctgtcggcgaccatcatgtcggagtacgccaacaagaagacgcgcggcgcgttcgtcgctgccgtcttcgccatgcaggggttcggcatcctggccgccggcgccgtcgccatcggcgtcagcgcgctgttccggagcccgttccccgcgccgccctacgacgtcgaccccgcggcgtccacgccggcggaggcggacctggtgtggcgcatcatcctcatgttcggcgccgtgcccgcggcgctcacattctactcgcgtatgaacatgcccgagacggcgcggtacacggcgttggtggcccggaacgcggagcgcgccgcggcggacatgtccagggtgctccaggtcgacatcggcaataaggaggaagggccggagacacagccccggtgccgcggcgagccgcaagaagaagcgacaacggtgccgccgccgccgccgccgttcgggctcttctcccgcgagttctttcaccggcacgggctccacctgctgggcacgacgtcgacgtggctcctcctggacatcgcctactactcgcagaacctgttccagaaggacctgttcagcgcggtggggtggatcccggcggcggagacgatgagcgcgctggacgagctgttccacatcgcgcgcgcgcagacgctgatcgcgctgtgcggcacggtgcccgggtactggttcacggtggcgttcatcgacgtggtggggcggttcgcgatccaggcggtgggattcctcatgatggcggccttcatgctggggctggccgtcccgtacgaccggtggacgcgccccggcaaccagacggggttcgtggtgatgtacgcgctcaccttcttcttcgccaacttcgggcccaacgccaccaccttcatcgtgcccgcggagatctacccggcgcggttccgcgcgacgtgccacggcatctcggcagcgtcgggcaaggtgggcgccatcatcggctccttcgggttcctgtacctggcgcagagccaggacccggccaagacggcgcacgggtacccgccgggcatcggcgtgcgcaactcgctgctgctgctcgccgggtgcagcttcctggggttcctgctcacgttcctggtgccggagcccaagggcaagtcgctcgaggagttgtcgcgcgagaccgagccgggggccgccgagccgtaa

SEQ ID NO: 91848 - protein, 533 aa, Sorghum bicolor
MEVLSALDGARTQWYHFTAIIVAGMGFFTDAYDLFCISLVTKLIGRIYYTVDGSPKPGSLPPHVSSPVNGVAFVGTLSGQLFFGWLGDRVGRKSVYGMTLVTMIVCSVASGLSFGYSPACVMATLCFFRFWLGFGIGGDYPLSATIMSEYANKKTRGAFVAAVFAMQGFGILAAGAVAIGVSALFRSPFPAPPYDVDPAASTPAEADLVWRIILMFGAVPAALTFYSRMNMPETARYTALVARNAERAAADMSRVLQVDIGNKEEGPETQPRCRGEPQEEATTVPPPPPPFGLFSREFFHRHGLHLLGTTSTWLLLDIAYYSQNLFQKDLFSAVGWIPAAETMSALDELFHIARAQTLIALCGTVPGYWFTVAFIDVVGRFAIQAVGFLMMAAFMLGLAVPYDRWTRPGNQTGFVVMYALTFFFANFGPNATTFIVPAEIYPARFRATCHGISAASGKVGAIIGSFGFLYLAQSQDPAKTAHGYPPGIGVRNSLLLLAGCSFLGFLLTFLVPEPKGKSLEELSRETEPGAAEP

SEQ ID NO: 91849 - DNA, 1620 bp, Lotus japonicus
  CDS (1)..(1620)
atggccaaggaacaaattcaggtgctaaatgcgcttgatgtggcgaaaacacaatggtaccatttcactgcaattgtaattgctggaatgggcttcttcactgatgcatatgatctattctgcatatcccttgtcaccaagttgctcggtcgcatttactaccacgttgatggcgctgcgaagcccggaacattgcctccaaatgtatcagctgctgtaaatggagtagctttctgcggtacactttcaggacagcttttctttggctggcttggtgacaaattgggcagaaaaaaagtctatggcatgaccctcatgatgatggtcatatgctctattggttccggcctttcgttcggacatagtccaaaatctgtgatggcaacactttgcttcttcaggttctggcttggttttggaattggtggagactaccccctttctgctaccattatgtctgagtattcgaataagaagactcgcggcgccttcatcgctgcggtctttgctatgcagggttttggaattcttggaggtggtatatttgcaatcataatttctgctgcattcaaggccaagtttgatgctccgccttatgaggttgatccggttggttcaactgttcctcaagctgactatatttggaggataattgtgatggttggagcactcccagctgcattgacttactactggaggatgaagatgccggaaaccgctcgctatactgctctagttgccaagaacacagaacaggctgcaaaggatatgtctaaggttctgcaggttgagattcaagctgagccaaaaggtgaccaagcacaggccaatacatttgccttgttctcaaaggagttcatgcgccgccacggattgcatcttctcggcacagcaagcacatggttcttgcttgatattgcattttacagccaaaatctcttccaaaaagacatcttcagtgcaattggttggattcctcctgcaaaaaccatgaatgctcttgaggaagtttacagaattgcaagagctcagacgcttatcgctctctgcagtactgtccctggctactggtttacagtggctctcatagacaggattggaagatttgctattcaattgatggggttcttcttcatgactgtttttatgttcgctcttgccattccttatgaccactggactcataaggagaacagaataggattcgtggtgatatattccttgactttcttcttcgcgaatttcgggcctaatgccaccacattcgtcgtgccggccgagattttcccggctagattccggtccacttgccacggaatttcatcagcggccgggaagctcggggctatagtcggagcattcgggttcttgtacctggcacagaacaaggacaagagcaaagcagatgcagggtaccctgcaggtattggtgtgaagaactcactgcttttgttaggtgtggtcaacattttaggcttcttttgtactttcttggtgcctgaggcaaagggaaaatctttggaggaaatgtcaggtgagaatgaagaggaaggtgaaaatggaaccaaagaagagtcagagccacattcttacagcaccagaacagttccatatgtttag

SEQ ID NO: 91850 - protein, 539 aa, Lotus japonicus
MAKEQIQVLNALDVAKTQWYHFTAIVIAGMGFFTDAYDLFCISLVTKLLGRIYYHVDGAAKPGTLPPNVSAAVNGVAFCGTLSGQLFFGWLGDKLGRKKVYGMTLMMMVICSIGSGLSFGHSPKSVMATLCFFRFWLGFGIGGDYPLSATIMSEYSNKKTRGAFIAAVFAMQGFGILGGGIFAIIISAAFKAKFDAPPYEVDPVGSTVPQADYIWRIIVMVGALPAALTYYWRMKMPETARYTALVAKNTEQAAKDMSKVLQVEIQAEPKGDQAQANTFALFSKEFMRRHGLHLLGTASTWFLLDIAFYSQNLFQKDIFSAIGWIPPAKTMNALEEVYRIARAQTLIALCSTVPGYWFTVALIDRIGRFAIQLMGFFFMTVFMFALAIPYDHWTHKENRIGFVVIYSLTFFFANFGPNATTFVVPAEIFPARFRSTCHGISSAAGKLGAIVGAFGFLYLAQNKDKSKADAGYPAGIGVKNSLLLLGVVNILGFFCTFLVPEAKGKSLEEMSGENEEEGENGTKEESEPHSYSTRTVPYV

SEQ ID NO: 91851 - DNA, 1617 bp, Lotus japonicus
  CDS (1)..(1617)
atggcgagagagggaacaataggagtgcttaatgcacttgatgtggccaagacacaatggtaccacttcactgcaattgtgattgctggaatgggatttttcactgatgcatatgatctcttttgcatttcccttgtcaccaagttactggggaggatatactacactgacataaccaaatcaaggcctggtgttcttccagctaatgtgcaagccgctgtgactggtgtcgcgctttgcggtaccttagccggccagcttttcttcggttggctcggtgacaagatgggaaggaaaagggtttatggcttaactctcatgatcatggtagtgagctccattgcttcagggctctcctttggtaatagcccaaaaagcgtcatggccacgctttgtttcttcaggttctggcttggtttcgggattggtggcgactaccctctttcggccacaatcatgtccgaatacgcgaacaaaaagacgcgaggcgcgttcattgctgcggtgtttgctatgcaagggttcggaatcttgggtggtggaatagtggctttgatcgtctcggcctcgtttgaccacaaatacaatgttcctagttatcaagaagacccggcagcatcaatggtgttgccggcttttgactatgtttggcgtatcattctcatgtttggtgcgctcccagcggccctgacctactactggcgtatgaaaatgcctgagacagctcgttacacagccttggttgccaagaatgcgaaacaagctgcctcagacatgtccaaggtgctgcaagttgaacttgaagccgaagaggaaaaggtggagaaaattcttgagagtgaaaaccaacaatttggcttgttcagcaagcaattcgcctcgcgccacgggatgcacttgctaggaaccacaactacttggttcttgttggacattgccttctacagccagaacctcttccaaaaggacattttcagcgcgatcggatggatccctccagcaaaagaaatgaatgcaatccatgaggtttacaagattgcaagagcacaaacacttatagcactatgcagtacagttcccggttactggtttaccgtggcctttatcgattacatgggccgtttcgcgatccaattgatgggattcttcttcatgacggtcttcatgtttgctctggccttaccttatgatcactggactaagaaagataaccgatttgggttcgtcgccatgtacgccctcacgttcttcttcgcgaatttcggtccaaacgccaccacatttgtggtgccggccgagattttccctgcaaggctgaggtccacttgtcatggaatctcagctgctgcaggaaaagcaggagcaatagtaggtgcatttgggttcttgtatgcttctcagagtaaagatcctgctaagactgatccaggttacccaactggtattggggtgaggaactctctcattatgcttggtgtgatcaatttcttggggatggtattcacctttttggtgccggaatcaaaggggaagtcactggaagagttgagtggggagacagaagaagatggcgttgaggctattgaggctgcagggtctaggacagttccagtttaa

SEQ ID NO: 91852 - protein, 538 aa, Lotus japonicus
MAREGTIGVLNALDVAKTQWYHFTAIVIAGMGFFTDAYDLFCISLVTKLLGRIYYTDITKSRPGVLPANVQAAVTGVALCGTLAGQLFFGWLGDKMGRKRVYGLTLMIMVVSSIASGLSFGNSPKSVMATLCFFRFWLGFGIGGDYPLSATIMSEYANKKTRGAFIAAVFAMQGFGILGGGIVALIVSASFDHKYNVPSYQEDPAASMVLPAFDYVWRIILMFGALPAALTYYWRMKMPETARYTALVAKNAKQAASDMSKVLQVELEAEEEKVEKILESENQQFGLFSKQFASRHGMHLLGTTTTWFLLDIAFYSQNLFQKDIFSAIGWIPPAKEMNAIHEVYKIARAQTLIALCSTVPGYWFTVAFIDYMGRFAIQLMGFFFMTVFMFALALPYDHWTKKDNRFGFVAMYALTFFFANFGPNATTFVVPAEIFPARLRSTCHGISAAAGKAGAIVGAFGFLYASQSKDPAKTDPGYPTGIGVRNSLIMLGVINFLGMVFTFLVPESKGKSLEELSGETEEDGVEAIEAAGSRTVPV

SEQ ID NO: 91853 - DNA, 2041 bp, Lotus japonicus
  CDS (70)..(1704)
cttgaataggctttggagcaagttaccctaagaacagtttattagcttctgcttattacaaatctagctatggctcgtggtgaattgggagtgcttactgcccttgatactgccaagacacaatggtatcacttcactgccatcatcatcactggtatgggattcttcacagatgcatacgacctgttcagcataccaaacgttaccaagttgcttggccgaatatactacacaaaagaaggttcaccaaagccgggaaccttgcctgcaaatgtttcagttgcagttaacggtgttgcgctctgtggcacactagcaggccaacttttcttcggttggctaggagataaaatgggtaggaaaaaggtttatggcctaactcttgccatcatggtcgtctcttctcttgcctctggcctctcctttgggcacaccccaaagggtgtgatttccaccctttgtttcttcaggttctggcttggttttggcattggtggtgactaccctctctcagccaccatcatgtcagaatatgcaaacaaaaagactcgcggcgcattcatagcctcagtgtttgctatgcaaggctttggaatcttggctggcgggattgtttccctcatagtttccgcagcattcgatcacgcattcaaggctccgccatacaaggatgaccctgcagcatcccttgtccccgaagccgactacgtctggcgcatcatcctcatgttcggcgccgcccctgcagctctcacctactactggcgcatgaaaatgcccgagacagcaaggtacacagcactcgtcgcgaaaaacgcgaaactcgcagcgcaggacatgtcaaaggtgctgcaaatggaggttgaagctgagcaggaaaagacggacaagatagccgagcccgaaacgcaacaaaacaacaagaacagcttcggcttgttcagcaaggaatttgctcgaacacatggcgtgcacttgctcggaaccacttcaacatggtttctcctagacattgcatactacagctcaaacctcttccaaaaagacatctacagcagcattgggtggctccctcacgcggaggaaatgaacgcgattcaggaggtttacaaggttgcaagagcatcaacactgatagcactctgtggcactgtaccagggtactggttcacagtggcattcatagaccatctgggtcgtttcatcatacagcttatggggttcttcttcatgacagtgttcatgttcgcactcgcaattccttacaatcactggacacagaaggaacacagaattgggtttcttgtgatgtacgcattcacgttcttcttcgcgaattttggtccaaactcgaccacttttgttgtgcctgcagagattttccctgcgaggttgagaactacatgccatgggatatcctctgctgcagggaaagctggagcgattgtgggtgcgtttgggttcttgtatgcttcacaggacaaggatgaagcaaagagagatgcagggtaccctgctggtattggcatgaagaacactcttattgtgcttgctgtgacgaattgtcttggcatggtttgcacgttcatggtgccagaatctacagggaaatcgttggaggagttgagtggtgagaatgaagaagatgaaggtgatgagagtgttgagacacaaggttcctctagtaggactgttccggtgtgaaaggtgatcttgtaagacaggtgtcctctttcggagaccatcttgttcgagtcgggaacatctacattatggtggagctaactctcatagtggagtttttttccatccacaagactcgaactcgagatcttgcttaaggggaatcaagtagttaattatagcggttggtagatagttaagctccttaagtatttaatttaaaatttgatctctgacgtgtgtatgagaaagatttattaggagagacacacagaaatagtctcatggttgtgggctttgggataaataatttgatatgctttttaaatgaaatatctacacttagttagtgtgtgtt

SEQ ID NO: 91854 - protein, 544 aa, Lotus japonicus
MARGELGVLTALDTAKTQWYHFTAIIITGMGFFTDAYDLFSIPNVTKLLGRIYYTKEGSPKPGTLPANVSVAVNGVALCGTLAGQLFFGWLGDKMGRKKVYGLTLAIMVVSSLASGLSFGHTPKGVISTLCFFRFWLGFGIGGDYPLSATIMSEYANKKTRGAFIASVFAMQGFGILAGGIVSLIVSAAFDHAFKAPPYKDDPAASLVPEADYVWRIILMFGAAPAALTYYWRMKMPETARYTALVAKNAKLAAQDMSKVLQMEVEAEQEKTDKIAEPETQQNNKNSFGLFSKEFARTHGVHLLGTTSTWFLLDIAYYSSNLFQKDIYSSIGWLPHAEEMNAIQEVYKVARASTLIALCGTVPGYWFTVAFIDHLGRFIIQLMGFFFMTVFMFALAIPYNHWTQKEHRIGFLVMYAFTFFFANFGPNSTTFVVPAEIFPARLRTTCHGISSAAGKAGAIVGAFGFLYASQDKDEAKRDAGYPAGIGMKNTLIVLAVTNCLGMVCTFMVPESTGKSLEELSGENEEDEGDESVETQGSSSRTVPV

SEQ ID NO: 91855 - DNA, 1635 bp, Cryptomeria japonica
  CDS (1)..(1635)
atggcgaagacgcagcttgaagttttgaatgccttggatcttgcgaaaacgcaatggtaccatttcacggcaatcattattgcaggtatgggcttctttacagatgcgtatgaccttttctgcatttccacagtgacgaagctcctgggaagaatctattattttgaagacggtaagaagcccggctctctgcctcccaatgtctcggccgccgttaatggagtggctctgtgcggaaccctagctggacaactcttcttcggctggctcggggacaaaatggggcggaagaaagtgtacggaatgacgctgatgctcatggtgatctgctccatagcttcaggcctttcctttggccacacggccaaatctgtgatgacaacgctctgcttctttcgattctggctagggttcggcattggcggcgattatcctctttcggccacgattatgtccgagtacgccaacaagagaactcgtggcgcgtttattgcagctgtgttcgccatgcaagggtttggaattcttgcaggcggtgccgtttccattatagtttcagcagggttcaagagtcattttaaggctccagcgtatcaagatgatcccaagggctcgactgtggatgaggcagactttgtgtggaggttaattctgatgttcggagccgtccccgcggccatgacctactactggcgaatgaaaatgccagagaccgcccgttacacagcgcttgtggaaagaaacgcaaagcaagccgcggcggacatgtctagggttatgcaggtagatattgaagaagatcgtcaaaagatcgatgaaattgcgaccagggaaccgagctttggcttattttctgcacagttcgcaaaacggcatggactgcatcttctgggaacaacttcaacctggttattgcttgatgtcgcctattacagtcaaaacctgtttcaaaaggatatctttacggccatcggatggatccctgcgggtaaaaaaatgaacgccattgaagaagtttatcgcatcgcaaaggcacagacgctcattgctctgtgctccaccgttccgggctactggttcacagtcttctttatcgatcgcatcggtcggttcaccattcaattgatgggattctttttcatgacagtctttatgtttgccctggccattccttacaaccattggcgaggcaccaaatgtggcgatgactattgtgacggcaaccacattgcctttgttgttctctactccttcaccttcttcttcgctaattttggtcccaacgccaccactttcatcgtcccggcggaggtttttcctgccaggctccgttccacttgccacggcatttcggccgctgcaggaaaggcaggcgccattgttggagctttcggttttctgtacgccgctcaaagcacgcaccaatctgaagtcgaccatggctaccacaagggtattggcgtcaagaattctctcattcttctcggagtaacaaatgctatgggctttctgttcacgtttctggtgcctgaaaccaacggcaaatctttggaagagctttccggtgagaatgaggaagatgaagggactgaacttccaccatctgtttcgactaccagaacggcaccagcttag

SEQ ID NO: 91856 - protein, 544 aa, Cryptomeria japonica
MAKTQLEVLNALDLAKTQWYHFTAIIIAGMGFFTDAYDLFCISTVTKLLGRIYYFEDGKKPGSLPPNVSAAVNGVALCGTLAGQLFFGWLGDKMGRKKVYGMTLMLMVICSIASGLSFGHTAKSVMTTLCFFRFWLGFGIGGDYPLSATIMSEYANKRTRGAFIAAVFAMQGFGILAGGAVSIIVSAGFKSHFKAPAYQDDPKGSTVDEADFVWRLILMFGAVPAAMTYYWRMKMPETARYTALVERNAKQAAADMSRVMQVDIEEDRQKIDEIATREPSFGLFSAQFAKRHGLHLLGTTSTWLLLDVAYYSQNLFQKDIFTAIGWIPAGKKMNAIEEVYRIAKAQTLIALCSTVPGYWFTVFFIDRIGRFTIQLMGFFFMTVFMFALAIPYNHWRGTKCGDDYCDGNHIAFVVLYSFTFFFANFGPNATTFIVPAEVFPARLRSTCHGISAAAGKAGAIVGAFGFLYAAQSTHQSEVDHGYHKGIGVKNSLILLGVTNAMGFLFTFLVPETNGKSLEELSGENEEDEGTELPPSVSTTRTAPA

SEQ ID NO: 91857 - DNA, 1611 bp, Egeria densa
  CDS (1)..(1611)
atggcgagagaccagctcgaggtgctcaacgcgctcgacgtcgcgaagactcagctgtaccacttcacggcgatcgtcatcgccggcatgggcttcttcacggacgcctacgacctcttctgcatctccctggtcaccaagctgctcggccgcatctactactacgtcccggggtcccccacccccggcacgctcccacccaacgtctccgccgccgtcaacggcgtcgccttctgcggcaccctctccggccagctcttcttcggatggctgggcgacaagctcggacgcaagaaggtctacggcatgaccttgatgatgatggtgatatgctccgtcgcgtcggggctctccttcgggcactcagcgaagagcactatggcgaccctgtgcttcttccgcttctggctcgggttcggaatcggcggcgactaccccctctcggcgaccatcatgtcggagtacgcgaacaagcgcacgaggggggccttcatcgcggcggtcttcgccatgcagggcttcggcatcttgggcggcggcatcgtcacgctcatcgtctcgtcggtcttcaagaccaagtacgacgtgccggcttacgctgacgaccccctgggatccaccgtcccgcaggcggactacgtgtggcggacgatattcatgttcggggcggtgccggcggcgcttacctactactggcggacgaagatgccggagacggcgaggtacaccgcgctggtggccaagaacgcaaagcaggccgctgccgatatgtccaaggtcctccaggtggagatcgcggaggagcaggcgaaggtggaggccattactgccaaggactccaacagcttcgggctcttctcgaaggagttcgcccgccgccacggcctccacctcctgggcaccaccaccacgtggttcttgctggatatcgccttctacagccagaacctcttccagaaggacatcttcagcggcatcgggtggatcccgaagccggcgaccatgaacgcgatcgaggaggtctaccgcattgctcgcgcccagaccctgatcgcgctctgcggcacggtccccgggtactggttaacggtgggcctcatcgacatcatcggccgcttcaccatacaggtgatcggcttcttcttcatgacggtgttcatgctggggctggccatcccctaccaccactggaccatgagggagaaccgcatcggtttcgtcgtcatgtacggcctcaccttcttcttcgccaacttcggacccaactgcaccaccttcgtcgtgccggcggagatcttcccggcgcggctgcgctccacgtgccacgggatctccgccgcggcggggaaggccggggccatcatcggctccttcgggttcctctacgcggcgcagccaacggacaagaggctggcggacaggggttacccggcgggcatcgggatcaagaactcgctctacgtgctggcggcgtgcaacctgttgggcctgctcttcaccttcctggtgcctgagtccaaggggaagtcgctggaggagatgtcgggggagaacgccgacgaggcggagcagacccgcggcagcgtcgcggcggtcgagctcgaaccgtag

SEQ ID NO: 91858 - protein, 536 aa, Egeria densa
MARDQLEVLNALDVAKTQLYHFTAIVIAGMGFFTDAYDLFCISLVTKLLGRIYYYVPGSPTPGTLPPNVSAAVNGVAFCGTLSGQLFFGWLGDKLGRKKVYGMTLMMMVICSVASGLSFGHSAKSTMATLCFFRFWLGFGIGGDYPLSATIMSEYANKRTRGAFIAAVFAMQGFGILGGGIVTLIVSSVFKTKYDVPAYADDPLGSTVPQADYVWRTIFMFGAVPAALTYYWRTKMPETARYTALVAKNAKQAAADMSKVLQVEIAEEQAKVEAITAKDSNSFGLFSKEFARRHGLHLLGTTTTWFLLDIAFYSQNLFQKDIFSGIGWIPKPATMNAIEEVYRIARAQTLIALCGTVPGYWLTVGLIDIIGRFTIQVIGFFFMTVFMLGLAIPYHHWTMRENRIGFVVMYGLTFFFANFGPNCTTFVVPAEIFPARLRSTCHGISAAAGKAGAIIGSFGFLYAAQPTDKRLADRGYPAGIGIKNSLYVLAACNLLGLLFTFLVPESKGKSLEEMSGENADEAEQTRGSVAAVELEP

SEQ ID NO: 91859 - DNA, 1938 bp, Aspergillus oryzae
  CDS (1)..(1938)
atgtcagcctcagccccttatgatcatggcgctgatatattgtttggagttccccgtatccagtcagggcacctttgctatgtgcacaattcaacctttgcgaggacattattctgcgaccctcaagtatctttccaagctttcacaaccttcattaagacgatacctccagcacaacggcgaaactttatcatcagccagttagagagtgccagacgcagggaatggctctgggtggtagtggtcgccggggttggcttttttgctgacgcatactgtatcttctccgtaaacatggtcgtccctatgatcagcgaagtctattggggtagcttggatgccaagcctgaccgcgttcacaactatgaagtcggtcttagcattatcaccttagcaggtgcgctcgtaggccaggttctttttggtatcgccgcggatatctggggtcgccgaaagatgtatggattagagttggttgttctgatcttcagcactcttgggatgtccatggcctcctccggtaagtttgactctatgtcaattatcggcgttcttctgttctggcggttctttatgggcttgggagttggagccgactaccctctatctgctattatttgctccgaacttgcacctactcgcataagaggtcgtatgttggcggctgtcttcctctgtcagtcactcggagaggctgcggcggctgtcgttgctctcatcgctgtggcaggctttcgacatagtctgcctaatgatccagaaattcgagagtgcacaggatcctgtgttcaaaatttagacagcatatggaggttaatagtaggtctgggtgcggtacctgcctttattgccatctggtttcgattgacgatcatcgaatcaccccgttatacaacggatgtcttgcagaacagccttcaagctgccgcagatgtgtctcagttctatcagtcagcagagatttcctcggcttcgagtctaggccatgagtcgctccatccagtcggagagacgatatcactgtctcccacccaaactcgtgaatatggctttatgccatccgtcatctctcgtcaaccaagttctgtggaattggagaatgcctcaagccctccacttcacttctggagagatttgagaagttttctgaaacagaagcgcaacctccgaacgctagtggcaacatccttatgctggttttgtctcgatctgccgttctacggattgggattgatgaatgtggatattataaataccatttggtatggtaaccatattccgtctgccggagtgtatgagtcgcttctccgggtctcttaccagagtatcgtggtcgtatcatctggcgctatcgtcggtagctgcatagcggtgctaacaatcgaccgaatcgggcgccggaatctgcagctgctcggcttctgtttacttttcattctcaacgtgattattggtgcttcattcagatatttgagcacacacggcgactcatcggctttggttgtactttatgttctgactcagatatttttcaactttggaccgaacaccacaacatacattgtccctgccgagctcttcccaacccgctttcgcgccacttgccatggcatctcagctgcctccggaaaactaggttccattcttgcacaatgcttcttgggatatgttgacttcggcaatggtgcaacctggcgaaatgtgccagattggctaggatatgcacttctatgcctatcattcttcatgctcatgggtcttattgctaccttatggatccctgagactagggataaggaggggaacaataagtccctcgagcgtatcaccgaggatatgcaggcaaaagatgtaccttctgtggatgaggaagataatggcagcattcacacccaggctactacgtctctgcctgggccggattggagatcggactga

SEQ ID NO: 91860 - protein, 645 aa, Aspergillus oryzae
MSASAPYDHGADILFGVPRIQSGHLCYVHNSTFARTLFCDPQVSFQAFTTFIKTIPPAQRRNFIISQLESARRREWLWVVVVAGVGFFADAYCIFSVNMVVPMISEVYWGSLDAKPDRVHNYEVGLSIITLAGALVGQVLFGIAADIWGRRKMYGLELVVLIFSTLGMSMASSGKFDSMSIIGVLLFWRFFMGLGVGADYPLSAIICSELAPTRIRGRMLAAVFLCQSLGEAAAAVVALIAVAGFRHSLPNDPEIRECTGSCVQNLDSIWRLIVGLGAVPAFIAIWFRLTIIESPRYTTDVLQNSLQAAADVSQFYQSAEISSASSLGHESLHPVGETISLSPTQTREYGFMPSVISRQPSSVELENASSPPLHFWRDLRSFLKQKRNLRTLVATSLCWFCLDLPFYGLGLMNVDIINTIWYGNHIPSAGVYESLLRVSYQSIVVVSSGAIVGSCIAVLTIDRIGRRNLQLLGFCLLFILNVIIGASFRYLSTHGDSSALVVLYVLTQIFFNFGPNTTTYIVPAELFPTRFRATCHGISAASGKLGSILAQCFLGYVDFGNGATWRNVPDWLGYALLCLSFFMLMGLIATLWIPETRDKEGNNKSLERITEDMQAKDVPSVDEEDNGSIHTQATTSLPGPDWRSD

SEQ ID NO: 91861 - DNA, 1809 bp, Aspergillus oryzae
  CDS (1)..(1809)
atgccaccctcatctacaatgttcttcccagctcaatctgtcctacccctatcctgtccccctccccccccccccaatgttcgagccgcattctttatatctgaggaccgccatgtccgcatgcgacaagtttatgagaccatcgatcgacagggttatcaatggattgtggtatttgtggccggggtgggcttcttcctcgatggatatacactatttgcaagcaacatggccttcccgatgctatcctacgtctactggagagatgacccgtcgtccatgaaactcacaaatatcaatattgccacattggccggtaccatgctggggcaagtattatttgggtatctagcagacaagtatgggcggaagaagatgtacggactggagttgatgctcctgatcacctcaaccctcggtgtggtcatgtcctcaaatggcgtaaaccatagtatgagtgtatatgcgtggctgatatggtggagaattgtggtcggcatcggcgttggggctgattacccactgagtgctgtcatcacctctgagtttgcgcccacaaagcatcgagcgcgaatgatggcatcggtctttttcatgcagccgctcggtcagatcaccggaaatatcgtgtcactgattgtggttgccgccagcagaagccaggggcacgaagacctgacccgcactgtggatatcatgtggaggtgggtcattggaatcggggtagttcctggtgtagtcgcaacggtcttccggttcattatcccagaaagtccccggtttctgctggaggtcgaagacgaccccatccaggcagagttcgacgcaactaccctctttaacgagccgaacaactctccctcgatagaaacagacagttggcacaatctgcccctcccagcgatctctatgacgagtcaatgcttctctgatcgatcaccctcgcagacagagattctccagcccgccactctgaactcccactggcatttgacgggaaaggacatcacacagtatttctggactgagggaaattggcgcacactcgctgccacctccctctcctggctcttactcgactttggcttttacggaattggtctctcgaacccacagtttcttgccaagacatggggctccctcaagctccatggtccagcacctgtctggcagacggacgacaccccgaacgccgatgtcttcaagatgtttcttgatagttcgacccatgcccttgtcatcctcaacagtggtagtttccttgggggcttgctgttaattctcgtcattcaccgtcttgatcgtgtggcacttcaaaaatacgggttcctggcgctggccgccctcttcattgctctgggcactatgttcctgaccgttcacaaagaaggtgctgtggccgtggccttatatatcatcggccaggctttcttcaacttcggccccaacgcaaccacctacataatccccgccgaaatattccccactcggtaccgcgccacctgccacggaatcagtgccggcgctggcaagctcggctcgattctcgttcaaatattctcggcacacttcaacttcggttcgggtctcggaaatgagcccatcatccgccacggctgggttctaattgtcttcagcgtatgtatgatgctcggtgcggtggtgacacatttctggatcccccctgtgaagcgacaggacggccaagggaagttctggggtgggaagacggagaccttggagacattggcactgggaaggatgggatggaagagtcgatctcgcaccttacctctcagcatactctga

SEQ ID NO: 91862 - protein, 602 aa, Aspergillus oryzae
MPPSSTMFFPAQSVLPLSCPPPPPPNVRAAFFISEDRHVRMRQVYETIDRQGYQWIVVFVAGVGFFLDGYTLFASNMAFPMLSYVYWRDDPSSMKLTNINIATLAGTMLGQVLFGYLADKYGRKKMYGLELMLLITSTLGVVMSSNGVNHSMSVYAWLIWWRIVVGIGVGADYPLSAVITSEFAPTKHRARMMASVFFMQPLGQITGNIVSLIVVAASRSQGHEDLTRTVDIMWRWVIGIGVVPGVVATVFRFIIPESPRFLLEVEDDPIQAEFDATTLFNEPNNSPSIETDSWHNLPLPAISMTSQCFSDRSPSQTEILQPATLNSHWHLTGKDITQYFWTEGNWRTLAATSLSWLLLDFGFYGIGLSNPQFLAKTWGSLKLHGPAPVWQTDDTPNADVFKMFLDSSTHALVILNSGSFLGGLLLILVIHRLDRVALQKYGFLALAALFIALGTMFLTVHKEGAVAVALYIIGQAFFNFGPNATTYIIPAEIFPTRYRATCHGISAGAGKLGSILVQIFSAHFNFGSGLGNEPIIRHGWVLIVFSVCMMLGAVVTHFWIPPVKRQDGQGKFWGGKTETLETLALGRMGWKSRSRTLPLSIL

SEQ ID NO: 91863 - DNA, 1620 bp, Zea mays
  CDS (1)..(1620)
atggcgcgcgggggagacggcctgcaggtgctgagcgcgctggacgcggcgaagacgcagtggtaccacttcacggccatcatcgtcgccggcatgggcttcttcacggacgcctacgacctcttctgcatctccctcgtcaccaagctgctgggccgcatctactacacggacaccagcaaggacagccccgggtcgctgccgcccaacgtcgcggcggcggtcaacggcgtggccttctgcggcacgctggcggggcagctcttcttcggctggctgggcgacaagctggggcgcaagagcgtgtacgggatgacgctcatggtcatggtcatctgctccgtcgcgtcgggcctctcgttcggccacacccccacgggggtcatggccacgctctgcttcttccgcttctggctcggcttcggcatcggcggcgactacccgctgtcggccaccatcatgtccgagtacgccaacaagaggacccgcggcgccttcatcgccgccgtcttcgccatgcagggcttcggcatcctcgccggcggcatcgtcacgctcgtcatctccgccgccttccgcgcggcgtacccgtccccggcgtacagggacgaccacttcacctccaccgtgccgcaggccgacatcgtgtggcgggtcatcgtcatgctcggcgccgcgccggcgctgctcacctactactggctgatgaagatgcccgagacggcgcggtacacggcgctggtggccaagaacgccaagcaggccgccgccgacatgtccaaggtgctgcacacggagatcgtggacgagcaggagaagctggacgccgccgagggcgccaacagcttcggcctcttctccagggagttcgcgcgccgccacggcctccacctcgtcggcaccgccaccacctggttcctgctcgacatcgccttctacagccagaacctgttccagaaggacatcttcaccagcatcaactggatccccaaggccaacaccatgagcgcgctggaggaggtgtaccgcatctcccgcgcgcagaccctcatcgcgctctgcggcacagtcccgggctactggttcaccgtcgcgctcatcgacgtcgtcggccgcttcgccatacagctgctgggcttcttcatgatgaccgtcttcatgctcggcctcgccatcccctaccaccactggaccacgccgggcaaccacatcggcttcgtcgtcatgtacgccttcaccttcttcttcgccaacttcgggcccaacagcaccaccttcatcgtgcccgccgagatcttcccggcgcgcctgcgctccacctgccacggcatctccgccgcctcggggaaggccggggccatcatcggcgcgttcggcttcctgtacgcggcgcagaaccaggacaggagcaagacggacgccggctaccccgcgggcatcggcgtgcgcaactcgctcttcgtcctcgccgccagcaacatgctcggcttcgtcctcacgttcctcgtgccggagtccaagggcaagtcgctcgaggagatgtccggtgaggctgaagactcagaggaggagcccgtcggcgcccgtgcggtgcggccgtcggagacccagatggtgtag

SEQ ID NO: 91864 - protein, 539 aa, Zea mays
MARGGDGLQVLSALDAAKTQWYHFTAIIVAGMGFFTDAYDLFCISLVTKLLGRIYYTDTSKDSPGSLPPNVAAAVNGVAFCGTLAGQLFFGWLGDKLGRKSVYGMTLMVMVICSVASGLSFGHTPTGVMATLCFFRFWLGFGIGGDYPLSATIMSEYANKRTRGAFIAAVFAMQGFGILAGGIVTLVISAAFRAAYPSPAYRDDHFTSTVPQADIVWRVIVMLGAAPALLTYYWLMKMPETARYTALVAKNAKQAAADMSKVLHTEIVDEQEKLDAAEGANSFGLFSREFARRHGLHLVGTATTWFLLDIAFYSQNLFQKDIFTSINWIPKANTMSALEEVYRISRAQTLIALCGTVPGYWFTVALIDVVGRFAIQLLGFFMMTVFMLGLAIPYHHWTTPGNHIGFVVMYAFTFFFANFGPNSTTFIVPAEIFPARLRSTCHGISAASGKAGAIIGAFGFLYAAQNQDRSKTDAGYPAGIGVRNSLFVLAASNMLGFVLTFLVPESKGKSLEEMSGEAEDSEEEPVGARAVRPSETQMV

SEQ ID NO: 91865 - DNA, 2096 bp, Zea mays
  CDS (58)..(1701)
caagcattgaagccgtagccgccgccgccggacgagacaggttgaggcggggcggcaatggccgccggggaccttgaggtgctcaccgcgctcgacaccgcgaagacgcaatggtaccacttcaccgccatcgtggtcgccggcatggggttcttcaccgacgcctacgacctcttctgcatctccctcgtgaccaagctcctcggccgcatctactacaccgtggaggggtccgcgacgcccggcaccctcccgccgcacgtgtccgcgtccgtcaacggcgtggccttcgtgggcacgctgtcagggcagctcttcttcggctggctgggcgacaagctcgggcgcaagaaggtctatggcatgacgctcatgctcatggtcctctgctccgtcgcgtcggggctctcgttcggccacaccccggcgtccgtcatggcgacgctgtgcttcttccgcttctggctcgggttcggcatcggcggcgactacccgctgtcggcgaccatcatgtccgagtacgccaacaagaagacgcgcggcgcgttcatcgccgcggtgttcgcgatgcagggcttcggcatcatggccggcggcctcgtggccatcgtcgtgtccgcgtggttcaaggccagtttccccgccccggcctacgccgtcgaccccgccgcgtccacgccgccgcaggccgacttcgtgtggcggatcatcctgatgctgggcgcgatgcccgcggcgctcacctactactggcgcaccaagatgcccgagacggcgcggtacacggcgctggttgccaagaacgccaagcaggccgcggctgacatgtccaaggtgctgcaggtggagatctcagccggcgccgccgaggagggcgccgcggctgcgactgcgactgcgactgagcctgcgccggcgtcggcgtccgcgtcttttgggctcttctccggggagttcctccgccggcacgggctgcacctcctgggcacgtccttgacgtggttcctgctggacatcgccttctactcgcagaacttgttccagaaggacatcttcagcgcggtggggtggatccccaaggcggcaacgatgaacgcgctggaggagctgttcagcatcgcgcgggcgcagtccctgatcgcgctgtgcggcacggtgcccggctactggttcacggtggcgctgatcgacgtgttggggcggttcgcgatccaggtgacggggttcctgatgatgacggtgttcatgctgggtctggccgtgccgtacgagcactggacgacgccggggcaccacatcggcttcatcgtcatgtacggcctcaccttcttcttcgccaacttcgggcccaacgcgaccacgttcatcgtgcccgcggagatcttcccggccaggctgcggtcgacgtgccacggcatctcggcggcgtcggggaagctgggcgccatcatcggctccttcgggttcctgtacctggcgcaaaaccgggacccggccaagacggaccacgggtaccccgcgggcatcggcgtgcgcaactcgctgttcctcctcgccggctgcaacctgctgggcctggcattcacgttcctggtgccggagtccaagggcaaatccctggaggagatgtccggcgagaacgacgaggcggccgccgccgccgccacgccgaactacaacaaccgcacagtgcccgtgtaagtagccgtagtagatgcatctgcatgcatgcatgcaaatgttatataaggaacaagtacgtacgtaacgtaacgtaacgtgtcgtgtgtgtggctgttgcacggtagggtacacgcactgttctccttcgatctggtcgaggttgtttgtcgaggcacagccgtcgccttccgttacgtcattgttaatgtttccgttctgtctggtgcttgtgtgcatgttcagttgaacttgcgcgatcgatctgatgggatcagagacgtgtgtgctcctaaataatcggaggtcaccgtcgggatatagacgtgctctcctggatgttgtaccaagcgcgtcacgctgctttattagatcaatcaagtactgttgttttcgttaaaaaaaaaaaaaaaaaa

SEQ ID NO: 91866 - protein, 547 aa, Zea mays
MAAGDLEVLTALDTAKTQWYHFTAIVVAGMGFFTDAYDLFCISLVTKLLGRIYYTVEGSATPGTLPPHVSASVNGVAFVGTLSGQLFFGWLGDKLGRKKVYGMTLMLMVLCSVASGLSFGHTPASVMATLCFFRFWLGFGIGGDYPLSATIMSEYANKKTRGAFIAAVFAMQGFGIMAGGLVAIVVSAWFKASFPAPAYAVDPAASTPPQADFVWRIILMLGAMPAALTYYWRTKMPETARYTALVAKNAKQAAADMSKVLQVEISAGAAEEGAAAATATATEPAPASASASFGLFSGEFLRRHGLHLLGTSLTWFLLDIAFYSQNLFQKDIFSAVGWIPKAATMNALEELFSIARAQSLIALCGTVPGYWFTVALIDVLGRFAIQVTGFLMMTVFMLGLAVPYEHWTTPGHHIGFIVMYGLTFFFANFGPNATTFIVPAEIFPARLRSTCHGISAASGKLGAIIGSFGFLYLAQNRDPAKTDHGYPAGIGVRNSLFLLAGCNLLGLAFTFLVPESKGKSLEEMSGENDEAAAAAATPNYNNRTVPV

SEQ ID NO: 91867 - DNA, 1772 bp, Zea mays
  CDS (46)..(1674)
gaagaacacccttctctggtcgtcgcagggcagctaacatccgccatggcgcgcgggggagacggcctgcaggtgctgagcgcgctggacgcggcgaagacgcagtggtaccacttcacggccatcatcgtcgccggcatgggcttcttcacggacgcctacgacctcttctgcatctccctcgtcaccaagctgctgggccgcatctactacacggacaccagcaaggacagccccgggtcgctgccgcccaacgtcgcggcggcggtcaacggcgtggccttctgcggcacgctggcggggcagctcttcttcggctggctgggcgacaagctggggcgcaagagcgtgtacgggatgacgctcatggtcatggtcatctgctccgtcgcgtcgggcctctcgttcggccacacccccacgggggtcatggccacgctctgcttcttccgcttctggctcggcttcggcatcggcggcgactacccgctgtcggccaccatcatgtccgagtacgccaacaagaggacccgcggcgccttcatcgccgccgtcttcgccatgcagggcttcggcatcctcgccggcggcatcgtcacgctcgtcatctccgccgccttccgcgcggcgtacccgtccccggcgtacagggacgaccacttcacctccaccgtgccgcaggccgacttcgtgtggcgggtcatcctcatgctcggcgccgcgccggcgctgctcacctactactggcggatgaagatgcccgagacggcgcggtacacggcgctggtggccaagaacgccaagcaggccgcggccgacatgtccaaggtgctgcacacggagatcctggacgagcaggagaagctggacgggatggtcgccgccgagggcgccaacagcttcggcctcttctccagggagttcgcgcgccgccacggcctccacctcgtcggcaccgccaccacctggttcctgctcgacatcgccttctacagccagaacctgttccagaaggacatcttcaccagcatcaactggatccctaaggccaacaccatgagcgcgctggaggaggtgtaccgcatctcccgcgcgcagacgctcatcgcgctctgcggcaccgtcccgggctactggttcaccgtcgcgctcatcgacgtcgtcggccgcttcgccatccagctgctgggcttcttcatgatgaccgtcttcatgctcggcctcgccatcccctaccaccactggaccacgccgggcaaccacatcggcttcgtcgtcatgtacgccttcaccttcttcttcgccaacttcgggcccaacagcaccaccttcatcgtgcccgccgagatcttcccggcgcgactgcgctccacctgtcacggcatctccgccgcctcggggaaggccggggccatcatcggcgcgttcggcttcctgtacgcggcgcagaaccaggacaagagcaagacggacgccggctaccccgcgggcatcggcgtgcgcaactcgctcttcgtcctcgccgccagcaacatgctcggcttcgtcctcacgttcctcgtgccggagtccaagggcaagtcgctcgaggagatgtctggtgaggctgaagactcagaggaggagcccgtcggcgcccgtgcggtgcggccgtcggagacccagatggtgtagagaatcgatcgatcgacgcgtgttccttcctgcactgcacatggtgggctatcatgtcctcaattgtttttttccacgttaaaaaaaaaaaaaaaaaa

SEQ ID NO: 91868 - protein, 542 aa, Zea mays
MARGGDGLQVLSALDAAKTQWYHFTAIIVAGMGFFTDAYDLFCISLVTKLLGRIYYTDTSKDSPGSLPPNVAAAVNGVAFCGTLAGQLFFGWLGDKLGRKSVYGMTLMVMVICSVASGLSFGHTPTGVMATLCFFRFWLGFGIGGDYPLSATIMSEYANKRTRGAFIAAVFAMQGFGILAGGIVTLVISAAFRAAYPSPAYRDDHFTSTVPQADFVWRVILMLGAAPALLTYYWRMKMPETARYTALVAKNAKQAAADMSKVLHTEILDEQEKLDGMVAAEGANSFGLFSREFARRHGLHLVGTATTWFLLDIAFYSQNLFQKDIFTSINWIPKANTMSALEEVYRISRAQTLIALCGTVPGYWFTVALIDVVGRFAIQLLGFFMMTVFMLGLAIPYHHWTTPGNHIGFVVMYAFTFFFANFGPNSTTFIVPAEIFPARLRSTCHGISAASGKAGAIIGAFGFLYAAQNQDKSKTDAGYPAGIGVRNSLFVLAASNMLGFVLTFLVPESKGKSLEEMSGEAEDSEEEPVGARAVRPSETQMV

SEQ ID NO: 91869 - DNA, 1626 bp, Zea mays
  CDS (1)..(1626)
atggcgcgcggcggggacggcctgcaggtgctcagcgcgctggacgcggcgaagacgcagtggtaccacttcacggccatcatcgtcgccggcatgggcttcttcacggacgcctacgacctcttctgcatctccctcgtcaccaagctgctggggcgcatctactacacggacaccagcaaggacaacccgggctcgctcccgcccaacgtcgccgcggcggtcaacggcgtcgccttctgcggcacgctggccggccagctcttcttcggctggctcggggacaagctcgggcgcaagagcgtgtacgggatgacgctcatgctcatggtcatctgctccgtcgcgtcgggcctctcgttcggccacacgcccacgggggtcatggccacgctctgcttcttccgcttctggctcgggttcggcatcggcggggactacccgctgtcggcgaccatcatgtccgagtacgccaacaagaagacccgcggcgccttcatcgcggccgtcttcgccatgcagggcttcggcatcctcgccggcggcattgtcacgctcgtcatctccgccgccttccgcgcggggtacccggccccggcgtacagggacgaccacttcaactccaccgtgccgcaggccgactacgtgtggcgcatcatcctcatcctgggcgccgcgccggcgatgctcacctactactggcggatgaagatgcccgagacggcgcgctacaccgcgctcgtggccaagaacgccaagcaggccgcggccgacatgtccagggtgctccagacggagatcgtcgacgagcaggagaagctggacgagatggtcaccgccgagagcaacaccttcggcctcttctccagggagttcgcgcgccgccacgggctccacctcgtcggcacctccaccacgtggttcctgctcgacatcgccttctacagccagaacctgttccagaaggacatcttcaccagcatcaactggatccccaaggccaacaccatgagcgcgctggaggaggtgttccgcatctcccgcgcccagacgctcatcgcgctctgcggcaccgtcccgggctactggttcaccgtcgcgctcatcgacgtcgtcggccgcttcgccatccagctgctcggcttcttcatgatgaccgtcttcatgctcggcctcgccatcccctaccaccactggaccacgcccggcaaccacatcggcttcgtcgtcatgtacgccttcaccttcttcttcgcaaacttcggccccaacagcaccaccttcatcgtgccggccgagatcttcccggcgcggctgcggtccacatgccacggcatctccgccgcctcggggaaggccggcgccatcatcggggcctttgggttcctgtacgcggcgcagaaccaggacaagagcaaggcggacgccgggtaccccgcgggcatcggcgtacgcaattcgctcttcgtcctcgctgcctccaacttgcttggctttatcctcaccttcctcgtgccggagtccaagggtaagtcgctcgaggagatgtccggggaggctgacgacgccgaggacgacgccgtcggcacccgcgcggtgcggccgtcggggacccagatggtgtag

SEQ ID NO: 91870 - protein, 541 aa, Zea mays
MARGGDGLQVLSALDAAKTQWYHFTAIIVAGMGFFTDAYDLFCISLVTKLLGRIYYTDTSKDNPGSLPPNVAAAVNGVAFCGTLAGQLFFGWLGDKLGRKSVYGMTLMLMVICSVASGLSFGHTPTGVMATLCFFRFWLGFGIGGDYPLSATIMSEYANKKTRGAFIAAVFAMQGFGILAGGIVTLVISAAFRAGYPAPAYRDDHFNSTVPQADYVWRIILILGAAPAMLTYYWRMKMPETARYTALVAKNAKQAAADMSRVLQTEIVDEQEKLDEMVTAESNTFGLFSREFARRHGLHLVGTSTTWFLLDIAFYSQNLFQKDIFTSINWIPKANTMSALEEVFRISRAQTLIALCGTVPGYWFTVALIDVVGRFAIQLLGFFMMTVFMLGLAIPYHHWTTPGNHIGFVVMYAFTFFFANFGPNSTTFIVPAEIFPARLRSTCHGISAASGKAGAIIGAFGFLYAAQNQDKSKADAGYPAGIGVRNSLFVLAASNLLGFILTFLVPESKGKSLEEMSGEADDAEDDAVGTRAVRPSGTQMV

SEQ ID NO: 91871 - DNA, 1668 bp, Cryptococcus neoformans
  CDS (1)..(1668)
atgtcgagccagttcgaggttgaaaaagctcacgccaacgtcccaatgtctgccggtgaaagacgacgtgctgctcttgcggaaattgatgaagccagtttctcctggtttcacgctaaagcctgtatagttgctggcgtcggatttttcacagacgcttatgatatattttccatttctatcgccgccaccatgattggttacgtttaccacaacggtggttccaacaccagtaatcaggatttgggtatcaaagttgcccattctattggcactttcttcggtcagctcctctttggttatctcgccgatcacattggtaggaaaaggatgtacggtgttgaattgatcattatcatcattggtactctcggtcaggcggtcgccggccatgctccaggcgttaatatttatggtgttttgattatgtggcgttttatcatgggtattgggattggaggtgactatccggtttcttctgtcatcacctccgaattcgcagcccgtaagattcgaggaaggatgatggctgctgttttctcagctcaaggttggggaaacttcacttgcgctattgtcgcagtgattgtcgtcgctgcttataaggactctatccattctcagcctcttgatgacttgaaatccgtcgaccaagcgtggcgtctcatcataggtatcgggtgtgttcccgccgttatagctctctacttccgattgactattcccgaaactcctcgctacacaatggatgttgagcgaaacatcaaacaggcttctcaagatgtcgatgcgtacatcactaccggtcaatacattgcagacccagtacaaatcaatgatcgcgccgaggtccctaaggcttcatggtctgatttcgctcgtcatttcgggcagtggcagaacggcaaagttttacttggcacttcttggtcatggttcgccttggacattgcgttttatggtctaggactaaactcatcaactattttgtcaaccatcggcttcggttcttctaccgaccttccaaccaaacaagaaaacatctatcaaacattatacaatgttgctgtcggtaatattattttggctgttggaggactaattcctggatactatttctccatggcatttatcgattcatggggtcgaaaacctatccaactgatggggtttgtactccttacgatcatttttgtctgtatgggcttcggttacgataaaatgctttctaccgatcccggcaaaaaggcctttgtcttcctctattgcatggcaaactttttccaaaattttgggcccaacactacgacctttatagtccccggagaagtcttccctactcgttaccgatcaactgcccatggtatctccgccgcatcaggcaagctgggcgccatcgttgcccaggtcggattttccaggcttatcaatattggtggcacaaaccagttcctcaagcacatcttggaaatcttcgctttcttcatgcttaccggtgttttcagcacattacttcttcccgagactaagaaccgaagcctagaggacttgtcacaggaagatcaagaaaattttgttaggaactctggtatggccactgctgtccctatggtacagaagactggcacttcatcagacgatgagagggttcttgctggggctctgtag

SEQ ID NO: 91872 - protein, 555 aa, Cryptococcus neoformans
MSSQFEVEKAHANVPMSAGERRRAALAEIDEASFSWFHAKACIVAGVGFFTDAYDIFSISIAATMIGYVYHNGGSNTSNQDLGIKVAHSIGTFFGQLLFGYLADHIGRKRMYGVELIIIIIGTLGQAVAGHAPGVNIYGVLIMWRFIMGIGIGGDYPVSSVITSEFAARKIRGRMMAAVFSAQGWGNFTCAIVAVIVVAAYKDSIHSQPLDDLKSVDQAWRLIIGIGCVPAVIALYFRLTIPETPRYTMDVERNIKQASQDVDAYITTGQYIADPVQINDRAEVPKASWSDFARHFGQWQNGKVLLGTSWSWFALDIAFYGLGLNSSTILSTIGFGSSTDLPTKQENIYQTLYNVAVGNIILAVGGLIPGYYFSMAFIDSWGRKPIQLMGFVLLTIIFVCMGFGYDKMLSTDPGKKAFVFLYCMANFFQNFGPNTTTFIVPGEVFPTRYRSTAHGISAASGKLGAIVAQVGFSRLINIGGTNQFLKHILEIFAFFMLTGVFSTLLLPETKNRSLEDLSQEDQENFVRNSGMATAVPMVQKTGTSSDDERVLAGAL

SEQ ID NO: 91873 - DNA, 1668 bp, Triticum monococcum
  CDS (1)..(1668)
atgttcacgacctggcctgcgaggaggcacgcgtgcagctccctcttctgccacctccatggcgccgggagcgccatgctgtaccgcgtgctggacgcggtgacatcggtgaaatgcgagacccgtcgggcgcgcaagcagatcaaggtgctggaggccctggacgtcgccgggacgcagctgtaccacttcaccaccatcgtcatcgccggcatgggcttcttcaccgatgcctacgacctgttctcggcctccctcatcgccgacctcctgggccacatctactaccactcggcggacggcaagctccccggtcacgtcgccggcgccgtcagcggcgtggcgctctgcggcacagtcctggggcagctcttcttcggctggctcggcgacaggatggggcggaagcggatctacggcgtcacgctcaagctcatggtggtgtgctcgctcgcgtccggcctctccttccacaacaagcccaagtgcgtcgtggccacgttgtgcttcttccgcttctggctcggcttcggcatcggcggcgactacccgctctcggcgactatcatgtctgagtatgccaacaagaggactcgcggcgccttcatcgcagcggtctttgctatgcagggtcttgggaacctggctgctggggctgttgttctggtgctctctgcgagcttcaagaacacggccgcgtacgatactgaccatctcgggcaagcagactacgtatggcgcatagtactcatgctcggcgccgttcctgccctgctcacctactactggcgcatgaagatgcccgagacggcgcgctacaccgcgctcatcgccaagaacctcaagctagcggcgtctgacatggccgcagtcctcgacatcgacttcgtgtccgacatggacgcagaggccgttgttaagcaggacgagtttggcctcttctccatggagttccttcacaagcatggccgccagctcctcggaaccactgtgtgctggttcgtcctcgacgtcgtcttctactccctcaacctcttcatgaaggacatcttcaacggcatcggctggtttggagacgcggccgagatgagccctctcgagcagacctacaagatagcccgcacgcaggccatcattgtggtcggcggttccctaccagggtacttcctcactgtcctcttcgttgaccgcatcggccgcatcaagatccagctcatggggttcaccatgatgaccatcttcatgatcgggctcgccgcgccctacaagttctggtccaaacccagcatgcacgcaggcttcgccatcatgtatgcattgatcctcttcttcgcaaacttcggccccaactccaccaccttcatcctgcccaccgagatattcccgacgcggctgcggtcgacgtgcaacggcatatcggctgccgggggtaagtgtggtgccatcatcggtgttctctggttccagtattctcatacgagcatccggagctctctccttcttctggcagggtgtaacctcgttggagtcatgttcactcttgccttgccggaatccaaagggatgtcactcgaggatatcaccggggaaatggaggaagaaagcgaaccatctcaagaatctacggttgctgaagttgagttcatccacagcgtggaaattttgtaa

SEQ ID NO: 91874 - protein, 555 aa, Triticum monococcum
MFTTWPARRHACSSLFCHLHGAGSAMLYRVLDAVTSVKCETRRARKQIKVLEALDVAGTQLYHFTTIVIAGMGFFTDAYDLFSASLIADLLGHIYYHSADGKLPGHVAGAVSGVALCGTVLGQLFFGWLGDRMGRKRIYGVTLKLMVVCSLASGLSFHNKPKCVVATLCFFRFWLGFGIGGDYPLSATIMSEYANKRTRGAFIAAVFAMQGLGNLAAGAVVLVLSASFKNTAAYDTDHLGQADYVWRIVLMLGAVPALLTYYWRMKMPETARYTALIAKNLKLAASDMAAVLDIDFVSDMDAEAVVKQDEFGLFSMEFLHKHGRQLLGTTVCWFVLDVVFYSLNLFMKDIFNGIGWFGDAAEMSPLEQTYKIARTQAIIVVGGSLPGYFLTVLFVDRIGRIKIQLMGFTMMTIFMIGLAAPYKFWSKPSMHAGFAIMYALILFFANFGPNSTTFILPTEIFPTRLRSTCNGISAAGGKCGAIIGVLWFQYSHTSIRSSLLLLAGCNLVGVMFTLALPESKGMSLEDITGEMEEESEPSQESTVAEVEFIHSVEIL

SEQ ID NO: 91875 - DNA, 1850 bp, Medicago truncatula
  CDS (29)..(1615)
agagagtcttccttttttttttaccaaaatgggattagaagtccttgaggctcttgattcagctcgtacacaatggtaccatgtaacagctatagtaattgctggcatgggattcttcactgatgcctatgatctgttctgcatttcaaccgtttcgaagctcttgggacgattatattactttgatccaagcactaacaaaccagggaagcttccaccatcagttaataatgtagtcaccggtgtggcccttgtcggaacactttctggccaattagtcttcggctggctcggagacaaacttggacgcaagaaagtttatggtgtcacactcattatcatggttgcttgtgccatttgctctggtctttcttttggttcttccgcgaaatctgttatgataaccctttgttttttcaggttttggcttggatttggtattggtggagactaccctttatcagcaaccatcatgtctgaatacgccaacaaaaggacacgaggcgctttcatagcagcagttttcgcaatgcaaggcgtgggaatcatctttgccggattggtttcaatggtattttcaggaatttttaaagcatactaccaggctccccgtttcaatgaagacccaattttatcaacacagcccgaaggggatttactctggcgattaattctcatgatcggtgctgttccagctgcgatgacttactactggagaatgaaaatgcctgaaaccggtcgttacactgcaatcgtagaagggaacgcgaaacaagccgctgcagacatggcaagagttttggacatcgaaatcatagcggagcaagataagttggctgaatttaaagcagcaaatgattaccctctttggtctagcgagtttttcaacaggcacggtcgtcatttaatcggtacaatgagttgttggttcttgttagatattgctttctacagtcagaatttgacacagaaagatatttaccctgcaatgggacttattcgtcaagacaaagaaatgaatgctattgatgaagttttccaaacttcgcgcgccatgtttgttgtcgccttgtttggaacattccccggttattggttcactgttttcttcattgaaaagcttggaagattcaagatacagttggttggtttcttcatgatgtctttcttcatgtttgtcattggtgttaaatatgaatacttgaaagacgaaaacaaaaacctcttcgctcttttatacgggctaacattcttcttcgcgaactttgggcctaatagtacaacttttgtgttgcccgctgagctttttcctacgcgggtgaggtcaacatgccatgctttcagtgctgcatctgggaaggcgggtgctatggttggtgcgttcgggatacaatactacacgttggatggtacgccaaggaagattagacgcgcaatgatgattctggcttttacaaatttgataggattcttttgcacgttcttggtgacggaaactaagggacgatctttggaagagatttcgggtgaggatggaagagagagtgaactcactgcaacaccaaatgacagggctccggggattcgccaggactcaagaactgagaagatgtgaatttaattacatgctgcaacatccatgtttgttttgataatattatattaatgtaataataataaataatggggccaaaattgatgtgtttagctggtttatgattataagatgaaccataagttatattttgttatgtgttgctgacagaaaaataaacttattgtaatgtttattttttaatgaaacttatatagtactttattgtaaacaaaaaaaaaaaaaaaaaaaaaaa

SEQ ID NO: 91876 - protein, 528 aa, Medicago truncatula
MGLEVLEALDSARTQWYHVTAIVIAGMGFFTDAYDLFCISTVSKLLGRLYYFDPSTNKPGKLPPSVNNVVTGVALVGTLSGQLVFGWLGDKLGRKKVYGVTLIIMVACAICSGLSFGSSAKSVMITLCFFRFWLGFGIGGDYPLSATIMSEYANKRTRGAFIAAVFAMQGVGIIFAGLVSMVFSGIFKAYYQAPRFNEDPILSTQPEGDLLWRLILMIGAVPAAMTYYWRMKMPETGRYTAIVEGNAKQAAADMARVLDIEIIAEQDKLAEFKAANDYPLWSSEFFNRHGRHLIGTMSCWFLLDIAFYSQNLTQKDIYPAMGLIRQDKEMNAIDEVFQTSRAMFVVALFGTFPGYWFTVFFIEKLGRFKIQLVGFFMMSFFMFVIGVKYEYLKDENKNLFALLYGLTFFFANFGPNSTTFVLPAELFPTRVRSTCHAFSAASGKAGAMVGAFGIQYYTLDGTPRKIRRAMMILAFTNLIGFFCTFLVTETKGRSLEEISGEDGRESELTATPNDRAPGIRQDSRTEKM

SEQ ID NO: 91877 - DNA, 1638 bp, Chlamydomonas reinhardtii
  CDS (1)..(1638)
atgggcgctcactgtacaaggtccgggacctggagtaggtttttcctgttcctggcgagctttatgattcctggtctgggcatgttctgcgaagcctacttcgtgttcgccgtcggtaacctgtcagcgctgtggaaggtcgagtacaagaactgctggaagggaattggctgcccggtcaagctttctgaatcaattacctacacgcaagtgtgcggcatcatctttggtcagctgttcctgggcttctttgctgaccgcatcggccgcaaatggggcagtgtcaccaccgccgccaccatggttgttggcgcgattctgattatttcctccgctggtaacactgagcgcgccctgtgggccatgttcacggccgtccagttcatcttcggcatcggtgtgggcggcgagtacccggtcgcctcgacctccgccaacgagcgcgccgagagcagcgccgctctgcagaagcgccgcggcgagaccgtcgtgctggtgttctccatgcagggctggggcaacctggtcaacaccgccgtcatcattgccatcatggctggctaccaccagtacggcgcgccgtacagcaaccacgccctggaggtgacgtggcgtctgtcgtacgccattggcctcatccccctgattggcatcctgctctaccgtaccttccgccttcgcgagtcggctgtgtggaccaagaagcgtgaggcccttcaggccatgggcggttcggaggccaagggcgtgcaatggcgcaagttcggtctgctgatgtactactactggcaccgcaactttggcaccgccatgagctggttcgtgtgggacttcgccttctacggtaacaagctgttccagggcaccttcatcaagatcatcaaccccagcgcctcgctaatccaagtcctggagtggactctgctgaacagctctgtggctctggttggctactactttgccgctttcacggtggacaagccgtggatgggccgcatgcgcatgcaggtcatgggcttcgcatggatgtttgttctgttcctcatctgcgccgtgcactacgaccagctgcgtactcccaagtacatccacacgttccagttcctgtactacttctccagtttctggggccagttcggccccaacgccaccacctggctgctgcccgccgagctggcgcccaccgagcttcgctccatgtgccacggcttctcggctgccgtcggcaaggctggcgcgctggttgcgggtgttgtgttcggccttgttgacggccgcaccaagttctggatcagcgctttctgcggtctggctggcgtcatcctgaccctgatcaccatccccgatgtgaccggcctggacctgcgcgagggtgacaagcgctggctggccatcctcgacggacaccaccacctgtaccacggcgacgccatcaagccgcgccacctgtctctcattgagcgcctgctgggctacggcaagaactaccaggccgactccagcagcgacgtgcagtacagcgccacgaccaccagctcgtcagcagccatggccaagagggccgcggagatgtcgtcgcccaagcagtcctttaagaagcagaactctgggaacgctatcattcccgtcaccaattag

SEQ ID NO: 91878 - protein, 545 aa, Chlamydomonas reinhardtii
MGAHCTRSGTWSRFFLFLASFMIPGLGMFCEAYFVFAVGNLSALWKVEYKNCWKGIGCPVKLSESITYTQVCGIIFGQLFLGFFADRIGRKWGSVTTAATMVVGAILIISSAGNTERALWAMFTAVQFIFGIGVGGEYPVASTSANERAESSAALQKRRGETVVLVFSMQGWGNLVNTAVIIAIMAGYHQYGAPYSNHALEVTWRLSYAIGLIPLIGILLYRTFRLRESAVWTKKREALQAMGGSEAKGVQWRKFGLLMYYYWHRNFGTAMSWFVWDFAFYGNKLFQGTFIKIINPSASLIQVLEWTLLNSSVALVGYYFAAFTVDKPWMGRMRMQVMGFAWMFVLFLICAVHYDQLRTPKYIHTFQFLYYFSSFWGQFGPNATTWLLPAELAPTELRSMCHGFSAAVGKAGALVAGVVFGLVDGRTKFWISAFCGLAGVILTLITIPDVTGLDLREGDKRWLAILDGHHHLYHGDAIKPRHLSLIERLLGYGKNYQADSSSDVQYSATTTSSSAAMAKRAAEMSSPKQSFKKQNSGNAIIPVTN

SEQ ID NO: 91879 - DNA, 1566 bp, Glomus intraradices
  CDS (1)..(1566)
atgtctacatccgatagagtaacaattgatgtcgataaacgtagagcggctctcaaagagattgatgatgcaaaatttggctggcaacatattcgtgcgtgtttggtagctggtaccggcttttttatggacgcgtacgatctttttgctatcaattttgcctctactatgatagggtacgtctattatggtggtaaaactcctgcaaatatcgacttgggtttgaaagtgtcaggttctattggcactttacttggtcaattatttttcggttatttggcagatcgtcttgggagaaagaagatgtatggtgttgaattaatgatcattattgttgcgacagttgcttcatcgttggccggtcaaagtcgtgctgttacagtagtcggtattatcatgttttggcgtgttgtaatgggtgtcggtattggaggagattatcctctttccgcaattattacatctgaattcgccacaaaaaaaagaagaggtgctatgatggcctcagtatttgctatgcaaggatttggaattttaggctctgctattgtagcacttatcgttttggcagcttttagaagtgcaattatcgccgatgtttctgctgttgattattgttggcgtatagtgctcggttgtggtgctattcccggtattgcggctctatacttccgtctcacaattccagaaaccccacgatatactatggacgtagaacacgatgtcaacaaagcaacttcggacgtcgccaactatttgcaaaaaactgacacaacagatgaaaatgatggaccaggcaatcatgtcggtgtaccaaaagcaagctggtcggatttcacaagttattttggaaaatggaaaaatggaaaagttttactaggaacctctatgtcatggttcgcgttggatattgctttttatggaatcggtcttaataacggaattattttgagtgctattggctacgctgacacacatgatgcagattttaatctaagggcttataattcactcaaaaatatggctcttggtaatattattatcactattatgggaaccgttcctggttattgggttactgtagcttttgttgataaatggggtagaaaacctattcaaataatgggtttcgctgtcctcactgtactatttattgtcatgggtgctgcctttaatccactcaaagaacattctattccagcttttatcgtcttattcacattgttgcagttcttccaaaattttggtcccaacacaacaacattcatcgttccaggggaagttttcccaacacgttacagatcaactggtcatggtatatcagctgcatccggaaaacttggagctattgttgctcaagttggtttctcaaaactaaaagacattggtggaccaaacgcatttgttggacaattgcttttaatctttgccgcatggatgtttattgggggtttattctcaatactcattcctgaaacaaaaggtttgtctcttgaagaattagcaaatgaagaccatgatttcaacgttgaagaaaggaaagaaagagtaaaggcggaagcataa

SEQ ID NO: 91880 - protein, 521 aa, Glomus intraradices
MSTSDRVTIDVDKRRAALKEIDDAKFGWQHIRACLVAGTGFFMDAYDLFAINFASTMIGYVYYGGKTPANIDLGLKVSGSIGTLLGQLFFGYLADRLGRKKMYGVELMIIIVATVASSLAGQSRAVTVVGIIMFWRVVMGVGIGGDYPLSAIITSEFATKKRRGAMMASVFAMQGFGILGSAIVALIVLAAFRSAIIADVSAVDYCWRIVLGCGAIPGIAALYFRLTIPETPRYTMDVEHDVNKATSDVANYLQKTDTTDENDGPGNHVGVPKASWSDFTSYFGKWKNGKVLLGTSMSWFALDIAFYGIGLNNGIILSAIGYADTHDADFNLRAYNSLKNMALGNIIITIMGTVPGYWVTVAFVDKWGRKPIQIMGFAVLTVLFIVMGAAFNPLKEHSIPAFIVLFTLLQFFQNFGPNTTTFIVPGEVFPTRYRSTGHGISAASGKLGAIVAQVGFSKLKDIGGPNAFVGQLLLIFAAWMFIGGLFSILIPETKGLSLEELANEDHDFNVEERKERVKAEA

SEQ ID NO: 91881 - DNA, 1656 bp, Pholiota nameko
  CDS (1)..(1656)
atggccagctatcaggaaaagagctccgaccgcgactcgcacgagaaggtagtccctgcgaactcaggctacgtgctaggcgagcgtcgtcgcgctgcactggccgaggtcgataacgccaaattttcttggttccatgctaaagtttgcattgtcgccggggtcggcttcttcaccgatgcctacgacatttttgctatcaacatcgcctcaacgatgttgggatatgtttacggatcgggaaagcctggcgcactcaaggctctcaacaagcagcaggatcttggtgtaaaggttgctacccccgtcggtactttggtcggtcaacttttgtttggatggcttgcggatctccttggacgcaagaagatgtatggtgttgagttgatgatcataattattgcgacattcgcgcaggccctgtccgaaaatgctcctgctgttcacatcattggtgttctggttgtatggcgcttcataatgggggtgggcatcggaggcgattatccccttagcgccgtcatctcttctgagttcgcatccaccaagatacgtggtcgtatgatgaccgcggtgtttgcttctcaaggctggggcaatttcaccgctgctctcgttggtttcatcattaccgctgcttacaagtcctccatccttaaggaagcttcaatcacaaacctgcactccgtcgacgtcatgtggcgcctcctcatcggtctcggtgctgttcccggtgttgtagcattgtacttccgtttgaccatccccgagacccctcgattcaccatggatatcgagcgcaacattgatcaagcagccactgatattcaagccgttctcgctggaaggaaaagccatgtcgacgatgatgccttcatccaacgcattgaggcacccaaagctagctgggctgacttcagagagcacttcgggaaatttgaaaacttcaagattcttttcggtacagcttattcctggttcgcgctggacatagcattttacggcctgggattgaattccggtatcatcttgcaagccattggtttcgggaacccgacgagcactggcacccaagccatctacgacaacttgaagaacatttgcgtgggaaatttgattctttcggctgccggcttgatccctggatactgggtcagcttcctcttcatcgacaagtggggacgcaagcctatccaactcatgggattcatcgctctcactatcctcttcgtcatcttgggcttcggctacgacaagttgatctccaccccctcttccaaaaaggccttcgtcttcctctactgtctcgcagatttcttccagaattttggaccaaatactaccacgtttgtgatacctggagagattttccccactcgttaccgttccaccgcccacggtatatctgctgccagcggcaagcttggggctattgtcgcccaagtcggtttcagtcagctcaaggatattggcgggcctagcgcatgggtaaagcacattctcgaaatctttgctttcttcatgttgactggtatcggctcaacactcctcctccccgagaccaagaacaggactctcgaagatttatcaaacgaaaaccaagaaggcttcgtgcggggaacgtcgaacaagacagcagttatcactgatgcttga

SEQ ID NO: 91882 - protein, 551 aa, Pholiota nameko
MASYQEKSSDRDSHEKVVPANSGYVLGERRRAALAEVDNAKFSWFHAKVCIVAGVGFFTDAYDIFAINIASTMLGYVYGSGKPGALKALNKQQDLGVKVATPVGTLVGQLLFGWLADLLGRKKMYGVELMIIIIATFAQALSENAPAVHIIGVLVVWRFIMGVGIGGDYPLSAVISSEFASTKIRGRMMTAVFASQGWGNFTAALVGFIITAAYKSSILKEASITNLHSVDVMWRLLIGLGAVPGVVALYFRLTIPETPRFTMDIERNIDQAATDIQAVLAGRKSHVDDDAFIQRIEAPKASWADFREHFGKFENFKILFGTAYSWFALDIAFYGLGLNSGIILQAIGFGNPTSTGTQAIYDNLKNICVGNLILSAAGLIPGYWVSFLFIDKWGRKPIQLMGFIALTILFVILGFGYDKLISTPSSKKAFVFLYCLADFFQNFGPNTTTFVIPGEIFPTRYRSTAHGISAASGKLGAIVAQVGFSQLKDIGGPSAWVKHILEIFAFFMLTGIGSTLLLPETKNRTLEDLSNENQEGFVRGTSNKTAVITDA

SEQ ID NO: 91883 - DNA, 1632 bp, Lupinus albus
  CDS (1)..(1632)
atggctagggagcatattcatgtgctaaatgcacttgatgtggcaaaaacacaatggtaccatttcactgcaattatcattgcaggaatgggtttcttcactgatgcatatgacctgttctgcatatctcttgttacaaaattgctgggccgaatttactaccacgttgatggcgcagggaagcctggtacattgcctccaaatgtatcagctgctgtaaatggtgtagccttctgtggaacactttctggtcagcttttcttcggttggctcggtgataagatgggccgaaaaaaagtgtatggcatgaccctgatgattatggttatttgctcaattggttcaggcctttcttttggacatagtccaaattctgtgttggcaactctttgctttttcaggttctggcttggatttggtattggtggagattatcctctttctgctaccataatgtctgagtattctaataagaagactcgcggctcgttcattgctgcggtctttgctatgcaaggttttggaattttgggaggtgggatattcgcaattataatttcggctgcgtttaaggccaggtttgatgctccagcttatgaggttgatccagttggttcaactgttccacaagcagattatatttggaggataattgttatggtaggagcacttccagcagcattgacttactattggcgaatgaagatgcctgaaactgcacgttacacagcgcttgttgcaaagaatgcacaacaagccgcagcagatatgtctaaggttctacaagtcgagattcaatctgaaacaaataaagaagaggcgcagggaaaaccatcatttggcttgttctccaaggaattccttcgacgccatggactacatttacttggcactgcaggcacatggttcttgcttgatattgcattctacagtcagaatctattccaaaaagatattttcagcgcaataggttggatccctcctgccaaaacaatgaatgctcttgatgaagtttatcgaattgcgagggcgcaaacgcttatcgctctttgcagtacagttccaggatactggttcacagttgccttaattgacaggattggaaggtttgctatacaattgatgggattcttcttcatgacagtcttcatgttcgctctcgccattccttatgatcactggactcataaggataaccgaatcggctttgtggtcatttattcactaaccttcttcttcgcgaattttgggcctaatgctacaacatttgttgtccctgcagagattttccctgccagattccggtccacttgccacggaatatcatcagcatccggtaagcttggggctatagttggtgcattcggattcttgtacttggcacagaacaaggacaagagtaaaacagatgcagggtaccctgcaggtattggtgtgaagaattcactgattgtgttaggtgtagttaatattttaggcttctgctttactttcttggtgcctgagccaaatggaaaatctttggaagagatgtctggtgagaatgaagaggaagaaccaaccaaggaaggttcatacaacaacaacaacaacaacaacaacaacaacaacagaactgttccatatgtttag

SEQ ID NO: 91884 - protein, 543 aa, Lupinus albus
MAREHIHVLNALDVAKTQWYHFTAIIIAGMGFFTDAYDLFCISLVTKLLGRIYYHVDGAGKPGTLPPNVSAAVNGVAFCGTLSGQLFFGWLGDKMGRKKVYGMTLMIMVICSIGSGLSFGHSPNSVLATLCFFRFWLGFGIGGDYPLSATIMSEYSNKKTRGSFIAAVFAMQGFGILGGGIFAIIISAAFKARFDAPAYEVDPVGSTVPQADYIWRIIVMVGALPAALTYYWRMKMPETARYTALVAKNAQQAAADMSKVLQVEIQSETNKEEAQGKPSFGLFSKEFLRRHGLHLLGTAGTWFLLDIAFYSQNLFQKDIFSAIGWIPPAKTMNALDEVYRIARAQTLIALCSTVPGYWFTVALIDRIGRFAIQLMGFFFMTVFMFALAIPYDHWTHKDNRIGFVVIYSLTFFFANFGPNATTFVVPAEIFPARFRSTCHGISSASGKLGAIVGAFGFLYLAQNKDKSKTDAGYPAGIGVKNSLIVLGVVNILGFCFTFLVPEPNGKSLEEMSGENEEEEPTKEGSYNNNNNNNNNNNRTVPYV

SEQ ID NO: 91885 - DNA, 1968 bp, Lupinus albus
  CDS (142)..(1764)
acacaaaaaaacacttctacattgttcttcaatatctctttcttttcttcatctcatcataaatcataaccttctcttctactattttcagtgaagggaaagaatttgtaaagagtgaaaaagtaattttggcttcaagtaatggctagggagcatattcatgtgctaaatgcacttgatgtggcaaaaacacaatggtaccattcactgcaaattatcattgcaggaatgggtttcttcactgatgcatatgacctgttctgcatatctcttgttacaaaattgctgggccgaatttactaccacgttgatggcgcagggaagcctggtacattgcctccaaatgtatcagctgctgtaaatggtgtagccttctgtggaacactttctggtcagcttttcttcggttggctcggtgataagatgggccgaaaaaaagtgtatggcatgaccctgatgattatggttatttgctcaattggttcaggcctttcttttggacatagtccaaattctgtgttggcaactctttgctttttcaggttctggcttggatttggtattggtggagattatcctctttctgctaccataatgtctgagtattctaataagaagactcgcggctcgttcattgctgcggtctttgctatgcaaggttttggaattttgggaggtgggatattcgcaattataatttcggctgcgtttaaggccaggtttgatgctccagcttatgaggttgatccagttggttcaactgttccacaagcagattatatttggaggataattgttatggtaggagcacttccagcagcattgacttactattggcgaatgaagatgcctgaaactgcacgttacacagcgcttgttgcaaagaatgcacaacaagccgcagcagatatgtctaaggttctacaagtcgagattcaatctgaaacaaataaagaagaggcgcagggaaaaccatcatttggcttgttctccaaggaattccttcgacgccatggactacatttacttggcactgcaagcacatggttcttgcttgatattgcattctacagtcagaatctattccaaaaagatattttcagcgcaataggttggatccctcctgccaaaacaatgaatgctcttgatgaagtttatcgaattgcgagggcgcaaacgcttatcgctctttgcagtacagttccaggatactggttcacagttgccttaattgacaggattggaaggtttgctatacaattgatgggattcttcttcatgacagtcttcatgttcgctctcgccattccttatgatcactggactcataaggataaccgaatcggctttgtggtcatttattcactaaccttcttcttcgcgaattttgggcctaatgctacaacatttgttgtccctgcagagattttccctgccagattccggtccacttgccacggaatatcatcagcatccggtaagcttggggctatagttggtgcattcggattcttgtacttggcacagaacaaggacaagagtaaaacagatgcagggtaccctgcaggtattggtgtgaagaattcactgattgtgttaggtgtagttaatattttaggcttctgctttactttcttggtgcctgagccaaatggaaaatctttggaagagatgtctggtgagaatgaagaggaagaaccaaccaaggaaggttcatacaacaacaacaacaacaacaacaacagaactgttccatatgtttaggtcttatgttagtgtccatctatagtgttaattagtagaataaaacagtgcctttaggtgagaacaaaacctttcccttcccttctaaactcttcatgtttaaccttgcctactcattttgtaacaggaactgttagttctatggatagtggaaaattttatagagatttctcatcatgtgtaaccaaaaaaaaaaaaaaaaaa

SEQ ID NO: 91886 - protein, 540 aa, Lupinus albus
MAREHIHVLNALDVAKTQWYHSLQIIIAGMGFFTDAYDLFCISLVTKLLGRIYYHVDGAGKPGTLPPNVSAAVNGVAFCGTLSGQLFFGWLGDKMGRKKVYGMTLMIMVICSIGSGLSFGHSPNSVLATLCFFRFWLGFGIGGDYPLSATIMSEYSNKKTRGSFIAAVFAMQGFGILGGGIFAIIISAAFKARFDAPAYEVDPVGSTVPQADYIWRIIVMVGALPAALTYYWRMKMPETARYTALVAKNAQQAAADMSKVLQVEIQSETNKEEAQGKPSFGLFSKEFLRRHGLHLLGTASTWFLLDIAFYSQNLFQKDIFSAIGWIPPAKTMNALDEVYRIARAQTLIALCSTVPGYWFTVALIDRIGRFAIQLMGFFFMTVFMFALAIPYDHWTHKDNRIGFVVIYSLTFFFANFGPNATTFVVPAEIFPARFRSTCHGISSASGKLGAIVGAFGFLYLAQNKDKSKTDAGYPAGIGVKNSLIVLGVVNILGFCFTFLVPEPNGKSLEEMSGENEEEEPTKEGSYNNNNNNNNRTVPYV

SEQ ID NO: 91887 - DNA, 1623 bp, Sesbania rostrata
  CDS (1)..(1623)
atggctggaggtggaggacaactaggagtgcttaatgcactcgatgtggccaagacacaatggtaccacttcactgcaattgtgattgctggaatgggtttcttcacagatgcctatgatcttttttgcatttcccttgtcaccaagttgctgggacggatatattacacagattataacaaaccaaagcctggtgttcttcctcctaatgtgcaagctgctgtgactggtgttgcactatgtggcactttagctggccagcttttctttggttggcttggtgacaagttgggaagaaaaaaggtttatgggataacacttatgctcatggtagtgtgttccattgcctcggggctatcttttgggtcaagtgcaaagggtgtcatggccacactttgtttcttcaggttttggcttggatttgggattggtggtgattaccctctttcagctacaatcatgtctgaatatgccaacaaaaagacacgaggggcatttattgctgcagtgtttgctatgcaaggatttggaatcatggctggtggaattgttgccttgattgtctcatctgcatttgaccacaaatacaaggttcctgcttatcaagaagatgcaaaagcatcaatggtgttacctgcctttgattatgtttggcgtatcattttgatgtttggtgcagttccagctgctcttacctactactggcgtatgaaaatgccagagacagctcgttacacagcccttgttgcaaagaatgcaaaacaagctgcttcagacatgtctaaggtgttacaagttgaaattgaagctgaagaggacaaggtgcagcacttgattgagagtcaaaaccaaacatttggtttgttcagcaaggaatttgctaaacgccacgggctgcacttggtaggaaccacaactacttggttcttattggacattgccttctatagtcagaaccttttccaaaaggacattttcactgccattggatggatccctcctgcaaaagaaatgaatgcaatccatgaggtttataggattgcaagagcacaaacacttatagcattgtgcagtactgtgccagggtactggtttacagtggccttcattgattacatgggccgtttcgccatccaattgatgggtttcttcttcatgactgtcttcatgtttgccctggctataccttatcatcactggaccttgaaggaaaacagaattgggtttgttgtgatgtactccctcaccttcttcttcgccaattttggtccaaatgccaccacatttgttgtgccagcagagattttcccagcaaggctaagatctacttgtcatggaatctcagctgctgcaggaaaagcaggagcaattgttggtgcatttggattcttatatgctgcacaaagtacggaccctgccaagactgatgcaggctacccaactggtattggggttaagaactctctcattatgcttggtgtgatcaacttctttggaattatattcaccttgttagtaccagaatcaaagggaaaatcactggaagagctgagtggggagactgaagaagatggtgttgaggctatagaggcagcagcgtcttctaggacagtaccagtttaa

SEQ ID NO: 91888 - protein, 540 aa, Sesbania rostrata
MAGGGGQLGVLNALDVAKTQWYHFTAIVIAGMGFFTDAYDLFCISLVTKLLGRIYYTDYNKPKPGVLPPNVQAAVTGVALCGTLAGQLFFGWLGDKLGRKKVYGITLMLMVVCSIASGLSFGSSAKGVMATLCFFRFWLGFGIGGDYPLSATIMSEYANKKTRGAFIAAVFAMQGFGIMAGGIVALIVSSAFDHKYKVPAYQEDAKASMVLPAFDYVWRIILMFGAVPAALTYYWRMKMPETARYTALVAKNAKQAASDMSKVLQVEIEAEEDKVQHLIESQNQTFGLFSKEFAKRHGLHLVGTTTTWFLLDIAFYSQNLFQKDIFTAIGWIPPAKEMNAIHEVYRIARAQTLIALCSTVPGYWFTVAFIDYMGRFAIQLMGFFFMTVFMFALAIPYHHWTLKENRIGFVVMYSLTFFFANFGPNATTFVVPAEIFPARLRSTCHGISAAAGKAGAIVGAFGFLYAAQSTDPAKTDAGYPTGIGVKNSLIMLGVINFFGIIFTLLVPESKGKSLEELSGETEEDGVEAIEAAASSRTVPV

SEQ ID NO: 91889 - DNA, 1611 bp, Sesbania rostrata
  CDS (1)..(1611)
atggctggagaactgggagtgctgaatgcactcgacgttgccaagacacaatggtaccattttactgcaattgtgatagctggaatgggtttctttactgatgcctatgatctcttctgcatttcccttgtcaccaagttgctggggaggatatattacagtgatccaaaagcaccaaagcctggaactcttcctcctaatgttcaagctgctgtgactggtgttgccctttgtgggacattagcaggccaactattctttggttggcttggtgacaagttgggaagaaaaaaggtctatggaataactcttattctcatggttgtatgttccttggcttcagggctctcttttggatcaagtgcaaagggtgtcatggccacactatgtttcttcaggttctggcttggttttgggattggtggcgactaccctctttctgctacaatcatgtctgaatatgctaacaaaaagactcgaggggcattcatagctgcagtgtttgctatgcaaggttttggaatcatggctggtggaatagttgccttgattgtctctgctggatttgaccacaaatacaaggttcctagctatcaagaaaatcctcaagcatccttggttctgcctcaatttgattatgtttggcgtattgttttaatgtttggtgcactcccagcagcacttacctactactggcgtatgaaaatgccagagacagctcgttacacagctcttgttgccaagaacgcccaacaagctgctacagacatgtccaaggtgttgaaagttgaacttgaagttgaagaggaaaaggtacagaaaattacagaggctgataccaataagtatggtttattcagcaaggaatttgctaaacgccacggcctgcatttggtgggaaccaccaccacttggttcttgttggacatagcattctatagtcagaaccttttccagaaggacattttcagtgcaattggatggatccctcctgcaaaggaaatgaatgcaatccatgaagtttataagattgcaagagcacaaacactgatagcactatgcagtactgtgccaggttactggttcacagtagcatttatagattacatgggccgttttgctatccaattgatgggtttcttcttcatgactgtcttcatgtttgctctagccataccatatgaccattggaccaagaaagaaaacagaattgggtttgttgtgatgtactcactcaccttcttctttgccaattttggcccaaatgctaccacatttgttgtcccagcagagatattcccagcaaggctaaggtctacttgtcatggaatctcagctgctgcaggaaaagcaggggcaattgtgggtgcatttggattcttatatgctgcacagagtaaggaccccaccaagactgataaagggtacccaactggtattgggattaagaactctcttattatgcttggtgtgatcaactttgctggtatgttattcaccttactggttccagaatcaaagggaaaatcactagaggaattgagtggggaaaatgaagatggtgctgaagggattgagctaccagcatctgctaggacagttccagtttga

SEQ ID NO: 91890 - protein, 536 aa, Sesbania rostrata
MAGELGVLNALDVAKTQWYHFTAIVIAGMGFFTDAYDLFCISLVTKLLGRIYYSDPKAPKPGTLPPNVQAAVTGVALCGTLAGQLFFGWLGDKLGRKKVYGITLILMVVCSLASGLSFGSSAKGVMATLCFFRFWLGFGIGGDYPLSATIMSEYANKKTRGAFIAAVFAMQGFGIMAGGIVALIVSAGFDHKYKVPSYQENPQASLVLPQFDYVWRIVLMFGALPAALTYYWRMKMPETARYTALVAKNAQQAATDMSKVLKVELEVEEEKVQKITEADTNKYGLFSKEFAKRHGLHLVGTTTTWFLLDIAFYSQNLFQKDIFSAIGWIPPAKEMNAIHEVYKIARAQTLIALCSTVPGYWFTVAFIDYMGRFAIQLMGFFFMTVFMFALAIPYDHWTKKENRIGFVVMYSLTFFFANFGPNATTFVVPAEIFPARLRSTCHGISAAAGKAGAIVGAFGFLYAAQSKDPTKTDKGYPTGIGIKNSLIMLGVINFAGMLFTLLVPESKGKSLEELSGENEDGAEGIELPASARTVPV

SEQ ID NO: 91891 - DNA, 1572 bp, Nicotiana tabacum
  CDS (1)..(1572)
atgtctgcagataacaatctacaagtgcttaatgctcttgatgtggccaagactcaactctaccatttcaccacaattgttattgctggaatgggattttttactgatgcctatgatctcttcagcatttcacttgtaaccaaattacttgggcgtttatactacaccaagtcggatttattgaagcccggaacactccctccaaccgtctcagcatcggtcacgggtgtcgccttggtcggcaccctagccggccagcttttcttcggctggctcggtgacaagatgggccgaaagacggtctatggtatgactttgattatcatggttttgtgttccgttgcatcggggctctcctttgggagtactcctaagggtgttatggccactctctgtttcttcaggttttggcttggatttggcatcggtggcgattaccctttatccgccacgattatgtccgaatacgcaaacaaaaaaacccgtggcgccttcattgctgctgtcttcgctatgcaaggttttggaattttgttcagtgggataattgcacttattgtgtcagctggatttgatcatgcttataatgtcccaagtttccaagaaaatgcagctctttccaccgtgccacaagccgactacatttggcgtataattctcatgttcggagcattaccagctttcctcacttactactggcgcatgaagatgcccgaaacagcccgatacacagctctcgtggcgaaagacgcaaaaagagccgcacaggacatggggagggtactacaagttgaaattgatcccgaggatgcaaaaatcgaacaaatgtctagggacgaaaccaataaatttggtctattttcttgggaattcgtttgtcgccacgggttgcacctattcggcacatgttccacatggtttttgttggacattgctttctatagccagaatcttttccagaaagatgtgttcagtgcagttggatggatcccagcggccaaaaccatgaatgccgttcaagaagtttacaagattgcaagagcacaaaccttgattgcactacttagtacagtgccagggtactggttcaccgtggcgttcatcgatatcgttggaaggttcgcgatccaattgatgggattcttcttcatgactgtattcatgttcgccatcgccattccctacgaacattggacaaagaaggacaaccatattgggttcgttgcaatgtacgccctcacattcttcttcgcgaactttgggccaaatgcaaccacattcgtggtcccggctgagattttcccggccagacttcgatcaacatgtcatggtatttctgcagctgcaggtaaagccggagctatagtaggagcgtacgggttcctctacgctgcacaaagtaaagatccaacaaaaaccgatgcaggatacccagcgggtattggcataaagaactcgctccttgccctaggggccattaatgctctgggaatggtttgtaccttctgtgtgccagagtccaaaggaaaatctctggaggaagcatcacaggaaactataactgaagaatga

SEQ ID NO: 91892 - protein, 523 aa, Nicotiana tabacum
MSADNNLQVLNALDVAKTQLYHFTTIVIAGMGFFTDAYDLFSISLVTKLLGRLYYTKSDLLKPGTLPPTVSASVTGVALVGTLAGQLFFGWLGDKMGRKTVYGMTLIIMVLCSVASGLSFGSTPKGVMATLCFFRFWLGFGIGGDYPLSATIMSEYANKKTRGAFIAAVFAMQGFGILFSGIIALIVSAGFDHAYNVPSFQENAALSTVPQADYIWRIILMFGALPAFLTYYWRMKMPETARYTALVAKDAKRAAQDMGRVLQVEIDPEDAKIEQMSRDETNKFGLFSWEFVCRHGLHLFGTCSTWFLLDIAFYSQNLFQKDVFSAVGWIPAAKTMNAVQEVYKIARAQTLIALLSTVPGYWFTVAFIDIVGRFAIQLMGFFFMTVFMFAIAIPYEHWTKKDNHIGFVAMYALTFFFANFGPNATTFVVPAEIFPARLRSTCHGISAAAGKAGAIVGAYGFLYAAQSKDPTKTDAGYPAGIGIKNSLLALGAINALGMVCTFCVPESKGKSLEEASQETITEE

SEQ ID NO: 91893 - DNA, 2070 bp, Nicotiana tabacum
  CDS (228)..(1841)
ccgctgatacagagaagctaattaataaatgcaaaaatcagagtttttatttttggctttttgttaagcctttgaacgtaaaattttattggaaattttcttcattgaaatttccaagcttttagctttctgcttctctgctgttcttgattctgttgcactctgtggaattgaaaatttcgtggagaaaatcatttaaggaatttaagggttgagaaagtatagtcatggctaaagatcaattgcaagtgctaaatgcactagatgtagcaaaaacacaattgtatcactttacagcaattgttattgctggtatgggcttctttactgatgcttatgatcttttctgcatttctttggtcacaaaattgcttggccggatttactaccaccacgacggggcaccgaaacctggaactctccctcctaatgtctcggctgctgtaaatggagtcgcattctgtgggacccttgctggacaactgtttttcgggtggctcggagataagatgggaagaaaaagagtttatggaatgactcttatgatgatggttatttgttcaatagcctcaggactctcttttggtcatacaccaaaaagtgttatgactacactttgtttcttcaggttttggttaggctttggcattggtggtgattatcctctttctgctactatcatgtccgagtatgctaacaaaaagacgcgtggcgcgttcattgctgctgtttttgcaatgcaaggttttggaattttggctggtggaatggtagcaatcattgtttctgctgcatttaagggcgcgtttcctgcacaaacatatcagactgaccctcttggttcaacaatctctcaggctgatttcgtgtggcgcataattctaatgtttggtgcaatcccagctgcaatgacttattactggcgtatgaagatgcctgaaactgctcgttatactgcattggtggccaagaacttaaaacaggcagctaacgacatgtctaaagtgttgcaagtcgatattgaagaagagcaagagaaagttgagaatgtttctcaaaacactaggaatgagtttggtttgttttctaaggagttcctccgtcgccatggacttcacttgcttggaactgctagtacatggttcttgttggacattgctttctacagtcaaaaccttttccaaaaggacattttcagcgcaattggatggattcctccagcgcaaaccatgaatgcgttggaggaagtttacaaaattgcaagggcgcaaactcttatcgccctttgcagtactgttcctggttactggttcacagtattcttcatcgacaaaataggtcgatttgcatttcagttaatgggattcttcttcatgacagtattcatgtttgccttagccattccatatcatcattggactctaaaggataacagaatcgggttcgtgatcatgtactcacttacctttttcttcgcgaattttggtccaaacgccacaacatttgttgtccccgcggagattttcccagccaggcttaggtcaacatgccatggaatatcagcagcagctggaaaagcaggagcaatgattggtgcattcggattcttgtacgctgctcagccaacagatcgaaaaaaggctgatgccggttaccctgctggaattggtgtgagaaattcactgattgtcttaggttgtgttaacttcttaggaatggtgttcacatttttggtgccagaatccaaaggaaaatcattggaagaaatgtcaagggaaaatgaaggggaagaggaaagtggaacagaaatgaagaatagtggaaggacagttcctgtttaattttggaccttttaacatatactatatatatgatgcatgtttgtgaatttgtgttttttggagcttaagatgaaatatgctctctactttttgcttgtttctggtggtaattatatgggaaagtgggaagagaaatgaggtccttttgttgtctatttctatcttttgaaaaaaaattaacattataagaatgaagagaatattttcaattaaaaaaaaaaaaaaaaaa

SEQ ID NO: 91894 - protein, 537 aa, Nicotiana tabacum
MAKDQLQVLNALDVAKTQLYHFTAIVIAGMGFFTDAYDLFCISLVTKLLGRIYYHHDGAPKPGTLPPNVSAAVNGVAFCGTLAGQLFFGWLGDKMGRKRVYGMTLMMMVICSIASGLSFGHTPKSVMTTLCFFRFWLGFGIGGDYPLSATIMSEYANKKTRGAFIAAVFAMQGFGILAGGMVAIIVSAAFKGAFPAQTYQTDPLGSTISQADFVWRIILMFGAIPAAMTYYWRMKMPETARYTALVAKNLKQAANDMSKVLQVDIEEEQEKVENVSQNTRNEFGLFSKEFLRRHGLHLLGTASTWFLLDIAFYSQNLFQKDIFSAIGWIPPAQTMNALEEVYKIARAQTLIALCSTVPGYWFTVFFIDKIGRFAFQLMGFFFMTVFMFALAIPYHHWTLKDNRIGFVIMYSLTFFFANFGPNATTFVVPAEIFPARLRSTCHGISAAAGKAGAMIGAFGFLYAAQPTDRKKADAGYPAGIGVRNSLIVLGCVNFLGMVFTFLVPESKGKSLEEMSRENEGEEESGTEMKNSGRTVPV

SEQ ID NO: 91895 - DNA, 1614 bp, Nicotiana tabacum
  CDS (1)..(1614)
atggctaaagatcaattgcaagtgctaaatgcactagatgtagcaaaaacacaattgtatcactttacagcaattgttattgctggtatgggcttctttactgatgcttatgatcttttctgcatttctttggtcacaaaattgcttggccggatttactaccaccacgacggggcaccgaaacctggaactctccctcctaatgtctcggctgctgtaaatggagtcgcattctgtgggacccttgctggacaactgtttttcgggtggctcggagataagatgggaagaaaaagagtttatggaatgactcttatgatgatggttatttgttcaatagcctcaggactctcttttggtcatacaccaaaaagtgttatgactacactttgtttcttcaggttttggttaggctttggcattggtggtgattatcctctttctgctactatcatgtccgagtatgctaacaaaaagacgcgtggcgcgttcattgctgctgtttttgcaatgcaaggttttggaattttggctggtggaatggtagcaatcattgtttctgctgcatttaagggcgcgtttcctgcacaaacatatcagactgaccctcttggttcaacagtctctcaggctgatttcgtgtggcgcataattctaatgtttggtgcaatcccagctgcaatgacttattactggcgtatgaagatgcctgaaactgctcgttatactgcattggtggccaagaacttaaaacaggcagctaacgacatgtctaaagtgttgcaagtcgatattgaagaagagcaagagaaagttgagaatgtttctcaaaacactaggaatgagtttggtttgttttctaaggagttcctccgtcgccatggacttcacttgcttggaactgctagtacatggttcttgttggacattgctttctacagtcaaaaccttttccaaaaggacattttcagcgcaattggatggattcctccagcgcaaaccatgaatgcgttggaggaagtttacaaaattgcaagggcgcaaactcttatcgccctttgcagtactgttcctggttactggttcacagtattcttcatcgacaaaataggtcgatttgcaattcagttaatgggattcttcttcatgacagtattcatgtttgccttagccattccatatcatcattggactctaaaggataacagaatcgggttcgtgatcatgtactcacttacctttttcttcgcgaattttggtccaaacgccacaacatttgttgtccccgcggagattttcccagccaggcttaggtcaacatgccatggaatatcagcagcagctggaaaagcaggagcaatgattggtgcattcggattcttgtacgctgctcagccaacagatcgaaaaaaggctgatgccggttaccctgctggaattggtgtgagaaattcactgattgtcttaggttgtgttaacttcttaggaatggtgttcacatttttggtgccagaatccaaaggaaaatcattggaagaaatgtcaagggaaaatgaaggggaagaggaaagtggaacagaaatgaagaatagtggaaggacagttcctgtttaa

SEQ ID NO: 91896 - protein, 537 aa, Nicotiana tabacum
MAKDQLQVLNALDVAKTQLYHFTAIVIAGMGFFTDAYDLFCISLVTKLLGRIYYHHDGAPKPGTLPPNVSAAVNGVAFCGTLAGQLFFGWLGDKMGRKRVYGMTLMMMVICSIASGLSFGHTPKSVMTTLCFFRFWLGFGIGGDYPLSATIMSEYANKKTRGAFIAAVFAMQGFGILAGGMVAIIVSAAFKGAFPAQTYQTDPLGSTVSQADFVWRIILMFGAIPAAMTYYWRMKMPETARYTALVAKNLKQAANDMSKVLQVDIEEEQEKVENVSQNTRNEFGLFSKEFLRRHGLHLLGTASTWFLLDIAFYSQNLFQKDIFSAIGWIPPAQTMNALEEVYKIARAQTLIALCSTVPGYWFTVFFIDKIGRFAIQLMGFFFMTVFMFALAIPYHHWTLKDNRIGFVIMYSLTFFFANFGPNATTFVVPAEIFPARLRSTCHGISAAAGKAGAMIGAFGFLYAAQPTDRKKADAGYPAGIGVRNSLIVLGCVNFLGMVFTFLVPESKGKSLEEMSRENEGEEESGTEMKNSGRTVPV

SEQ ID NO: 91897 - DNA, 1611 bp, Nicotiana tabacum
  CDS (1)..(1611)
atggctaaagatttgcaagtgctaaatgcactagatgtagcaaaaacacaattgtatcactttacagcaattgtgattgctggtatgggcttctttactgatgcttatgatcttttctgcatttctttagtcacaaaattgcttggccgcatttactaccaccgcgacggggcattgaaacctggatctctgcctcctaacgtctcggctgctgttaatggagtcgccttctgtgggacccttgctggacaactgtttttcgggtggctcggagataaaatgggaagaaaaaaggtttatggaatgactcttatgatgatggttatttgttcaatagcctcagggctttcttttggtcatacaccaaaaggtgttatgactacactttgtttcttcaggttttggttaggatttggcattggtggtgattatcctctttctgctactattatgtccgagtatgctaataaaaagacgcgtggagcgttcattgctgctgtttttgcaatgcaaggttttggaattctggctggtggaatggtagcaatcattgtttctgctgcatttaagggcgcgtttcctgcaccaacatatcatgccgacgctcttgcttcaactgtctctcaggctgatttcgtgtggcgtataattcttatgtttggtgcaatcccagctgcaatgacttattactggcgtatgaagatgcctgaaactgcccgttacactgcattggtggccaagaacttaaaacaggcagctaacgacatgtctaaagtgttacaagtcgaaattgaagaagagcaagagaaagttgagaatgtttctcaaaacactgggaatgagtttggtttgttttctaaggagttcctccgacgccacggacttcacttgctcggaactgctagcacatggttcttgttggacattgctttctatagtcaaaaccttttccaaaaggacattttcagcgccattggttggattcctccagcggaaaccatgaatgcgttggaggaagtttacagaattgcaagggcgcaaactcttatcgccctttgcagtactgttcctggttactggttcacagtattcttcatcgacagaataggtcgatttgcaattcagttaatgggattcttcttcatgacagtcttcatgtttgccttagccattccttatcatcattggactctcaaggataacagaatagggttcgtgatcatgtactcactcacctttttcttcgcgaattttggtccaaatgcgacaacatttgttgtccccgcggagattttcccagccaggcttaggtcaacatgccatggaatatcagcagcagctggaaaagcaggagcgatgattggtgcattcggattcttgtatgctgctcaaccaacagatccaaaaaaggttgatgccggttaccctgctggaattggtgtgagaaattcactgattgtcttaggttgtgttaacttcttgggaatggtgttcacatttttggtgccagaatctaaaggaaaatcattggaagaaatgtcaagggaaaatgaaggggaagaggaaagtggaacagaaatgaagaatagtggaaggacagttcctgtttaa

SEQ ID NO: 91898 - protein, 536 aa, Nicotiana tabacum
MAKDLQVLNALDVAKTQLYHFTAIVIAGMGFFTDAYDLFCISLVTKLLGRIYYHRDGALKPGSLPPNVSAAVNGVAFCGTLAGQLFFGWLGDKMGRKKVYGMTLMMMVICSIASGLSFGHTPKGVMTTLCFFRFWLGFGIGGDYPLSATIMSEYANKKTRGAFIAAVFAMQGFGILAGGMVAIIVSAAFKGAFPAPTYHADALASTVSQADFVWRIILMFGAIPAAMTYYWRMKMPETARYTALVAKNLKQAANDMSKVLQVEIEEEQEKVENVSQNTGNEFGLFSKEFLRRHGLHLLGTASTWFLLDIAFYSQNLFQKDIFSAIGWIPPAETMNALEEVYRIARAQTLIALCSTVPGYWFTVFFIDRIGRFAIQLMGFFFMTVFMFALAIPYHHWTLKDNRIGFVIMYSLTFFFANFGPNATTFVVPAEIFPARLRSTCHGISAAAGKAGAMIGAFGFLYAAQPTDPKKVDAGYPAGIGVRNSLIVLGCVNFLGMVFTFLVPESKGKSLEEMSRENEGEEESGTEMKNSGRTVPV

SEQ ID NO: 91899 - DNA, 1605 bp, Arabidopsis thaliana
  CDS (1)..(1605)
atggcaagggaacaattacaagtgttgaatgcacttgacgtggccaagacgcaatggtaccatttcacggcgatcataatcgccggaatgggattcttcactgatgcttacgatctcttttgcatctctctcgtaacgaagctcctcggtcgtatttattaccacgtggaaggcgcacaaaagcctgggactctccctcccaacgtcgcagccgccgtcaatggcgttgccttctgtgggactctcgccggtcagctctttttcgggtggcttggtgataagctcgggaggaagaaagtttacggtatgacgttgatggtcatggtcctttgttcaatagcctctggtctctctttcggacatgagccaaaagctgtgatggccacgctctgtttttttcggttttggcttggatttggcatcggtggtgactaccctttatccgcaaccatcatgtctgaatatgcgaacaagaagactcgcggagcctttgtctctgcggtttttgctatgcaagggttcggaatcatggctggtggtattttcgctattataatttcctctgcttttgaagctaagtttccatccccggcctatgcggatgatgccttgggatccacgattcctcaagctgatttggtatggcggataatcctgatggctggtgctatccctgcggctatgacgtattactcaaggtcgaagatgcctgagaccgcaaggtacacggctttggttgctaaggacgcaaagcaggcagcttcggacatgtctaaggttctgcaagtggagatagagccagaacaacagaaattggaagagatctcaaaggagaagtccaaggcctttggattgttctcaaaggaattcatgagtcgccatgggcttcatttgctaggcactacatcgacatggttccttctcgacattgctttctacagtcaaaaccttttccaaaaggatattttcagcgcgatcggatggattcctcccgcgcaaagcatgaacgcaattcaagaggttttcaagattgcccgtgcgcaaacgctaatcgccttgtgtagcacggtacctggttactggttcacagttgcgttcatcgacgtcattggaagatttgcgattcagatgatgggtttctttttcatgacggtctttatgtttgctctggctattccttacaaccactggactcacaaggagaaccgaatcggatttgttatcatgtactcgttaacattctttttcgccaactttggacccaatgctacaaccttcgttgtgccggccgaaatcttcccagccaggttcagatcaacctgccacggtatctctgcagcatcaggaaaattaggagcaatggttggtgcgttcgggttcttgtacttggctcagaacccagacaaggacaagaccgacgcaggataccctccagggattggggtcaggaactcgcttattgtgttgggtgtagttaacttcttaggtatcctcttcactttcttggtacctgaatctaaaggtaagtcactcgaggaaatgtccggtgaaaatgaagacaatgagaatagcaacaatgatagtagaacggtcccaatagtttag

SEQ ID NO: 91900 - protein, 534 aa, Arabidopsis thaliana
MAREQLQVLNALDVAKTQWYHFTAIIIAGMGFFTDAYDLFCISLVTKLLGRIYYHVEGAQKPGTLPPNVAAAVNGVAFCGTLAGQLFFGWLGDKLGRKKVYGMTLMVMVLCSIASGLSFGHEPKAVMATLCFFRFWLGFGIGGDYPLSATIMSEYANKKTRGAFVSAVFAMQGFGIMAGGIFAIIISSAFEAKFPSPAYADDALGSTIPQADLVWRIILMAGAIPAAMTYYSRSKMPETARYTALVAKDAKQAASDMSKVLQVEIEPEQQKLEEISKEKSKAFGLFSKEFMSRHGLHLLGTTSTWFLLDIAFYSQNLFQKDIFSAIGWIPPAQSMNAIQEVFKIARAQTLIALCSTVPGYWFTVAFIDVIGRFAIQMMGFFFMTVFMFALAIPYNHWTHKENRIGFVIMYSLTFFFANFGPNATTFVVPAEIFPARFRSTCHGISAASGKLGAMVGAFGFLYLAQNPDKDKTDAGYPPGIGVRNSLIVLGVVNFLGILFTFLVPESKGKSLEEMSGENEDNENSNNDSRTVPIV

SEQ ID NO: 91901 - DNA, 1608 bp, Arabidopsis thaliana
  CDS (1)..(1608)
atggcaggagatcaactaaacgtgctaaacgcactcgacgtcgccaaaacgcaatggtaccatttcacggcgattataatcgccggaatgggattcttcaccgacgcttacgaccttttttgtatctcactcgtcacaaagcttcttggccgtatttactatcacgtggacggctcagagaagccaggaacgctgccaccaaacgtctcagccgctgttaatggagtcgccttctgcggtacactcgcaggccagctcttctttggctggctcggtgacaagcttgggaggaaaaaagtttacggtatgaccctcatggtcatggttctttgttccatcgcttcgggtctatcctttgggagtaacccaaaaacagtgatgactacactatgtttcttccggttctggcttggtttcggcattggtggtgattatccgttatccgccacgattatgtctgaatacgctaataaaaagacccgtggtgcgtttatagccgccgtttttgctatgcaagggtttggaatcttgaccggggggatttttgccatcatcgtgtctgccgctttcgaggctaaatttccagctccaacctatcaaatagatgccttggcatccacggttcctcaggcggattatgtgtggcggatcatactgatggtgggtgctttgcctgcagcgatgacgtattactcaaggtccaagatgcctgagactgcccggtacacggctcttgtggccaaggacgcgaaactagcggcttcaaacatgtctaaggttttgcaagtggagatcgaagcagagcagcagggaactgaagataagtccaattcctttggcttgttttccaaggaattcatgaaacgccatggccttcatttgctaggaactacaagcacatggttcctactcgacatcgccttctacagtcagaacctattccagaaagatattttcagcgcaatcggatggatccctccggctcagacaatgaacgcaattcaagaggttttcaagattgcacgtgcacaaaccctaatcgccttgtgtagcacggtacctggttactggttcacagtggcctttattgacgtcattggtagatttgcgatacagatgatgggtttcttctttatgaccgtctttatgttcgctctcgccattccttacgaccattggactcacaaggagaacagaatcggattcgttgctatgtactctctaacattcttcttcgccaactttggacctaatgcaacaactttcgttgtgcccgctgagatcttcccggctaggtttagatcaacctgccatggaatttccgcggcttctggaaaattaggagcaatggttggtgcgtttgggttcttgtacttagcacaaagtcctgacaagaccaagacagagcatggatatcctccaggtattggagtcaagaactccctcattgttttgggtgtggttaatcttttggggatggtttttacactgttggttcctgaatctaaaggcaagtctctcgaggaaatgtccggtgagaacgaacaaaatgatgaaagcagcagcagcagcaacaacaacagtaacaacgcagtgtcaactgcatag

SEQ ID NO: 91902 - protein, 535 aa, Arabidopsis thaliana
MAGDQLNVLNALDVAKTQWYHFTAIIIAGMGFFTDAYDLFCISLVTKLLGRIYYHVDGSEKPGTLPPNVSAAVNGVAFCGTLAGQLFFGWLGDKLGRKKVYGMTLMVMVLCSIASGLSFGSNPKTVMTTLCFFRFWLGFGIGGDYPLSATIMSEYANKKTRGAFIAAVFAMQGFGILTGGIFAIIVSAAFEAKFPAPTYQIDALASTVPQADYVWRIILMVGALPAAMTYYSRSKMPETARYTALVAKDAKLAASNMSKVLQVEIEAEQQGTEDKSNSFGLFSKEFMKRHGLHLLGTTSTWFLLDIAFYSQNLFQKDIFSAIGWIPPAQTMNAIQEVFKIARAQTLIALCSTVPGYWFTVAFIDVIGRFAIQMMGFFFMTVFMFALAIPYDHWTHKENRIGFVAMYSLTFFFANFGPNATTFVVPAEIFPARFRSTCHGISAASGKLGAMVGAFGFLYLAQSPDKTKTEHGYPPGIGVKNSLIVLGVVNLLGMVFTLLVPESKGKSLEEMSGENEQNDESSSSSNNNSNNAVSTA

SEQ ID NO: 91903 - DNA, 1605 bp, Arabidopsis thaliana
  CDS (1)..(1605)
atgccgataaaggtattgtcgtcgcttgatgtagctcgaacacaatggtaccatttcaaagcgatcatagtagcgggaatgggtctattcaccgacgcatacgatcttttctgcatagcaccggtcatgaaaatgattagtcatgtttattacaacggtgactcaatcaacacagccgttctttcaacttcttacgccatcgctttactcggcacagccacgggtcaactagtcttcggttacctcggtgaccgagtcggtcgtcgccgagtctacggactttgtttgattattatgatccttagctcctttggttgtggcttttccgtgtgcaccactcgtcggtcttgtgttatggttagcctcggttttttccggttctttcttggtttaggtatcggtggtgattacccgctctcggctaccattatgtcggagtttgctaataagaggacacgtggcgcgtttatcgctgcggtgttttcgatgcaagggttggggattttggttagctctgccgtgaccatggctgtttgcgtggcgtttaagagaagtggcggtggtttggaggtggatgcggcggctccgacggaagctgacttggcctggagacttatacttatgatcggtgctcttcctgctgcattgacgttctattggcgaatgttgatgcctgaaaccgcaagatacacagcacttgtagaaaacaatatcgtccaagcagcaaaagacatgcaaagagtcatgtcaagatctcatatctccgacgaagccacgacggatccacctcctcctccgccgccaccttcctacaaactcttctcccgctgcttcttccgcctccatggtcgcgacctcttcgcagcctcctttaattggttcctagtagacattgtcttctacacaagcaacctcctcctgtcccatatcttcagtcattactccaagaaaccttccactgcagaaaacgtctacgacgcagcctttgaagtggcggaattaggagccatcatcgctgcttgctccaccattcccggttattggttcacagtttacttcatcgacaagataggtcgtgtcaaaatccagattatggggtttttcttcatggccgttatttatttagtcgctggtattccgtacagttggtattggtcaaagcacgagcataataataaaggcttcatggttctctacggtttggttttcttcttttgcaattttggtcccaacactacaacttttattattcccgcagagcatttcccggctaggtttaggtctacttgtcacgggatctctggtgccgcgggtaagcttggggctattgtgggcactgttgggttcttgtgggctaccaagaagatggaaagcgatgataaaaaccagatttatcccgaagtaaaccgtatgagaattgctttcttgattcttggtggcgtttgcattgctggaatcttggtgacgtatttcttcaccaaggaaactatgggaagatcgttagaggagaacgagcatgaccaagataacaatgctgagtctgaagatgagccacagattgttgacgggcaatcctccgtgagcactttgcttcagacacgatga

SEQ ID NO: 91904 - protein, 534 aa, Arabidopsis thaliana
MPIKVLSSLDVARTQWYHFKAIIVAGMGLFTDAYDLFCIAPVMKMISHVYYNGDSINTAVLSTSYAIALLGTATGQLVFGYLGDRVGRRRVYGLCLIIMILSSFGCGFSVCTTRRSCVMVSLGFFRFFLGLGIGGDYPLSATIMSEFANKRTRGAFIAAVFSMQGLGILVSSAVTMAVCVAFKRSGGGLEVDAAAPTEADLAWRLILMIGALPAALTFYWRMLMPETARYTALVENNIVQAAKDMQRVMSRSHISDEATTDPPPPPPPPSYKLFSRCFFRLHGRDLFAASFNWFLVDIVFYTSNLLLSHIFSHYSKKPSTAENVYDAAFEVAELGAIIAACSTIPGYWFTVYFIDKIGRVKIQIMGFFFMAVIYLVAGIPYSWYWSKHEHNNKGFMVLYGLVFFFCNFGPNTTTFIIPAEHFPARFRSTCHGISGAAGKLGAIVGTVGFLWATKKMESDDKNQIYPEVNRMRIAFLILGGVCIAGILVTYFFTKETMGRSLEENEHDQDNNAESEDEPQIVDGQSSVSTLLQTR

SEQ ID NO: 91905 - DNA, 1680 bp, Schizosaccharomyces pombe
  CDS (1)..(1680)
atgaatcgcttaaatcctttttcaaaatctcactccaaaaactccaatgaaaacaacgaagtttccttggctgatgtcgccgagtccgatactcgtcgccattggcttggtttgactaaacgagaattcaagctcatgggctttgctggtgccggtttcttcctcgattcttatgacttgttcatcattaatctcgtctcccccatttacgaatatttatactggggcggtttggagggcaaaaagcctcactacccttccggtatccatggtcttgtcaacgctgccgctaacattggaaatgtctttggtcaaatcttgtttggcttcatgggcgatttctttggtcgtaaatttgtctacggtaaagagatgatcgtcgttattattgctaccgtccttgtcatcgcccttcccaaaagtatacctactcctcttggtaaaatgatgtggatctttgcttggcgttggttgctgggtttaggaattggtggtgactatcctatgtccgcaacaatcacatcagaacgctctttgcttagtcgtcgtggtacccttctctccatcgtcttctcctttcaaggctttggtactctggccggcgccatcgtcactatcatcctcttggcctgctttgagaagcctctcaaccaacgtggcgagtacactaagcttgaaggtgtatggcgtcttcaaatgggtttggctttggttcctgccctcctcgttttgattccacgtctcactatgaaggaatccaagtcctatgaacagtcgaaagctctcaacaagtataccgacaacgatacctacattgctgacgacgacgaaccgaagaaagataaccaaaacgttgttgaagaaaagcaaattaatttgaccacctcctcggactctcaccctacttctacagaggattttggagataaacgtgcatccactgttccaacttctgagaataccagtggatttatcgaatatttcagtcaatggcaccatttcaagcatctcttggctactgccgtgtcctggttcctactcgatattgccttttacggtgttaatctcaatcaatccgtcattttaaaggccattggctttagttcgggaaagaatgagtatcacacacttatgcgtggtgctatcggtaatctcatcattgcaattgctggttatgttcctggttattggtttacagttttcctcgttgagaaacttggccgtaaatggatccaacttcaaggattgtttattaccggtttaatgtttgccatccttgcaggtagttgggacaccatttctacgggtggaagatttgcatgttttgtcattgcccaatttttctctaattttggacccaatgccactacttttttgtatcctgctgaagtttttcctgcacgtgttcgtggtaccgctcatggtctttctgctgctttgggtaaatgcggtgccatcttggcttctctgttgtttaacttcttaacatctgtaattggctatggcaatgtcatgtggattttctgcggctgcatgtggggagcaatctttttcactttgcttctccctgaaaccaagatgcgggatgccgatgaaattgatcgcgaagaagttttgcgcggtggtaatggtaaaactcaccagggccgctggtcttggtatttcaacggaattttctaa

SEQ ID NO: 91906 - protein, 559 aa, Schizosaccharomyces pombe
MNRLNPFSKSHSKNSNENNEVSLADVAESDTRRHWLGLTKREFKLMGFAGAGFFLDSYDLFIINLVSPIYEYLYWGGLEGKKPHYPSGIHGLVNAAANIGNVFGQILFGFMGDFFGRKFVYGKEMIVVIIATVLVIALPKSIPTPLGKMMWIFAWRWLLGLGIGGDYPMSATITSERSLLSRRGTLLSIVFSFQGFGTLAGAIVTIILLACFEKPLNQRGEYTKLEGVWRLQMGLALVPALLVLIPRLTMKESKSYEQSKALNKYTDNDTYIADDDEPKKDNQNVVEEKQINLTTSSDSHPTSTEDFGDKRASTVPTSENTSGFIEYFSQWHHFKHLLATAVSWFLLDIAFYGVNLNQSVILKAIGFSSGKNEYHTLMRGAIGNLIIAIAGYVPGYWFTVFLVEKLGRKWIQLQGLFITGLMFAILAGSWDTISTGGRFACFVIAQFFSNFGPNATTFLYPAEVFPARVRGTAHGLSAALGKCGAILASLLFNFLTSVIGYGNVMWIFCGCMWGAIFFTLLLPETKMRDADEIDREEVLRGGNGKTHQGRWSWYFNGIF

SEQ ID NO: 91907 - DNA, 1719 bp, Schizosaccharomyces pombe
  CDS (1)..(1719)
atggcatttgggagcaaaattttaaacattggatctaagtctgatgagtataacgacgatgcagtacctctcgaccaagtcgaagagggtgcgcaagagcgtcgctattacttggggttgacaaagcgcgaatttaaacttatgatgcttgcaggtgtcgggtttttccttgacagttacgatctttttatcatcaatttagttactcccatttttgaatatctttattggggtggtattgaaaaaggtcccacaggaaaaggccattatccctctggtattcgtggtcttgtaaatgcgtcagccaatattggtaacatttttggacaactgttatttggttttatgggtgatttctttggccgtaaatttgtctacggtaaagaaatggttattgttatcatcgctactgttctggttatcgctatgcctaaaagcattcattctcctctttcgaaaatgatgtgggttttctgttggcgttggttgctcggtgtaggtattggtggtgattatccaatgtctgccgctatcacttctgagcgtagtaaaattaaacgacgtggtacacttatttctttaatttttgccttccaaggtttcggaactcttgctggtgccattgttaccatcatccttttgggttgtttcgaacatccattgaatcgggaaggtcattatcataaactcgaaggtgtctggcgtcttcaatttggtcttgctttggttcctgctattggtgttcttattccccgtctcatcatgaaagaatctaaatcatacgagaattctaaagcacttaatagtgctgaaggaaaagatccaaaggcattcttcaataccgatgatgaggacaatatgaagaagtcatctagccatggtgactccgaggttgtcgaagcttctgatcgttatgctaatcaagcagatgctgctgacgctgaagttgataacattgaaaaacaatttgccgcagttacaacccctgaaaacagcagtggatttatcacttacttcagacaatggcgtcattttaagcatcttttgggtacatctgtttgttggtttctgttggatattgccttttacggtgtcaatcttaatcaatctgtcattctcaagaatattggcttcagtactggtacgaacgaataccgcacattgatgaaaaacgcaattggcaacttgattatcgctgttgccggctatgttcctggatactggttcaacgtcttccttgttgaaattcttggacgtaaatggattcaactacaaggcttcgtgattactggtttgatgtttgcaattttggcaggacgttggaacgaaatttccactggtggtcgatttgcttgttttgttattgcccaactgttttctaactttggtcccaactccaccacttttatttatcccgctgaggttttccctgcacgcgtacgtggtactgctcatggtgtttcagctgctttgggtaaatgtggcgctattcttgcatcacttctttttaactttttgaccggtgttattggatatggtaacgttatgtggattttctgcggatgcatgtggggtggcattcttttcacacttttgcttcctgaaacaaagggtcgtgatgctgatgaaattgataggttggaattattttatggcaaggacggcaaagttcaatgtgatagcaagtggaagagctggtattttaatggaatcttttaa

SEQ ID NO: 91908 - protein, 572 aa, Schizosaccharomyces pombe
MAFGSKILNIGSKSDEYNDDAVPLDQVEEGAQERRYYLGLTKREFKLMMLAGVGFFLDSYDLFIINLVTPIFEYLYWGGIEKGPTGKGHYPSGIRGLVNASANIGNIFGQLLFGFMGDFFGRKFVYGKEMVIVIIATVLVIAMPKSIHSPLSKMMWVFCWRWLLGVGIGGDYPMSAAITSERSKIKRRGTLISLIFAFQGFGTLAGAIVTIILLGCFEHPLNREGHYHKLEGVWRLQFGLALVPAIGVLIPRLIMKESKSYENSKALNSAEGKDPKAFFNTDDEDNMKKSSSHGDSEVVEASDRYANQADAADAEVDNIEKQFAAVTTPENSSGFITYFRQWRHFKHLLGTSVCWFLLDIAFYGVNLNQSVILKNIGFSTGTNEYRTLMKNAIGNLIIAVAGYVPGYWFNVFLVEILGRKWIQLQGFVITGLMFAILAGRWNEISTGGRFACFVIAQLFSNFGPNSTTFIYPAEVFPARVRGTAHGVSAALGKCGAILASLLFNFLTGVIGYGNVMWIFCGCMWGGILFTLLLPETKGRDADEIDRLELFYGKDGKVQCDSKWKSWYFNGIF

SEQ ID NO: 91909 - DNA, 1722 bp, Schizosaccharomyces pombe
  CDS (1)..(1722)
atgaagcttaatatttttaaaagccatggggattctaatacggcagaggagaggcccgttccccttgaacaagtagaagctgaagatcagcaacatgaaaaccgtttctggttgggtttgactgcaaaggaatttagactcatgatgttagctggtgtgggtttcttccttgatagttacgatctttttattatcaacttggtcactcccattttcgaatatctttactggggtggtattgaaaagggacccaacggaaagggtcattatccctctggtattcgtggtttggttaatgccgcttcaaacattggtaatatctttggtcaactgatgtttggttttatgggagatttctttggccgtaaatttgtctacggtaaagaaatgattattgttattatcgccactattcttttgattgccatgcctaaaagtatccattcccccctttctaaaatgatgtgggtgttctgctggcgttggttgcttggtgttggtattggtggtgattatccaatgtccgccgccattacttctgaacgtagtaaactgaaccgtcgtggtactcttatttctttgatttttgccttccaaggtttcggaactcttgctggtgccattgtcaccatcatccttttgggttgtttcgaacatccattgaatcgtgaaggtcattaccgtaaactcgaaggtgtttggcgtttacaatttggtcttgctttggttcctgcaattggtgtccttatccctcgtcttatgatggaggaaactcaaaagtttaaaaattcacaacagctcaattccggcgataatagagatcctaaaacttcactcaactttgaggacgatgagcttgttaaaaatccatctgtcaccaaaggacaccctgaaatccatgaatctagtgagaattacttgagtcgctctaataccgttgagaatgagcctgaaaacattgagaaacaatttgaatcagttagtgctcctgctaacagaagtggctttatccaatactttagacaatggcaccacttcaaacatcttttgggtacttctgtttgttggtttttgttggatattgccttctatggtgtcaatcttaatcaatctgtcattcttaagaatatcggcttcagtagtggtacgaacgaataccgcacattgatgaaaaacgcaattggtaatttgattattgctgtcgccggttatgttcctggatactggttcaatgtcttccttgttgagatccttggacgtaaatggattcaactacaaggtttcgtgattactggtttgatgtttgcaattttggcaggacgttggaacgaaatttccactggtggtcgatttgcttgttttgttattgcccaactgttttctaactttggtcccaactccaccacttttatttatcccgctgaggtcttccccgctcgtgttcgcggtaccgctcatggtatttctgctgccttgggtaagtgcggtgctattcttgcatcacttcttttcaactttttgactagtatcattggatatggtaatgtcatgtggattttctgcggttgtatgtggggtggtattcttttcacacttttgttaccagagactaaaggtcgtgacgccgatgagatagatcgggtggaattattttatggtggtgatggtaaagttgagtgcaactcaaagtggaagagctggtatgttaatgggattttttaa

SEQ ID NO: 91910 - protein, 573 aa, Schizosaccharomyces pombe
MKLNIFKSHGDSNTAEERPVPLEQVEAEDQQHENRFWLGLTAKEFRLMMLAGVGFFLDSYDLFIINLVTPIFEYLYWGGIEKGPNGKGHYPSGIRGLVNAASNIGNIFGQLMFGFMGDFFGRKFVYGKEMIIVIIATILLIAMPKSIHSPLSKMMWVFCWRWLLGVGIGGDYPMSAAITSERSKLNRRGTLISLIFAFQGFGTLAGAIVTIILLGCFEHPLNREGHYRKLEGVWRLQFGLALVPAIGVLIPRLMMEETQKFKNSQQLNSGDNRDPKTSLNFEDDELVKNPSVTKGHPEIHESSENYLSRSNTVENEPENIEKQFESVSAPANRSGFIQYFRQWHHFKHLLGTSVCWFLLDIAFYGVNLNQSVILKNIGFSSGTNEYRTLMKNAIGNLIIAVAGYVPGYWFNVFLVEILGRKWIQLQGFVITGLMFAILAGRWNEISTGGRFACFVIAQLFSNFGPNSTTFIYPAEVFPARVRGTAHGISAALGKCGAILASLLFNFLTSIIGYGNVMWIFCGCMWGGILFTLLLPETKGRDADEIDRVELFYGGDGKVECNSKWKSWYVNGIF

SEQ ID NO: 91911 - DNA, 1668 bp, Oryza sativa
  CDS (1)..(1668)
atggcggacgcggacgggggctcgaacctggcggtgctggacgcgctggactcggcgcgcacgcagatgtaccacatgaaggcgatcgtgatcgccggcatgggcttcttcaccgacgcctacgacctgttctgcatctccacggtgtccaagctgctcggccgtctctactaccagcccgatggctcgacggacagtaagccaggcgctctgtccaagaccgccaacaacatggtcatcggcgtcgcgctcgtcggcacgctcatgggccagcttgtcttcggctacttcggcgacaagctcggccggaagcgcgtctacggcgtcaccctcatcctgatggccgcctgcgccatcggctccggcctgtcgttcggcagctcgcgcaaggcagtcatcggcacgctgtgcttcttccgcttctggctcggcttcggcatcggcggggactacccgctgtcggccaccatcatgtccgagtactcaaacaagaagacgcgcggcgcgttcatcgccgcggtgttcgccatgcagggcgtcggcatcatcttcgcggggctcgtgtccatgatcgtctctagcatcttcctcacctacaacaaggcgccgtcgtacaaggggaaccatgacctctcgaggcagatgcccgcggctgactacgtgtggcgcatcgtcctgatgatcggcgcgttcccggcgttggcgaccttctactggcggatgaagatgccggagacggcgaggtacacggcgatcatcgatggcaacgcgaagcaggcggcgaacgacatgcagaaggtgctgtcgatcgagatagaggccgagcaggagaagctggccaagttcaacgcggccaacaactacccgctcctgtcgatggagttcgcccggcgccacggcctgcacctcatcggcacgacgaccacgtggttcctccttgacatcgccttctacagccagaacctgacccagaaggacatcttcccggctatgggcctgatcagcggcgctgccgaagtcaacgctctcacggagatgttccagatatccaaggcctcgttcctcgtcgctctcctcggcaccttccccggctactgggtcaccgtcgctctcatcgacaagatgggcaggtacatgatccagctgatcggtttcttcatgatgtccatgttcatgctggcgatgggcatcctgtacgactacctcaaaacccatcacttcctgttcgggctcctgtacgcgctcactttcttcttcgccaacttcgggccgaacagcaccaccttcgtgctgccggccgagctgttcccgacgcgcgtgcgctccacctgccacgccatcagtgccgcggcgggcaaggccggcgccatcgtcgcggccttcggcattcagaagctcacgtacaactctcaagtcaaaagcatcaagaaggcgctcatcatcctctccatcaccaacatgctcggcttcttcttcacgttcctcgtcccggagaccatgggtcggtcgctcgaggagatctccggcgaggacggcaacaccggcgccggtggcggcggcgcccctgccgctgccaatgccggcgttggcgtgagcgcttcggatgtgagcagggacgagaagttccctgcttcaagcaccgaatggcagacatccatgcacgcatga

SEQ ID NO: 91912 - protein, 555 aa, Oryza sativa
MADADGGSNLAVLDALDSARTQMYHMKAIVIAGMGFFTDAYDLFCISTVSKLLGRLYYQPDGSTDSKPGALSKTANNMVIGVALVGTLMGQLVFGYFGDKLGRKRVYGVTLILMAACAIGSGLSFGSSRKAVIGTLCFFRFWLGFGIGGDYPLSATIMSEYSNKKTRGAFIAAVFAMQGVGIIFAGLVSMIVSSIFLTYNKAPSYKGNHDLSRQMPAADYVWRIVLMIGAFPALATFYWRMKMPETARYTAIIDGNAKQAANDMQKVLSIEIEAEQEKLAKFNAANNYPLLSMEFARRHGLHLIGTTTTWFLLDIAFYSQNLTQKDIFPAMGLISGAAEVNALTEMFQISKASFLVALLGTFPGYWVTVALIDKMGRYMIQLIGFFMMSMFMLAMGILYDYLKTHHFLFGLLYALTFFFANFGPNSTTFVLPAELFPTRVRSTCHAISAAAGKAGAIVAAFGIQKLTYNSQVKSIKKALIILSITNMLGFFFTFLVPETMGRSLEEISGEDGNTGAGGGGAPAAANAGVGVSASDVSRDEKFPASSTEWQTSMHA

SEQ ID NO: 91913 - DNA, 1581 bp, Oryza sativa
  CDS (1)..(1581)
atggcgggcgatcagatgcacgtgctctccgcgctggacagcgccaagacgcagtggtaccacttcaccgccatcgtcatcgccggcatgggcttcttcaccgacgcctacgacctcttctgcatctccctcgtcaccaagctcatcggccgcgtctactacaccgccgacggcgcgtccaagccgggcagcctgccgcccaacgtctcggcggccgtgaacggcgtcgccttcgtcggcacgctcacggggcagctcttcttcgggtggctcggcgacagggtcggccggaagagcgtctacggcatgacgctgctcttgatgatcatctgctccgtcgcgtcggggctgtcgttcggggacacgccgacgagcgtcatggccacgctctgcttcttccgcttctggctcggcttcggcatcggcggcgactacccgctcagcgccaccatcatgtcggagtacgcgaacaagcggacgcgcggggcgttcatcgccgccgtgttcgcgatgcaggggttcgggatcctcgccggcggcgcggtggcgatcgggatcaccgcgatcttcaggagccggttccccgcgccgccgttcgccgccgacccggcggcgtccaccccgccccaggccgactacgtgtggcggctcatcctcatgttcggcgcgcttcccgcggcgctcaccttctactggcggatgaggatgccggagacggcgcggtacaccgccatcgtcgccaagaacgcggagcgcgccgcggccgacatgtccaaggtgctccaggtgaagatcacggcggagcaggcggagatggcctcgccggtggacaagcccttcaccagcaagcccttcggcctcttctccggcgagttcgcgcggcgccacgggttccacctcctgggcacgacgtcgacgtggctcctcctggacatcgcctactactcccagaacctgttccagaaggacatcttcagcgccatcgggtggatcccggaggcgaagacgatgagcgcgctggacgagctgtaccacatcgcgcgcgcgcagacgctgatcgcgctgtgcgggacggtgccgggctactggttcacggtggcgctgatcgacgtggtcgggcggttcaagatccaggcggcggggttcttcgtgatgacggcgttcatgctggcgctggcggtgccgtacgaccactggacggcggcggggaaccagatcgggttcgtggtgctgtacgcgctcaccttcttcttcgccaacttcgggccgaacgcgacgacgttcatcgtgccggcggagatatacccggcgaggctgcgcgcgacgtgccacgggatatcggcggcgtcggggaaggtgggcgcgatcgtcgggtctttcgggttcctgtacctggcgcagagccccgtcccggccaaggcggcggcgcacggctacccgccgggcatcggcgtccgcaactcgctcttcgcgctcgccggctgcagcttgctcggcttcctcctcaccttccttgtgccggagcccaagggcaagtcgctcgaggagatgtcacgggagaacgaggtcggccagccgtga

SEQ ID NO: 91914 - protein, 526 aa, Oryza sativa
MAGDQMHVLSALDSAKTQWYHFTAIVIAGMGFFTDAYDLFCISLVTKLIGRVYYTADGASKPGSLPPNVSAAVNGVAFVGTLTGQLFFGWLGDRVGRKSVYGMTLLLMIICSVASGLSFGDTPTSVMATLCFFRFWLGFGIGGDYPLSATIMSEYANKRTRGAFIAAVFAMQGFGILAGGAVAIGITAIFRSRFPAPPFAADPAASTPPQADYVWRLILMFGALPAALTFYWRMRMPETARYTAIVAKNAERAAADMSKVLQVKITAEQAEMASPVDKPFTSKPFGLFSGEFARRHGFHLLGTTSTWLLLDIAYYSQNLFQKDIFSAIGWIPEAKTMSALDELYHIARAQTLIALCGTVPGYWFTVALIDVVGRFKIQAAGFFVMTAFMLALAVPYDHWTAAGNQIGFVVLYALTFFFANFGPNATTFIVPAEIYPARLRATCHGISAASGKVGAIVGSFGFLYLAQSPVPAKAAAHGYPPGIGVRNSLFALAGCSLLGFLLTFLVPEPKGKSLEEMSRENEVGQP

SEQ ID NO: 91915 - DNA, 1647 bp, Oryza sativa
  CDS (1)..(1647)
atggttcaggatcgcaaggtgctcgacgcgctggacacggcgaagacgcagtggtaccacttcacggcggtggtgatcgccggcatgggcttcttcaccgacgcctacgacctcttctccatctccctcgtcaccaagctgctcggccgcatctactacttcaacccggcgtccaagagccccggctccctcccgcccaacgtctccgccgccgtcaatggcgtcgccttctgcggcacgctcgccggccagctcttcttcggctggctcggcgacaagatggggcgcaagaaggtgtacgggatgacgctcatgctcatggtcatctgctgcctcgcctccggcctctcgttcgggtcgtcggcgaaaggcgtcatggccacgctctgcttcttccgcttctggcttgggttcggcatcggtggcgactacccgctctcggcgaccatcatgtcggagtatgctaacaagcgtacccgtggcgcgttcatcgccgccgtgttcgccatgcagggcttcggcaacctcaccggcggcatcgtggccatcatcgtgtccgccgcgttcaagttgcggttcgacgcgccggcgtacagggacgaccgggccggctccaccgtgccgcaggctgactacgcgtggcgcatcgtgctcatgttcggcgccatcccggcgctgctcacctactactggcggatgaagatgccggagacggcgcgctacaccgcgctggtcgccaagaacgacaagaaggcagccgccgacatggcgcgcgttctcaacgtcgagctcgtcgacgagcaggagaaggcagcggcggcgacggcggcggctgcggaggaggaggcagcacggcgcgagcagtacgggctcttctcccgggaattcgcacggcgccatggccaccacctgctgggcacgacggtgtgctggttcgtgctggacatcgcctactactcgcagaacctgttccagaaggacatctacacggcggtgcagtggctgcccaaggcggacaccatgagcgccctggaggagatgttcaagatctcccgggcacagacgctcgtggcgctgtgcggcaccatcccgggctactggttcaccgtcctcttcatcgacatcgtcggccgcttcgccatccagctcggcggcttcttcctcatgacggcgttcatgctcggcctcgccgtgccgtaccaccactggacgacgccggggaaccacgtcggcttcgtggtcatgtacgccttcaccttcttcttcgccaacttcgggccaaactccacgaccttcatcgtgccggccgagatcttcccggcgaggctgcgttccacctgccacggcatctcgtcggcggccgggaagatgggcgccatcgtcgggtcgttcgggttcttgtacgccgcgcagagcaccgacccgagcaagacggacgccggctacccgcggggcatcggcgtgcgcaactcgctgttcctgctcgccggatgcaacgtcgtcggcttcttgttcacgttcttggtgccagagtcgaaggggaagtcgctggaggagctctccggcgagaacgaaatggaggctgagccggcggcagcaactaactcctacaggcagaccgtccctgacagcggacagtccgagtaa

SEQ ID NO: 91916 - protein, 548 aa, Oryza sativa
MVQDRKVLDALDTAKTQWYHFTAVVIAGMGFFTDAYDLFSISLVTKLLGRIYYFNPASKSPGSLPPNVSAAVNGVAFCGTLAGQLFFGWLGDKMGRKKVYGMTLMLMVICCLASGLSFGSSAKGVMATLCFFRFWLGFGIGGDYPLSATIMSEYANKRTRGAFIAAVFAMQGFGNLTGGIVAIIVSAAFKLRFDAPAYRDDRAGSTVPQADYAWRIVLMFGAIPALLTYYWRMKMPETARYTALVAKNDKKAAADMARVLNVELVDEQEKAAAATAAAAEEEAARREQYGLFSREFARRHGHHLLGTTVCWFVLDIAYYSQNLFQKDIYTAVQWLPKADTMSALEEMFKISRAQTLVALCGTIPGYWFTVLFIDIVGRFAIQLGGFFLMTAFMLGLAVPYHHWTTPGNHVGFVVMYAFTFFFANFGPNSTTFIVPAEIFPARLRSTCHGISSAAGKMGAIVGSFGFLYAAQSTDPSKTDAGYPRGIGVRNSLFLLAGCNVVGFLFTFLVPESKGKSLEELSGENEMEAEPAAATNSYRQTVPDSGQSE

SEQ ID NO: 91917 - DNA, 1527 bp, Oryza sativa
  CDS (1)..(1527)
atggccggcaaccagcagctgcgggtgctgcacgccctggacattgcaaggacacagctgtaccatttcatcgcgatcgtgatcgccggtatgggcttcttcaccgacgcctacgacctcttctccatctcccttgtcgccgacctcctcggccacgtctactaccacggcgagctgccccggaacatccacgccgccgtcaccggcatcgcgctttgtggcaccgtccctggacagctcgtcttcggctggctaggcgacaaaatgggccggaagcgtgtctatggaatcaccctcctcctcatggttgtctcctctctcgcctccggactctccttcagtaagcacgaggggatgaacattatcgctgtgctttgcttcttccggttctggcttggcgtcagcatcggtggggattacccactctccgccaccatcatgtcagagtacgccaacaagaggactcgtggtgccttcattgctgctgtctttgctatgcaaggtttcggcaaccttgctgctgggatcattggaatgatagtatctgcagctttcaagcattcatcggcatcaaagattgactatgcctggcggataatcctcatgtttggcgccattcctgctgctctcacttaccactggcgcatgaagatgccagaaacagcacgttacactgccctcatctctaagaatgcaaagaaggccgccaaggacatgtctgccgtgctcaatgtcaacataaccccggacgatgaagttatcaatgagcttgcaaggcaggacgagtatggcctcttctcgttcgagtttctccaccgccatggcctccacctccttggcaccaccgtctgttggttcgtcctcgacgtcaccttctactcgctcaacattttcatgaagaatatcttcaccgaggtcggtcttcttcctcgtctagatagcgaataccaccataccctccagcggatgatcaccatgacagcagttcacacatttatctcgctttgcggtgcacttcccgggtacttcttcactgtcgccttcgttgatcgcatcggccgtgtcaagatccagctgattggattcaccatgatgactgttttcatgctttgtcttgcaattccttatgatcagtggctgaggcacaagaacaagtacggatttgcagtcatgtatggcctgaccttcttcttcgccaactttgggccaaatactacaaccttcataattccagctgagattttccctgcaaggctacggtccacatgccatgggatatctggtgcggttgggaagatcggtgcgattgtcggtgtgtttggtttcttgtacacagaataccatatcaggatctttctgtttgtccttattgggtgcaatcttgttggattcatcttcacccttctcttaccagagtcgaaagggaagtccctcgaggatctcactggggagattgaagagttccaggaggaagatgaaggaagtgaagttgctttgtctagacccatacatactgtgcctttatag

SEQ ID NO: 91918 - protein, 508 aa, Oryza sativa
MAGNQQLRVLHALDIARTQLYHFIAIVIAGMGFFTDAYDLFSISLVADLLGHVYYHGELPRNIHAAVTGIALCGTVPGQLVFGWLGDKMGRKRVYGITLLLMVVSSLASGLSFSKHEGMNIIAVLCFFRFWLGVSIGGDYPLSATIMSEYANKRTRGAFIAAVFAMQGFGNLAAGIIGMIVSAAFKHSSASKIDYAWRIILMFGAIPAALTYHWRMKMPETARYTALISKNAKKAAKDMSAVLNVNITPDDEVINELARQDEYGLFSFEFLHRHGLHLLGTTVCWFVLDVTFYSLNIFMKNIFTEVGLLPRLDSEYHHTLQRMITMTAVHTFISLCGALPGYFFTVAFVDRIGRVKIQLIGFTMMTVFMLCLAIPYDQWLRHKNKYGFAVMYGLTFFFANFGPNTTTFIIPAEIFPARLRSTCHGISGAVGKIGAIVGVFGFLYTEYHIRIFLFVLIGCNLVGFIFTLLLPESKGKSLEDLTGEIEEFQEEDEGSEVALSRPIHTVPL

SEQ ID NO: 91919 - DNA, 1659 bp, Oryza sativa
  CDS (1)..(1659)
atggctccgatcggcgtgctcacggcgctggaccaggcgcggacgcagtactaccacttcaaggccatcgtcatcgccggcatgggactcttcaccgactcctacgacctcttctgcatcgcgcccgtcatgaagatcgtgggccgggtgtactactccgacggcggcgcccgtccgggggtgacgccgccggccgtcgtgtcggcgaccgtcggagtggcgctgctgggcgcggtgatcgggaacgtggtgttcggcgcgctgggcgaccgcgtggggcggcgccgcgtctacggcgcgtgcctgctgctgatggtgtgcagctccgtcgggagcggcttctccgtgtgccggacgcgccggtgcgcgctcgccagcctctgcttcttccgcttcctcctcggcgtcggcgtcggcggcgactacccgctgtcggccaccatcatgtcggagttcgccaaccggcgcacccgcggcgcgttcatcgccgccgtgttctccatgcaggggttcggcatcctcgccagctccgcggtcaccatggccgtcgccgccgccttcgaccactacaccggctaccccgcgccgctcgacacgccggagtgcgccgacctcgcctggcggatcattctcatggccggcgccgtccccgccgcgctgacgtactactggaggatgtccatgccggagacggccagatatacggctttggtggagcgcgacgtggtgaaggccaccaacgacatcggccgcgttctggccgacctcgacctgggcgccgtcgccgaggaggaggtggcggcggcgttgagccggcctccgccgccgccgcgcccttcgtacggcctcctctctcggcgcttcgtccggcagcacgggcgggacctgttcgcgtgcgcggcggcgtggttcctcctcgacatcccctactacagcagcacgctgttccagtctcagatctaccggccgctgttcccggcgccggggctcatcaacgcgttccaggaggcgttcaacgtggccaagttccaggccgtcatcgccgtcgcctccaccatcccgggctacttcgtcgccgtgctcctcatcgaccgcgtcggccggcggtgcctccagatggccgggttcctcctcatggccgtcttcctcttcgcgctcgcgggtccgtacgacggatactggcgcgaccacggcgcgcacgccggctacatcgtgctctactcgctcaccttcttctccgccaacctcgggccgaacaccaccaccttcatcctgccggcggagctcttcccggcgcgcttccggtcgacgtgccacggcctctccggcgcggcggggaagctcggcgcgctcgtcggctccatcggcttcctgtgggcgtcgcagcagaaggacggcgcggcggccgggcacctgccgggcatcggcatgatgtacgcgctgttcgttcttggcgggatctgcctgctcgggctggcactcacctacgtgttcacgccggagacgatgatgcggtcgctggaggagaacgagagcgacagggcgcagacccaggtcggcgacggcggcagcgacaccgaggcggccaagagcccggcgtccatggcgagctcgcacctcagcatgtcgcccatccttccagcccgggtctccgtgtga

SEQ ID NO: 91920 - protein, 552 aa, Oryza sativa
MAPIGVLTALDQARTQYYHFKAIVIAGMGLFTDSYDLFCIAPVMKIVGRVYYSDGGARPGVTPPAVVSATVGVALLGAVIGNVVFGALGDRVGRRRVYGACLLLMVCSSVGSGFSVCRTRRCALASLCFFRFLLGVGVGGDYPLSATIMSEFANRRTRGAFIAAVFSMQGFGILASSAVTMAVAAAFDHYTGYPAPLDTPECADLAWRIILMAGAVPAALTYYWRMSMPETARYTALVERDVVKATNDIGRVLADLDLGAVAEEEVAAALSRPPPPPRPSYGLLSRRFVRQHGRDLFACAAAWFLLDIPYYSSTLFQSQIYRPLFPAPGLINAFQEAFNVAKFQAVIAVASTIPGYFVAVLLIDRVGRRCLQMAGFLLMAVFLFALAGPYDGYWRDHGAHAGYIVLYSLTFFSANLGPNTTTFILPAELFPARFRSTCHGLSGAAGKLGALVGSIGFLWASQQKDGAAAGHLPGIGMMYALFVLGGICLLGLALTYVFTPETMMRSLEENESDRAQTQVGDGGSDTEAAKSPASMASSHLSMSPILPARVSV

SEQ ID NO: 91921 - DNA, 1605 bp, Oryza sativa
  CDS (1)..(1605)
atgggcggcggcggcggggagcagcagcagcttgaggtgctccacgccctggacgtggccaagacgcaatggtaccatttcacggccatcgtggtggccggaatggggttcttcaccgacgcctatgacctcttctgcatctccctcgtcaccaagctgctgggccgcatctactaccgcgtcgacgggtccccgtcccccggcacgctccccccgcacgtctccgcctccgtcaacggcgtggccttcgtgggcacgctctcagggcaactcttctttggctggctgggcgacaagctcggccgtaagcgcgtctatggcatcaccctcatgctcatggtgctctgctccctcgcctccgcgctctcctttggccacaccccgacctccgtcatggccaccctctgcttcttccgcttctggctcggcttcggcatcggcggcgactacccgctctccgccaccatcatgtccgagtacgccaacaagaagacgcgtggcgccttcatcgccgccgtcttcgcgatgcagggcttcggcatcatcaccggcggcctcgtcgccatcctcgtctccgcctccttcagggccgccttcccggcgcctccctacggcgaggaccccgtggcctccacgccgccgcaggccgacttcgtgtggaggatcatactcatgctgggcgcgctgccggcggcgctcacctactactggcgcaccaagatgcccgagacggcgcgctacacggcgctcgtggccaacaacgccaagcaggccgcggccgacatgtccaaggtgctgcaggtggtggagatgcgtaatattggtaataatggtggcagcaggaggccgttcgggctgttctccggcgagtttgtccggcggcacgggctgcacctggtgggcacgtcggcgacgtggttgctgctggacattgcgttctacagccagaacctgttccagaaggacatattcagcgcggtggggtggatccccaaggcggcgacgatgagcgcgctggaggagctgttccgcatcgcgcgggcgcagacgctgatcgcgctgtgcgggacggtgcccggctactggttcaccgtcgcgctcatcgacgtggtgggccgtttcaagatccaggccgttggcttcttcatgatgaccctcttcatgctcaccctcgccctgccgtaccaccactggacggcgccggggaagaaccacgtcggcttcctgctgctctacggcctcaccttcttcttcgccaacttcggccccaactccaccaccttcatcgtgccggcggagattttcccggcgcggctgcgggccacgtgccacggcatctcggcggcgtcggggaagctgggcgccatcgtcggatccttcgggttcctgtacctggcgcagagccccgaccggagcaagacggagcacgggtaccctccgggcatcggcgtccgcaactcgctcttcctgctcgccgcctgcaacctgctgggcctgctcttcaccttcctcgtgccggagtccaaggggaagtcgctggaggagatgtccggcgacgccgaggcccaggaggaggcgccgccgcccctgcaaactgtactgtag

SEQ ID NO: 91922 - protein, 534 aa, Oryza sativa
MGGGGGEQQQLEVLHALDVAKTQWYHFTAIVVAGMGFFTDAYDLFCISLVTKLLGRIYYRVDGSPSPGTLPPHVSASVNGVAFVGTLSGQLFFGWLGDKLGRKRVYGITLMLMVLCSLASALSFGHTPTSVMATLCFFRFWLGFGIGGDYPLSATIMSEYANKKTRGAFIAAVFAMQGFGIITGGLVAILVSASFRAAFPAPPYGEDPVASTPPQADFVWRIILMLGALPAALTYYWRTKMPETARYTALVANNAKQAAADMSKVLQVVEMRNIGNNGGSRRPFGLFSGEFVRRHGLHLVGTSATWLLLDIAFYSQNLFQKDIFSAVGWIPKAATMSALEELFRIARAQTLIALCGTVPGYWFTVALIDVVGRFKIQAVGFFMMTLFMLTLALPYHHWTAPGKNHVGFLLLYGLTFFFANFGPNSTTFIVPAEIFPARLRATCHGISAASGKLGAIVGSFGFLYLAQSPDRSKTEHGYPPGIGVRNSLFLLAACNLLGLLFTFLVPESKGKSLEEMSGDAEAQEEAPPPLQTVL

SEQ ID NO: 91923 - DNA, 1581 bp, Oryza sativa
  CDS (1)..(1581)
atggcggacgggcagctcaaggtactgacgacgctggaccatgcgaggacgcagtggtaccatttcatggcgatcgtgatcgccggcatgggcttcttcaccgacgcctacgacctcttctgcatctccctcgtctccaagctgctcggccgcatctactacaccgacctcgccggggacaaccccggcagcctgccgcccaacgtgtcggcagcggtgaacggcgtcgcgctgtgcggcacgctcgcggggcagctcttcttcgggtggctcggcgacaagctcgggcggaagagcgtgtacggcttcacgctcgtgctcatggtggtgtgctccgtcgcgtcgggcctctcgttcgggcgcacggcgaagggcgtcgtcgccacgctctgcttcttccggttctggctcggcttcggcatcggcggcgactacccgctgtcggcgacgatcatgtcggagtacgccaacaagaggacgcgcggggcgttcatcgccgccgtgttcgccatgcaggggttcggcatcctgttcggcgccatcgtggcgctcgtcgtgtcggccgggttccggaacgcgtacccggcgccgtcgtacgccgacggccgcgcggcgtcgctggtgcccgaggccgactacgtgtggcggatcatcctcatgttcggcaccgtcccggcggcgctcacctactactggcgcatgaagatgccggagacggcgaggtacaccgcgctcatcgcgcgcaacgccaagcaggccgccgccgacatgtccaaggtgctcgacacggagatccaggaggacgcggaccgcgccgaggcggtcgccgccggcggcgccggcaacgagtgggggctcttctcgcggcagttcgtgcggcggcacggggtgcacctggtggcgacgacgagcacgtggttcctgctcgacatcgcgttctacagccagaacctgttccagaaggacatcttctccaaggtcgggtggatcccgccggcgaggacgatgaacgccgtcgaggaggtgttccgcatcgcgcgcgcgcaggcgctcatcgcgctgtgcggcaccatcccgggctactggttcaccgtcgcgttcatcgacgtcgccggccgcttcgccatccagctgatggggttcgccatgatgaccgtcttcatgctcggcctcgccgcgccgtaccaccactggacgacgccggggaaccacaccggcttcgtcgtcatgtacggcttcaccttcttcttcgccaacttcggccccaacgccaccaccttcatcgtgccggcggagatctacccggcgaggctgcgttccacgtgccacggcatctcggcggcggcggggaaggccggcgccatcgtcggcgcgttcgggttcctgtacgcggcgcaggacccgcacaagccggaggccgggtacaagccaggcattggcatccggaacgcgctgttcgtgctcgccggcacgaacttcctcggcatgctcatgacgctgctggtgccggagtcgaagggcatgtcgctggaggaggtgtccaaggagaacgtcgccgacgacgaggaggcgacggcgtag

SEQ ID NO: 91924 - protein, 526 aa, Oryza sativa
MADGQLKVLTTLDHARTQWYHFMAIVIAGMGFFTDAYDLFCISLVSKLLGRIYYTDLAGDNPGSLPPNVSAAVNGVALCGTLAGQLFFGWLGDKLGRKSVYGFTLVLMVVCSVASGLSFGRTAKGVVATLCFFRFWLGFGIGGDYPLSATIMSEYANKRTRGAFIAAVFAMQGFGILFGAIVALVVSAGFRNAYPAPSYADGRAASLVPEADYVWRIILMFGTVPAALTYYWRMKMPETARYTALIARNAKQAAADMSKVLDTEIQEDADRAEAVAAGGAGNEWGLFSRQFVRRHGVHLVATTSTWFLLDIAFYSQNLFQKDIFSKVGWIPPARTMNAVEEVFRIARAQALIALCGTIPGYWFTVAFIDVAGRFAIQLMGFAMMTVFMLGLAAPYHHWTTPGNHTGFVVMYGFTFFFANFGPNATTFIVPAEIYPARLRSTCHGISAAAGKAGAIVGAFGFLYAAQDPHKPEAGYKPGIGIRNALFVLAGTNFLGMLMTLLVPESKGMSLEEVSKENVADDEEATA

SEQ ID NO: 91925 - DNA, 1521 bp, Glycine max
  CDS (1)..(1521)
atggctaggttgaaggtgttgtctgccctagacacagcaaggacacaatactaccacttcaaagccatcatcattgcagggatggggctcttcaccgatgcctacgacctcttctcaatcactctcatcatcaagataattggaagggtatattacggccaccgcgaaggtgaaaaccggtacgaaaccccaccggaggtcgtgtccgccttggtcgccgtcgccctgctgggcaccgccgtcggccagctggtatttggccggcttggcgacctcaaggggcgacggcgagtgtacggattcgctcttttgttgatggtcttcagctccttagcttctggcttctccatttgcataagaaaaacctgcgttctcctcactcttggcttcttcaggtacttcctggggctgggtattggaggagactaccctcagtcttctaccataatatcggagtttgcgaacaagaagacaagagggtcgttcatagcggcggtgttttcgatgcaaggcttcggcatattggccagctccaccgtgaccatggcagtgtgctccatattcggcgcagcgtccaagaattccgaggctgacgtggcatggagactcatactcatgctcggttctgtccccgcagccatgacttactactggcgcatgatgatgcccgaaaccgccaggtacacagcattagtggagcaaaatgtgatgcaagcagcaaaggacatggagaaagtccttgatgtaacactgagccagattgctgaagaagatcctttgccaccaaccccgcatgcttaccctctactttcatgggaatacttgcgtaagcacggtcctgacctatttgcatgttctttcacatggttccttgtggacattgtgttctatagccaagttttgttccaaagtgaaatatacaaacgctacctagacaaaaaggaggacgtggatgtgtatcaagagactttccatgctgcatggatccaagccgttattgctgtttgttccacaattcctggctacttcttctcaatgtatttcattgacaaatggggaagggtcaaaaatccaatgatgggctttttcttcatggcattggcctttttctccattggaattccctattactcttattggaccaccaaggaacatcataagaataaagtgttcatggtgttgtatggacttgcttttttctttgccaattttgggcccaacactactactttcatagtcccggctgagctttttcctgctaggtttaggtcaagttgtcatggcatttctggggcagttggcaaggttggggcaattattgggtctgtggggtttctttgggcttcacatagaaagaaggaggatgggtaccctaagggaattgggatgaaagtgtcccttattatacttggaggggtgtgcttattgggaatggtgatcacctaccttttcacgagggaaaccatgggaaggtctttggaagagaatgaggttgagattgaagagcaagataatctttga

SEQ ID NO: 91926 - protein, 506 aa, Glycine max
MARLKVLSALDTARTQYYHFKAIIIAGMGLFTDAYDLFSITLIIKIIGRVYYGHREGENRYETPPEVVSALVAVALLGTAVGQLVFGRLGDLKGRRRVYGFALLLMVFSSLASGFSICIRKTCVLLTLGFFRYFLGLGIGGDYPQSSTIISEFANKKTRGSFIAAVFSMQGFGILASSTVTMAVCSIFGAASKNSEADVAWRLILMLGSVPAAMTYYWRMMMPETARYTALVEQNVMQAAKDMEKVLDVTLSQIAEEDPLPPTPHAYPLLSWEYLRKHGPDLFACSFTWFLVDIVFYSQVLFQSEIYKRYLDKKEDVDVYQETFHAAWIQAVIAVCSTIPGYFFSMYFIDKWGRVKNPMMGFFFMALAFFSIGIPYYSYWTTKEHHKNKVFMVLYGLAFFFANFGPNTTTFIVPAELFPARFRSSCHGISGAVGKVGAIIGSVGFLWASHRKKEDGYPKGIGMKVSLIILGGVCLLGMVITYLFTRETMGRSLEENEVEIEEQDNL

SEQ ID NO: 91927 - DNA, 1521 bp, Glycine max
  CDS (1)..(1521)
atggctaggttgaaggtgttgtctgccctagacacagcaaggacacaatactaccacttcaaagccatcatcattgcagggatggggctcttcaccgatgcctacgacctcttctcaatcactctcatcatcaagataattggaagggtatattacggccaccgcgaaggtgaaaaccggtacgaaaccccaccggaggtcgtgtccgccttggtcgccgtcgccctgctgggcaccgccgtcggccagctggtatttggccggcttggcgacctcaaggggcgacggcgagtgtacggattcgctcttttgttgatggtcttcagctccttagcttctggcttctccatttgcataagaaaaacctgcgttctcctcactcttggcttcttcaggtacttcctggggctgggtattggaggagactaccctcagtcttctaccataatatcggagtttgcgaacaagaagacaagagggtcgttcatagcggcggtgttttcgatgcaaggcttcggcatattggccagctccaccgtgaccatggcagtgtgctccatattcggcgcagcgtccaagaattccgaggctgacgtggcatggagactcatactcatgctcggttctgtccccgcagccatgacttactactggcgcatgatgatgcccgaaaccgccaggtacacagcattagtggagcaaaatgtgatgcaagcagcaaaggacatggagaaagtccttgatgtaacactgagccagattgctgaagaagatcctttgccaccaaccccgcatgcttaccctctactttcatgggaatacttgcgtaagcacggtcctgacctatttgcatgttctttcacatggttccttgtggacattgtgttctatagccaagttttgttccaaagtgaaatatacaaacgctacctagacaaaaaggaggacgtggatgtgtatcaagagactttccatgctgcatggatccaagccgttattgctgtttgttccacaattcctggctacttcttctcaatgtatttcattgacaaatggggaagggtcaaaaatccaatgatgggctttttcttcatggcattggcctttttctccattggaattccctattactcttattggaccaccaaggaacatcataagaataaagtgttcatggtgttgtatggacttgcttttttctttgccaattttgggcccaacactactactttcatagtcccggctgagctttttcctgctaggtttaggtcaagttgtcatggcatttctggggcagttggcaaggttggggcaattattgggtctgtggggtttctttgggcttcacatagaaagaaggaggatgggtaccctaagggaattgggatgaaagtgtcccttattatacttggaggggtgtgcttattgggaatgttggtcacctaccttttcactagggaaaccatgggaaggtctttggaagagaatgaggttgagattgaagagcaagataatctttga

SEQ ID NO: 91928 - protein, 506 aa, Glycine max
MARLKVLSALDTARTQYYHFKAIIIAGMGLFTDAYDLFSITLIIKIIGRVYYGHREGENRYETPPEVVSALVAVALLGTAVGQLVFGRLGDLKGRRRVYGFALLLMVFSSLASGFSICIRKTCVLLTLGFFRYFLGLGIGGDYPQSSTIISEFANKKTRGSFIAAVFSMQGFGILASSTVTMAVCSIFGAASKNSEADVAWRLILMLGSVPAAMTYYWRMMMPETARYTALVEQNVMQAAKDMEKVLDVTLSQIAEEDPLPPTPHAYPLLSWEYLRKHGPDLFACSFTWFLVDIVFYSQVLFQSEIYKRYLDKKEDVDVYQETFHAAWIQAVIAVCSTIPGYFFSMYFIDKWGRVKNPMMGFFFMALAFFSIGIPYYSYWTTKEHHKNKVFMVLYGLAFFFANFGPNTTTFIVPAELFPARFRSSCHGISGAVGKVGAIIGSVGFLWASHRKKEDGYPKGIGMKVSLIILGGVCLLGMLVTYLFTRETMGRSLEENEVEIEEQDNL

SEQ ID NO: 91929 - DNA, 1665 bp, Zea mays
  CDS (1)..(1665)
atgacggcgccgggcgggtcgaacctggcggtgctggacgcgctggactcggcgcgcacccagatgtaccacatgaaggccatagtcatcgccggcatgggcttcttcaccgacgcctacgacctcttctgcatctccaccgtgtccaagctgctcggccgcatctactacccggacgacaacctgtacatagacaagcccaagcccggcactctgcccgtgtccgtcaacaacatggtgacaggcgtcgcgctcgtcggcacgctcatgggccagctcgtcttcggctacttcggcgacaagctcgggcggaagcgcgtgtacggcatcacgctcgtgctgatggccgcctgcgccatcggctcgggcctctcgttcggcagctcggcgcacgccgtcatcggcacgctctgcttcttccgcttctggctcggcttcggcatcggcggggactacccgctgtccgcgaccatcatgtccgagtactccaacaagaagacgcggggcgcgttcatcgccgcggtgttcgcgatgcagggcgtcggcatcatcttcgcggggctcgtgtccatgatcgtctcgggcatcctcctgcactaccacccggcgccggcgtggaaggagaaccacgaccggtcgtggcaggaccagatgccggcggcggactacatgtggcgcatcgtcctgatgatcggcgcgttcccggcgctggccacgttctactggcggatgaagatgcccgagacggcaaggtacaccgcgctcatcgagggcaacgccaagcaggcggccaacgacatgcagaaggtgatggacgtcgagatccaggccgagcaggacaagctcgcgaggtacaaggcggcgaacgactacccgctgctgtcgagggagttcgcccggcgccacggcctgcacctcatcggcacggccaccacgtggttccttctcgacatagccttctacagccagaacctgacccagaaagacatcttcccggcgatcaaactgacgagccccgtcgacgacataaacgccctcaaggaggtgttcgagatttccaaggccatgttcctcgtcgcactcctcggcaccttccccggctactgggtcaccgtcgcgctcatcgacaaaatgggcaggtacctgatccagctcatcggtttcttcatgatgtctgtcttcatgctactgatgggcgtcatgtacaacgacctcaagaacaaacacaccacgctcttcgccctcttctacgcgctcaccttcttcttcgccaacttcggccccaacagcaccaccttcgtgctgccggccgagctattcccgacgcgcgtgcgctccacctgccacgccatcagcgccgcgtcaggcaaggccggcgccatcgtcgcggccttcggggtgcagagcctcacgctcaagggagacgtgggccacatcaagaaggcgctcatcatcctctccgtcaccaacatcctcggcttcttcttcaccttcctcgtcccggagaccatgggccgctcgctcgaggagatctccggggaggacggcaacgtcgaaaacggtcccggtgctcccgccggcgtggccatgggcgtcgcggacgtgagcaaggatgacaagatgcctgtttccagtactgagtggcagagctccatgcatgcgtga

SEQ ID NO: 91930 - protein, 554 aa, Zea mays
MTAPGGSNLAVLDALDSARTQMYHMKAIVIAGMGFFTDAYDLFCISTVSKLLGRIYYPDDNLYIDKPKPGTLPVSVNNMVTGVALVGTLMGQLVFGYFGDKLGRKRVYGITLVLMAACAIGSGLSFGSSAHAVIGTLCFFRFWLGFGIGGDYPLSATIMSEYSNKKTRGAFIAAVFAMQGVGIIFAGLVSMIVSGILLHYHPAPAWKENHDRSWQDQMPAADYMWRIVLMIGAFPALATFYWRMKMPETARYTALIEGNAKQAANDMQKVMDVEIQAEQDKLARYKAANDYPLLSREFARRHGLHLIGTATTWFLLDIAFYSQNLTQKDIFPAIKLTSPVDDINALKEVFEISKAMFLVALLGTFPGYWVTVALIDKMGRYLIQLIGFFMMSVFMLLMGVMYNDLKNKHTTLFALFYALTFFFANFGPNSTTFVLPAELFPTRVRSTCHAISAASGKAGAIVAAFGVQSLTLKGDVGHIKKALIILSVTNILGFFFTFLVPETMGRSLEEISGEDGNVENGPGAPAGVAMGVADVSKDDKMPVSSTEWQSSMHA

SEQ ID NO: 91931 - DNA, 1665 bp, Zea mays
  CDS (1)..(1665)
atggcggcgccgggcgggtcgaacctggcggtgctggacgcgctggactcggcgcgcacccagatgtaccacatgaaggccatagtcatcgccggcatgggcttcttcaccgacgcctacgacctcttctgcatctccaccgtgtccaagctgctcggccgcatctactacccggacgacaacctgtacatagacaagcccaagcccggcactctgcccgtgtccgtcaacaacatggtgacaggcgtcgcgctcgtcggcacgctcatgggccagctcgtcttcggctacttcggcgacaagctcgggcggaagcgcgtgtacggcatcacgctcgtgctgatggccgcctgcgccatcggctcgggcctctcgttcggcagctcggcgcacgccgtcatcggcacgctctgcttcttccgcttctggctcggcttcggcatcggcggggactacccgctgtccgcgaccatcatgtccgagtactccaacaagaagacgcggggcgcgttcatcgccgcggtgttcgcgatgcagggcgtcggcatcatcttcgcggggctcgtgtccatgatcgtctcgggcatcctcctgcactaccacccggcgccggcgtggaaggagaaccacgaccggtcgtggcaggaccagatgccggcggcggactacatgtggcgcatcgtcctgatgatcggcgcgttcccggcgctggccacgttctactggcggatgaagatgcccgagacggcaaggtacaccgcgctcatcgagggcaacgccaagcaggcggccaacgacatgcagaaggtgatggacgtcgagatccaggccgagcaggacaagctcgcgaggtacaaggcggcgaacgactacccgctgctgtcgagggagttcgcccggcgccacggcctgcacctcatcggcacggccaccacgtggttccttctcgacatagccttctacagccagaacctgacccagaaagacatcttcccggcgatcaaactgacgagccccgtcgacgacataaacgccctcaaggaggtgttcgagatttccaaggccatgttcctcgtcgcactcctcggcaccttccccggctactgggtcaccgtcgcgctcatcgacaaaatgggcaggtacctgatccagctcatcggtttcttcatgatgtctgtcttcatgctactgatgggcgtcatgtacaacgacctcaagaacaaacacaccacgctcttcgccctcttctacgcgctcaccttcttcttcgccaacttcggccccaacagcaccaccttcgtgctgccggccgagctattcccgacgcgcgtgcgctccacctgccacgccatcagcgccgcgtcaggcaaggccggcgccatcgtcgcggccttcggggtgcagagcctcacgctcaagggagacgtgggccacatcaagaaggcgctcatcatcctctccgtcaccaacatcctcggcttcttcttcaccttcctcgtcccggagaccatgggccgctcgctcgaggagatctccggggaggacggcaacgtcgaaaacggtcccggtgctcccgccggcgtggccatgggcgtcgcggacgtgagcaaggatgacaagatgcctgtttccagtactgagtggcagagctccatgcatgcgtga

SEQ ID NO: 91932 - protein, 554 aa, Zea mays
MAAPGGSNLAVLDALDSARTQMYHMKAIVIAGMGFFTDAYDLFCISTVSKLLGRIYYPDDNLYIDKPKPGTLPVSVNNMVTGVALVGTLMGQLVFGYFGDKLGRKRVYGITLVLMAACAIGSGLSFGSSAHAVIGTLCFFRFWLGFGIGGDYPLSATIMSEYSNKKTRGAFIAAVFAMQGVGIIFAGLVSMIVSGILLHYHPAPAWKENHDRSWQDQMPAADYMWRIVLMIGAFPALATFYWRMKMPETARYTALIEGNAKQAANDMQKVMDVEIQAEQDKLARYKAANDYPLLSREFARRHGLHLIGTATTWFLLDIAFYSQNLTQKDIFPAIKLTSPVDDINALKEVFEISKAMFLVALLGTFPGYWVTVALIDKMGRYLIQLIGFFMMSVFMLLMGVMYNDLKNKHTTLFALFYALTFFFANFGPNSTTFVLPAELFPTRVRSTCHAISAASGKAGAIVAAFGVQSLTLKGDVGHIKKALIILSVTNILGFFFTFLVPETMGRSLEEISGEDGNVENGPGAPAGVAMGVADVSKDDKMPVSSTEWQSSMHA

SEQ ID NO: 91933 - DNA, 1680 bp, Triticum aestivum
  CDS (1)..(1680)
atggcgcgcgagcagctggaggtgctgacggcgctggacgcggccaagacgcagtggtaccacttcacggccatcgtcatcgccggcatgggcttcttcaccgacgcctacgacctcttctgcatctccctcgtcaccaagctgctcggccgcatctactactaccgcgagggcgccgacgcgcccggctcgctcccgcccaacgtcgccgccgccgtcaacggcgtcgccttctgcggcacgctctccggccagctcttcttcggctggctcggcgaccgcatgggccgcaagcgcgtctacggcatgacgctcatgtgcatggtgctctgctccatcgcctccggcctctccttcggctccacccccggttccgtcatggccacgctctgcttcttccgcttctggctcggcttcggcatcggcggcgactacccgctctccgccaccatcatgtccgagtacgccaacaagaagacgaggggcgccttcatcgccgccgtcttcgccatgcagggcttcggcatcctcaccggcggcgtcgtcacgctcatcgtctccgccgcgttccgcgccgccttccacacgcccgcctaccaggacgcccccctcgcctccacgccgccgcaggccgacttcgtgtggcgcttcatcctcatgttcggggccgtcccggccctcatgacctactactggcggatgaagatgcccgagacggcgcgctacacggcgctcgtcgccaagaacgccaagcaggccgcggccgacatgtccaaggtgctccaggtggacatcggcgccgaggaagaggaccccaaggccaacgacggcggcgccggagccgccgacgaccgcaactcgttcgggctcttctccggcgagttcctgcgccggcacgggctgcacctcctcggcacggccacctgctggttcctgctcgacatcgccttctactcgcagaacctgttccagaaggacattttcacggcgatcaactggatccccaaggccaagacgatgagcgccctcgaggaggtgcatcgcatcgcgcgcgcgcagacgctcatcgcgctctgcggcacggtgccgggctactggttcacggtggcgctgatcgaccggatcgggcggttctggatccagctgggcggcttcttcttcatggcggtgttcatgctggggctcgccttcccgtaccaccactggacgacgccggggaaccacatcgggttcgtggtgctgtacgcgctcaccttcttcttcgccaacttcgggcccaactccaccaccttcatcgtgcccgccgagatcttcccggcgaggctccggtcgacgtgccacggcatctccgcggcggccgggaagctgggggccatcgtggggtcgttcgggttcctgtacctggcgcagaacaaggacccggccaaggtggaccacgggtacaaggccggcatcggggtgaggaactcgctcttcatcctcgccgcctgcaacttcctgggcatgggcttcaccttctgcgcgcccgagtccaacggcatctcgctcgaggagctctcccggcgagaacgacgacggcgaggcggccgcgccggcgcacgccaggacggtgcccgtgtgagacagtcctcgtcagatagtatattctgcaggtttggatggatgtatggatcattttaa

SEQ ID NO: 91934 - protein, 559 aa, Triticum aestivum
MAREQLEVLTALDAAKTQWYHFTAIVIAGMGFFTDAYDLFCISLVTKLLGRIYYYREGADAPGSLPPNVAAAVNGVAFCGTLSGQLFFGWLGDRMGRKRVYGMTLMCMVLCSIASGLSFGSTPGSVMATLCFFRFWLGFGIGGDYPLSATIMSEYANKKTRGAFIAAVFAMQGFGILTGGVVTLIVSAAFRAAFHTPAYQDAPLASTPPQADFVWRFILMFGAVPALMTYYWRMKMPETARYTALVAKNAKQAAADMSKVLQVDIGAEEEDPKANDGGAGAADDRNSFGLFSGEFLRRHGLHLLGTATCWFLLDIAFYSQNLFQKDIFTAINWIPKAKTMSALEEVHRIARAQTLIALCGTVPGYWFTVALIDRIGRFWIQLGGFFFMAVFMLGLAFPYHHWTTPGNHIGFVVLYALTFFFANFGPNSTTFIVPAEIFPARLRSTCHGISAAAGKLGAIVGSFGFLYLAQNKDPAKVDHGYKAGIGVRNSLFILAACNFLGMGFTFCAPESNGISLEELSRRERRRRGGRAGARQDGARVRQSSSDSIFCRFGWMYGSF

SEQ ID NO: 91935 - DNA, 1602 bp, Glycine max
  CDS (1)..(1602)
atggctggagaattgggagttttgaatgcacttgatgtggcaaagacacaatggtaccacttcactgctattgtgatcgctggaatgggtttcttcaccgatgcctatgacctcttctgcatttccctagtcaccaagcttctagggaggctatattacacagaaccaggtgcaccaaagccaggttcacttcctccaagagttcaagcttctgtgactggtgtagcactatgtggcacattagccggccaactattctttggttggcttggtgacaaaatggggagaaaaagagtctatggactaacactcattctcatggtagtgtgctcccttgcctcaggactctcctttgggtcaactccagagggtgtcatggcctcactttgcttcttcaggttctggctagggtttgggattggtggtgactaccctctttctgccacaatcatgtctgaatatgccaacaagaagacgcgtggcgcgttcatagccgcggtgtttgcaatgcaaggattcggaatcctggctggtggagtggtggcattgattgtttcatatgcatatgaccaaaagtacaagcttcctagttatgaacagaatccagaagcatccttggaccccgcatttgactatgtttggagaatagttttgatgtttggtgcagttcctgctgcactcacctactactggcgcatgaagatgccagagacagcacgttacactgcccttgtggccaagaatgcaaaacaagctgctgcagacatgtctaaggtgttgcaagtggaacttgaagctgaagaggagaaggtgaagaaattgacagagaatgagagcaacaagtatggtttgttcaccaaggaatttgtgaaacgccatggcctgcatttgttgggaaccaccaccacttggttcttgttggacatagcattctacagccaaaaccttttccagaaggacattttcagtgcaattgggtggatccctccagcaaaggaaatgaatgcaatccacgaggtgtataagattgcaagagcacaaacactcatagcactatgcagtactgtgccaggttactggttcacagtggcattaattgattacatgggccgttttgccatccaattgttggggttcttcttcatgactgtgttcatgtttgctttggctataccatatgatcattggtctgagaaagaaaacagaattgggtttgtggtgatgtactctttcacctttttctttgccaattttggtccaaattccaccacatttgttgtgccagcagagattttccctgcaaggctaaggtccacttgccatggaatctctgctgctgcaggaaaggctggtgcaattgtgggtgcatttgggttcctatatgctgcacaaagcaaggacccttccaagactgatgcagggtaccctactggtattggaattaagaactcactcattatgcttggtgtgatcaacttcattgggatgttgttcaccttgcttgttccagaatcaaagggaaaatcactggaggagttgagtggggagaatggtgaaaatgatgctgaacatgcagtgtctgctaggacagttcctgtttga

SEQ ID NO: 91936 - protein, 533 aa, Glycine max
MAGELGVLNALDVAKTQWYHFTAIVIAGMGFFTDAYDLFCISLVTKLLGRLYYTEPGAPKPGSLPPRVQASVTGVALCGTLAGQLFFGWLGDKMGRKRVYGLTLILMVVCSLASGLSFGSTPEGVMASLCFFRFWLGFGIGGDYPLSATIMSEYANKKTRGAFIAAVFAMQGFGILAGGVVALIVSYAYDQKYKLPSYEQNPEASLDPAFDYVWRIVLMFGAVPAALTYYWRMKMPETARYTALVAKNAKQAAADMSKVLQVELEAEEEKVKKLTENESNKYGLFTKEFVKRHGLHLLGTTTTWFLLDIAFYSQNLFQKDIFSAIGWIPPAKEMNAIHEVYKIARAQTLIALCSTVPGYWFTVALIDYMGRFAIQLLGFFFMTVFMFALAIPYDHWSEKENRIGFVVMYSFTFFFANFGPNSTTFVVPAEIFPARLRSTCHGISAAAGKAGAIVGAFGFLYAAQSKDPSKTDAGYPTGIGIKNSLIMLGVINFIGMLFTLLVPESKGKSLEELSGENGENDAEHAVSARTVPV

SEQ ID NO: 91937 - DNA, 1629 bp, Zea mays
  CDS (1)..(1629)
atggcgcgcgggggagacggcctgcaggtgctgagcgcgctggacgcggcgaagacgcagtggtaccacttcacggccatcatcgtcgccggcatgggcttcttcacggacgcctacgacctcttctgcatctccctcgtcaccaagctgctgggccgcatctactacacggacaccagcaaggacagccccgggtcgctgccgcccaacgtcgcggcggcggtcaacggcgtggccttctgcggcacgctggcggggcagctcttcttcggctggctgggcgacaagctggggcgcaagagcgtgtacgggatgacgctcatggtcatggtcatctgctccgtcgcgtcgggcctctcgttcggccacacccccacgggggtcatggccacgctctgcttcttccgcttctggctcggcttcggcatcggcggcgactacccgctgtcggccaccatcatgtccgagtacgccaacaagaggacccgcggcgccttcatcgccgccgtcttcgccatgcagggcttcggcatcctcgccggcggcatcgtcacgctcgtcatctccgccgccttccgcgcggcgtacccgtccccggcgtacagggacgaccacttcacctccaccgtgccgcaggccgacttcgtgtggcgggtcatcctcatgctcggcgccgcgccggcgctgctcacctactactggcggatgaagatgcccgagacggcgcggtacacggcgctggtggccaagaacgccaagcaggccgcggccgacatgtccaaggtgctgcacacggagatcctggacgagcaggagaagctggacgggatggtcgccgccgagggcgccaacagcttcggcctcttctccagggagttcgcgcgccgccacggcctccacctcgtcggcaccgccaccacctggttcctgctcgacatcgccttctacagccagaacctgttccagaaggacatcttcaccagcatcaactggatccccaaggccaacaccatgagcgcgctggaggaggtgtaccgcatctcccgcgcgcagaccctcatcgcgctctgcggcacagtcccgggctactggttcaccgtcgcgctcatcgacgtcgtcggccgcttcgccatacagctgctgggcttcttcatgatgaccgtcttcatgctcggcctcgccatcccctaccaccactggaccacgccgggcaaccacatcggcttcgtcgtcatgtacgccttcaccttcttcttcgccaacttcgggcccaacagcaccaccttcatcgtgcccgccgagatcttcccggcgcgcctgcgctccacctgccacggcatctccgccgcctcggggaaggccggggccatcatcggcgcgttcggcttcctgtacgcggcgcagaaccaggacaggagcaagacggacgccggctaccccgcgggcatcggcgtgcgcaactcgctcttcgtcctcgccgccagcaacatgctcggcttcgtcctcacgttcctcgtgccggagtccaagggcaagtcgctcgaggagatgtccggtgaggctgaagactcagaggaggagcccgtcggcgcccgtgcggtgcggccgtcggagacccagatggtgtag

SEQ ID NO: 91938 - protein, 542 aa, Zea mays
MARGGDGLQVLSALDAAKTQWYHFTAIIVAGMGFFTDAYDLFCISLVTKLLGRIYYTDTSKDSPGSLPPNVAAAVNGVAFCGTLAGQLFFGWLGDKLGRKSVYGMTLMVMVICSVASGLSFGHTPTGVMATLCFFRFWLGFGIGGDYPLSATIMSEYANKRTRGAFIAAVFAMQGFGILAGGIVTLVISAAFRAAYPSPAYRDDHFTSTVPQADFVWRVILMLGAAPALLTYYWRMKMPETARYTALVAKNAKQAAADMSKVLHTEILDEQEKLDGMVAAEGANSFGLFSREFARRHGLHLVGTATTWFLLDIAFYSQNLFQKDIFTSINWIPKANTMSALEEVYRISRAQTLIALCGTVPGYWFTVALIDVVGRFAIQLLGFFMMTVFMLGLAIPYHHWTTPGNHIGFVVMYAFTFFFANFGPNSTTFIVPAEIFPARLRSTCHGISAASGKAGAIIGAFGFLYAAQNQDRSKTDAGYPAGIGVRNSLFVLAASNMLGFVLTFLVPESKGKSLEEMSGEAEDSEEEPVGARAVRPSETQMV

SEQ ID NO: 91939 - DNA, 1626 bp, Zea mays
  CDS (1)..(1626)
atggcgcgcggcggggacggcctgcaggtgctcagcgcgctggacgcggcgaagacgcagtggtaccacttcacggccatcatcgtcgccggcatgggcttcttcacggacgcctacgacctcttctgcatctccctcgtcaccaagctgctggggcgcatctactacacggacaccagcaaggacaacccgggctcgctcccgcccaacgtcgccgcggcggtcaacggcgtcgccttctgcggcacgctggccggccagctcttcttcggctggctcggggacaagctcgggcgcaagagcgtgtacgggatgacgctcatgctcatggtcatctgctccgtcgcgtcgggcctctcgttcggccacacgcccacgggggtcatggccacgctctgcttcttccgcttctggctcgggttcggcatcggcggggactacccgctgtcggcgaccatcatgtccgagtacgccaacaagaagacccgcggcgccttcatcgcggccgtcttcgccatgcagggcttcggcatcctcgccggcggcattgtcacgctcgtcatctccgccgccttccgcgcggggtacccggccccggcgtacagggacgaccacttcaactccaccgtgccgcaggccgactacgtgtggcgcatcatcctcatcctgggcgccgcgccggcgatgctcacctactactggcggatgaagatgcccgagacggcgcgctacaccgcgctcgtggccaagaacgccaagcaggccgcggccgacatgtccagggtgctccagacggagatcgtcgacgagcaggagaagctggacgagatggtcaccgccgagagcaacaccttcggcctcttctccagggagttcgcgcgccgccacgggctccacctcgtcggcacctccaccacgtggttcctgctcgacatcgccttctacagccagaacctgttccagaaggacatcttcaccagcatcaactggatccccaaggccaacaccatgagcgcgctggaggaggtgtcccgcatctcccgcgcccagacgctcatcgcgctctgcggcaccgtcccgggctactggttcaccgtcgcgctcatcgacgtcgtcggccgcttcgccatccagctgctcggcttcttcatgatgaccgtcttcatgctcggcctcgccatcccctaccaccactggaccacgcccggcaaccacatcggcttcgtcgtcatgtacgccttcaccttcttcttcgcaaacttcggccccaacagcaccaccttcatcgtgccggccgagatcttcccggcgcggctgcggtccacatgccacggcatctccgccgcctcggggaaggccggcgccatcatcggggcctttgggttcctgtacgcggcgcagaaccaggacaagagcaaggcggacgccgggtaccccgcgggcatcggcgtacgcaattcgctcttcgtcctcgctgcctccaacttgcttggctttatcctcaccttcctcgtgccggagtccaagggtaagtcgctcgaggagatgtccggggaggctgacgacgccgaggacgacgccgtcggcacccgcgcggtgcggccgtcggggacccagatggtgtag

SEQ ID NO: 91940 - protein, 541 aa, Zea mays
MARGGDGLQVLSALDAAKTQWYHFTAIIVAGMGFFTDAYDLFCISLVTKLLGRIYYTDTSKDNPGSLPPNVAAAVNGVAFCGTLAGQLFFGWLGDKLGRKSVYGMTLMLMVICSVASGLSFGHTPTGVMATLCFFRFWLGFGIGGDYPLSATIMSEYANKKTRGAFIAAVFAMQGFGILAGGIVTLVISAAFRAGYPAPAYRDDHFNSTVPQADYVWRIILILGAAPAMLTYYWRMKMPETARYTALVAKNAKQAAADMSRVLQTEIVDEQEKLDEMVTAESNTFGLFSREFARRHGLHLVGTSTTWFLLDIAFYSQNLFQKDIFTSINWIPKANTMSALEEVSRISRAQTLIALCGTVPGYWFTVALIDVVGRFAIQLLGFFMMTVFMLGLAIPYHHWTTPGNHIGFVVMYAFTFFFANFGPNSTTFIVPAEIFPARLRSTCHGISAASGKAGAIIGAFGFLYAAQNQDKSKADAGYPAGIGVRNSLFVLAASNLLGFILTFLVPESKGKSLEEMSGEADDAEDDAVGTRAVRPSGTQMV

SEQ ID NO: 91941 - DNA, 1575 bp, Zea mays
  CDS (1)..(1575)
atggcgggaggccagctcaacgtgctgaccacactcgaccaggccaagacacaatggtaccatttcatggcgatcgtcatcgccggcatggggttcttcaccgacgcatacgatttgttctgtatcgcgctcgtgaccaagctcctcggccgcatctactactccgaccccacctccaaggaccccggcagcctcccgcccaacgtgtcggccgccgtgaccggcgtcgccctctgcggcacgctggcgggacagctcttcttcggctggctcggcgacaagctcggccgcaagagcgtctacggcttcaccctcatcctcatggtgctctgctccgtcgcgtccggcctctcgttcgggcatacgcccaagggcgtcatcgccacgctctgcttcttccgcttctggctcggcttcggcatcggcggcgactacccgctgagcgccaccatcatgtccgagtacgccaacaagaagacccgcggcgccttcatcgccgccgtgttcgccatgcaggggttcggcatcctcttcggcaccatcgtggcgctcgccgtctcggcggcgttccggaacgcgttcccggccccgccctacttcgtggacgcccaggcgtcgctcgtcccggaggccgactatgtctggcgcgtcatcctcatgttcggcaccgtcccggccgcgctcacctactactggcgcatgaagatgcccgagacggcgcggtacacggcgctcatcgcccgcaacacgaagcaggccacggccgacatggccaaggtgctcaagaaggagatcgagaaagaggatgagcaggtggagcgccaggtggtcggcgccgacacatggggcctcttctcggcgcagttcctccggcgccatggcctccacctgttggccaccagcagcacgtggttcctgctggacatcgccttctacagccagaacctcttccagaaggacatcttcaccaaggtcgggtggataccgccggcgaggaccatgaacgccatcgaggaggtgtaccgcatctcgcgcgcccaggcgctgatcgcgctctgcggcaccatcccgggctactggttcaccgtcggcctcatcgacatcgtgggcaggttctggatccagatcatgggcttcttcatgatgaccgtgttcatgctcgcgctcggggtgccgtacgagcactggaccaaggcgtccaaccacaccggcttcgtcgtcctctacgggctcaccttcttcttcgcaaacttcgggcccaacagcaccaccttcatcgtgccggccgagatcttcccggcgaggctccggtccacgtgccacggcatatcggcagcggccggcaaggccggcgccatcatcggcgcgttcgggttcctgtacgcggcgcaggaccccaagaagcccgaccatggctactcgccgggcatcggcatccgcaacacgctcttcgtgctcgccggaaccaacttcctgggcatgctcatgtcggtgttcgtgccggagtccaagggcatgtcgcttgaggagatctccaaggagaacgtggatgatgaagctgaggccgaagtgtag

SEQ ID NO: 91942 - protein, 524 aa, Zea mays
MAGGQLNVLTTLDQAKTQWYHFMAIVIAGMGFFTDAYDLFCIALVTKLLGRIYYSDPTSKDPGSLPPNVSAAVTGVALCGTLAGQLFFGWLGDKLGRKSVYGFTLILMVLCSVASGLSFGHTPKGVIATLCFFRFWLGFGIGGDYPLSATIMSEYANKKTRGAFIAAVFAMQGFGILFGTIVALAVSAAFRNAFPAPPYFVDAQASLVPEADYVWRVILMFGTVPAALTYYWRMKMPETARYTALIARNTKQATADMAKVLKKEIEKEDEQVERQVVGADTWGLFSAQFLRRHGLHLLATSSTWFLLDIAFYSQNLFQKDIFTKVGWIPPARTMNAIEEVYRISRAQALIALCGTIPGYWFTVGLIDIVGRFWIQIMGFFMMTVFMLALGVPYEHWTKASNHTGFVVLYGLTFFFANFGPNSTTFIVPAEIFPARLRSTCHGISAAAGKAGAIIGAFGFLYAAQDPKKPDHGYSPGIGIRNTLFVLAGTNFLGMLMSVFVPESKGMSLEEISKENVDDEAEAEV

SEQ ID NO: 91943 - DNA, 1632 bp, Zea mays
  CDS (1)..(1632)
atggccgccggggaccttgaggtgctcaccgcgctcgacaccgcgaagacgcaatggtaccacttcaccgccatcgtggtcgccggcatggggttcttcaccgacgcctacgacctcttctgcatctccctcgtgactaagctcctcggccgcatctactacaccgtggaggggtccgcgacgcccggcaccctcccgccgcacgtgtccgcgtccgtcaacggcgtggccttcgtgggcacgctgtcagggcagctcttcttcggctggctgggcgacaagctcgggcgcaagaaggtctatggcatgacgctcatgctcatggtcctctgttccgtcgcgtcggggctctcgttcggccacaccccggcgtccgtcatggcgacgctgtgcttcttccgcttctggctcgggttcggcatcggcggcgactacccgctgtcggcgaccatcatgtccgagtacgccaacaagaagacgcgcggcgcgttcatcgccgcggtgttcgcgatgcagggcttcggcatcatggccggcggcctcgtggccatcgtcgtgtccgcgtcgttcaaggccaggttcccagccccggcctacgccgtcgaccccgccgggtccacgccgccgcaggccgacttcgtgtggcggatcatcctgatgctgggcgcgatgcccgcggcgctcacctactactggcgcaccaagatgcccgagacggcgcggtacacggcgctggttgccaagaacgccaagcaggccgcggctgacatgtccaaggtgctgcaggtggagatctcagccggcgcccccgaggaggacgccgcggctgcgactgcgactgcgcctgcgccggcgtcggcgtcctttgggctcttctccggggagttcctccgccggcacgggctgcacctcctgggcacgtcctcgacgtggttcctgctggacatcgccttctactcgcagaacctgttccagaaggacatcttcagcgcggtggggtggatccccaaggcggcgacgatgaacgcgctggaggagctgttcagcatcgcgcgggcgcagtccctgatcgcgctgtgcggcacggtgcccggctactggttcacggtggcgctgatcgacgtgttggggcggttcgcgatccaggtgacggggttcctgatgatgacggtgttcatgctggggctggccgtgccgtacgagcactggacgacgccggggcaccacatcggcttcatcgtcatgtacggcctcaccttcttcttcgccaacttcgggcccaacgcgaccacgttcatcgtgcccgcggagatcttcccggccaggctgcggtcgacgtgccacggcatctcggcggcgtcggggaagctgggcgccatcatcggctccttcgggttcctgtacctggcgcaaaaccgggacccggccaagacggaccacgggtaccccgcgggcatcggcgtgcgcaactcgctgttcctcctcgccggctgcaacctgctgggcctggcattcacgttcctggtgccggagtccaagggcaaatccctggaggagatgtccggcgagaacgacgaggcggccgccgccgccgccacgccgaactacaacaaccgcacagtgcccgtgtaa

SEQ ID NO: 91944 - protein, 543 aa, Zea mays
MAAGDLEVLTALDTAKTQWYHFTAIVVAGMGFFTDAYDLFCISLVTKLLGRIYYTVEGSATPGTLPPHVSASVNGVAFVGTLSGQLFFGWLGDKLGRKKVYGMTLMLMVLCSVASGLSFGHTPASVMATLCFFRFWLGFGIGGDYPLSATIMSEYANKKTRGAFIAAVFAMQGFGIMAGGLVAIVVSASFKARFPAPAYAVDPAGSTPPQADFVWRIILMLGAMPAALTYYWRTKMPETARYTALVAKNAKQAAADMSKVLQVEISAGAPEEDAAAATATAPAPASASFGLFSGEFLRRHGLHLLGTSSTWFLLDIAFYSQNLFQKDIFSAVGWIPKAATMNALEELFSIARAQSLIALCGTVPGYWFTVALIDVLGRFAIQVTGFLMMTVFMLGLAVPYEHWTTPGHHIGFIVMYGLTFFFANFGPNATTFIVPAEIFPARLRSTCHGISAASGKLGAIIGSFGFLYLAQNRDPAKTDHGYPAGIGVRNSLFLLAGCNLLGLAFTFLVPESKGKSLEEMSGENDEAAAAAATPNYNNRTVPV

SEQ ID NO: 91945 - DNA, 1620 bp, Zea mays
  CDS (1)..(1620)
atggcgcgcgggggagacggcctgcaggtgctgagcgcgctggacgcggcgaagacgcagtggtaccacttcacggccatcatcgtcgccggcatgggcttcttcacggacgcctacgacctcttctgcatctccctcgtcaccaagctgctgggccgcatctactacacggacaccagcaaggacagccccgggtcgctgccgcccaacgtcgcggcggcggtcaacggcgtggccttctgcggcacgctggcggggcagctcttcttcggctggctgggcgacaagctggggcgcaagagcgtgtacgggatgacgctcatggtcatggtcatctgctccgtcgcgtcgggcctctcgttcggccacacccccacgggggtcatggccacgctctgcttcttccgcttctggctcggcttcggcatcggcggcgactacccgctgtcggccaccatcatgtccgagtacgccaacaagaggacccgcggcgccttcatcgccgccgtcttcgccatgcagggcttcggcatcctcgccggcggcatcgtcacgctcgtcatctccgccgccttccgcgcggcgtacccgtccccggcgtacagggacgaccacttcacctccaccgtgccgcaggccgacatcgtgtggcgggtcatcgtcatgctcggcgccgcgccggcgctgctcacctactactggcggatgaagatgcccgagacggcgcggtacacggcgctggtggccaagaacgccaagcaggccgccgccgacatgtccaaggtgctgcacacggagatcgtggacgagcaggagaagctggacgccgccgagggcgccaacagcttcggcctcttctccagggagttcgcgcgccgccacggcctccacctcgtcggcaccgccaccacctggttcctgctcgacatcgccttctacagccagaacctgttccagaaggacatcttcaccagcatcaactggatccccaaggccaacaccatgagcgcgctggaggaggtgtaccgcatctcccgcgcgcagaccctcatcgcgctctgcggcacagtcccgggctactggttcaccgtcgcgctcatcgacgtcgtcggccgcttcgccatacagctgctgggcttcttcatgatgaccgtcttcatgctcggcctcgccatcccctaccaccactggaccacgccgggcaaccacatcggcttcgtcgtcatgtacgccttcaccttcttcttcgccaacttcgggcccaacagcaccaccttcatcgtgcccgccgagatcttcccggcgcgcctgcgctccacctgccacggcatctccgccgcctcggggaaggccggggccatcatcggcgcgttcggcttcctgtacgcggcgcagaaccaggacaggagcaagacggacgccggctaccccgcgggcatcggcgtgcgcaactcgctcttcgtcctcgccgccagcaacatgctcggcttcgtcctcacgttcctcgtgccggagtccaagggcaagtcgctcgaggagatgtccggtgaggctgaagactcagaggaggagcccgtcggcgcccgtgcggtgcggccgtcggagacccagatggtgtag

SEQ ID NO: 91946 - protein, 539 aa, Zea mays
MARGGDGLQVLSALDAAKTQWYHFTAIIVAGMGFFTDAYDLFCISLVTKLLGRIYYTDTSKDSPGSLPPNVAAAVNGVAFCGTLAGQLFFGWLGDKLGRKSVYGMTLMVMVICSVASGLSFGHTPTGVMATLCFFRFWLGFGIGGDYPLSATIMSEYANKRTRGAFIAAVFAMQGFGILAGGIVTLVISAAFRAAYPSPAYRDDHFTSTVPQADIVWRVIVMLGAAPALLTYYWRMKMPETARYTALVAKNAKQAAADMSKVLHTEIVDEQEKLDAAEGANSFGLFSREFARRHGLHLVGTATTWFLLDIAFYSQNLFQKDIFTSINWIPKANTMSALEEVYRISRAQTLIALCGTVPGYWFTVALIDVVGRFAIQLLGFFMMTVFMLGLAIPYHHWTTPGNHIGFVVMYAFTFFFANFGPNSTTFIVPAEIFPARLRSTCHGISAASGKAGAIIGAFGFLYAAQNQDRSKTDAGYPAGIGVRNSLFVLAASNMLGFVLTFLVPESKGKSLEEMSGEAEDSEEEPVGARAVRPSETQMV

SEQ ID NO: 91947 - DNA, 26 bp, Artificial sequence
  primer
atgagttccgtcaataaagatactat

SEQ ID NO: 91948 - DNA, 26 bp, Artificial sequence
  primer
ttatgcttcatgttgaagttgagatg

SEQ ID NO: 91949 - protein, 588 aa, Artificial sequence
  consensus sequence
  Variant (2)..(4): Xaa in position 2 to 4 is any amino acid
  Variant (6)..(6): Xaa in position 6 is any amino acid
  Variant (8)..(11): Xaa in position 8 to 11 is any amino acid
  Variant (12)..(12): Xaa in position 12 is any or no amino acid
  Variant (14)..(19): Xaa in position 14 to 19 is any amino acid
  Variant (22)..(22): Xaa in position 22 is any amino acid
  Variant (33)..(33): Xaa in position 33 is any amino acid
  Variant (35)..(42): Xaa in position 35 to 42 is any amino acid
  Variant (43)..(44): Xaa in position 43 to 44 is any or no amino acid
  Variant (46)..(63): Xaa in position 46 to 63 is any amino acid
  Variant (64)..(77): Xaa in position 64 to 77 is any or no amino acid
  Variant (79)..(81): Xaa in position 79 to 81 is any amino acid
  Variant (85)..(85): Xaa in position 85 is any amino acid
  Variant (88)..(88): Xaa in position 88 is any amino acid
  Variant (90)..(90): Xaa in position 90 is any amino acid
  Variant (92)..(93): Xaa in position 92 to 93 is any amino acid
  Variant (97)..(98): Xaa in position 97 to 98 is any amino acid
  Variant (101)..(102): Xaa in position 101 to 102 is any amino acid
  Variant (104)..(115): Xaa in position 104 to 115 is any amino acid
  Variant (116)..(129): Xaa in position 116 to 129 is any or no amino acid
  Variant (131)..(133): Xaa in position 131 to 133 is any amino acid
  Variant (135)..(137): Xaa in position 135 to 137 is any amino acid
  Variant (139)..(139): Xaa in position 139 is any amino acid
  Variant (147)..(147): Xaa in position 147 is any amino acid
  Variant (149)..(150): Xaa in position 149 to 150 is any amino acid
  Variant (152)..(152): Xaa in position 152 is any amino acid
  Variant (155)..(155): Xaa in position 155 is any amino acid
  Variant (157)..(160): Xaa in position 157 to 160 is any amino acid
  Variant (161)..(165): Xaa in position 161 to 165 is any or no amino acid
  Variant (168)..(172): Xaa in position 168 to 172 is any amino acid
  Variant (175)..(175): Xaa in position 175 is any amino acid
  Variant (179)..(179): Xaa in position 179 is any amino acid
  Variant (181)..(186): Xaa in position 181 to 186 is any amino acid
  Variant (188)..(197): Xaa in position 188 to 197 is any amino acid
  Variant (198)..(221): Xaa in position 198 to 221 is any or no amino acid
  Variant (223)..(224): Xaa in position 223 to 224 is any amino acid
  Variant (227)..(231): Xaa in position 227 to 231 is any amino acid
  Variant (233)..(234): Xaa in position 233 to 234 is any amino acid
  Variant (237)..(240): Xaa in position 237 to 240 is any amino acid
  Variant (242)..(242): Xaa in position 242 is any amino acid
  Variant (244)..(246): Xaa in position 244 to 246 is any amino acid
  Variant (247)..(247): Xaa in position 247 is any or no amino acid
  Variant (251)..(251): Xaa in position 251 is any amino acid
  Variant (255)..(260): Xaa in position 255 to 260 is any amino acid
  Variant (261)..(263): Xaa in position 261 to 263 is any or no amino acid
  Variant (265)..(286): Xaa in position 265 to 286 is any amino acid
  Variant (287)..(347): Xaa in position 287 to 347 is any or no amino acid
  Variant (349)..(349): Xaa in position 349 is any amino acid
  Variant (352)..(354): Xaa in position 352 to 354 is any amino acid
  Variant (357)..(357): Xaa in position 357 is any amino acid
  Variant (360)..(360): Xaa in position 360 is any amino acid
  Variant (364)..(366): Xaa in position 364 to 366 is any amino acid
  Variant (368)..(371): Xaa in position 368 to 371 is any amino acid
  Variant (373)..(397): Xaa in position 373 to 397 is any amino acid
  Variant (398)..(419): Xaa in position 398 to 419 is any or no amino acid
  Variant (424)..(429): Xaa in position 424 to 429 is any amino acid
  Variant (431)..(432): Xaa in position 431 to 432 is any amino acid
  Variant (433)..(434): Xaa in position 433 to 434 is any or no amino acid
  Variant (437)..(438): Xaa in position 437 to 438 is any amino acid
  Variant (441)..(442): Xaa in position 441 to 442 is any amino acid
  Variant (445)..(469): Xaa in position 445 to 469 is any amino acid
  Variant (470)..(481): Xaa in position 470 to 481 is any or no amino acid
  Variant (483)..(486): Xaa in position 483 to 486 is any amino acid
  Variant (489)..(489): Xaa in position 489 is any amino acid
  Variant (495)..(495): Xaa in position 495 is any amino acid
  Variant (499)..(500): Xaa in position 499 to 500 is any amino acid
  Variant (502)..(502): Xaa in position 502 is any amino acid
  Variant (504)..(504): Xaa in position 504 is any amino acid
  Variant (507)..(507): Xaa in position 507 is any amino acid
  Variant (509)..(509): Xaa in position 509 is any amino acid
  Variant (511)..(511): Xaa in position 511 is any amino acid
  Variant (513)..(513): Xaa in position 513 is any amino acid
  Variant (520)..(520): Xaa in position 520 is any amino acid
  Variant (523)..(523): Xaa in position 523 is any amino acid
  Variant (526)..(550): Xaa in position 526 to 550 is any amino acid
  Variant (551)..(569): Xaa in position 551 to 569 is any or no amino acid
  Variant (571)..(573): Xaa in position 571 to 573 is any amino acid
  Variant (575)..(577): Xaa in position 575 to 577 is any amino acid
  Variant (578)..(578): Xaa in position 578 is any or no amino acid
  Variant (581)..(584): Xaa in position 581 to 584 is any amino acid
  Variant (585)..(585): Xaa in position 585 is any or no amino acid
LXXXDXAXXXXXHXXXXXXAGXGFFTDAYDLFXIXXXXXXXXXXYXXXXXXXXXXXXXXXXXXXXXXXXXXXXXXXXGXXXGQLXFGXLXDXXGRKXXYGXXLXXXXXXXXXXXXXXXXXXXXXXXXXXLXXXRXXXGXGIGGDYPXSXXIXSEXAXXXXXXXXXRGXXXXXVFXMQGXGXXXXXXVXXXXXXXXXXXXXXXXXXXXXXXXXXXXXXXXXXDXXWRXXXXXGXXPAXXXXYXRXXXXPETXRYTXXXXXXXXXAXXXXXXXXXXXXXXXXXXXXXXXXXXXXXXXXXXXXXXXXXXXXXXXXXXXXXXXXXXXXXXXXXXXXXXXXXXXXXXXXXXXLXGTXXXWFXLDXAFYXXXLXXXXIXXXXXXXXXXXXXXXXXXXXXXXXXXXXXXXXXXXXXXXXXXXXXXXPGYWXXXXXXDXXXXGRXXIQXXGFXXXXXXXXXXXXXXXXXXXXXXXXXXXXXXXXXXXXXYXXXXFFXNFGPNXTTFXXPXEXFPXRXRXTXHGISAAXGKXGAXXXXXXXXXXXXXXXXXXXXXXXXXXXXXXXXXXXXXXXXXXXXGXXXTXXXXPEXXXXXLEE

SEQ ID NO: 91950 - protein, 43 aa, Artificial sequence
  protein pattern
  Variant (2)..(3): Xaa in position 2 to 3 is any amino acid
  Variant (4)..(4): Xaa in position 4 is any or no amino acid
  Variant (9)..(9): Xaa in position 9 is Ala, Cys, Ser, Thr or Val
  Variant (13)..(13): Xaa in position 13 is Ile, Leu or Val
  Variant (14)..(14): Xaa in position 14 is any amino acid
  Variant (16)..(16): Xaa in position 16 is Ala or Gly
  Variant (18)..(18): Xaa in position 18 is any amino acid
  Variant (19)..(19): Xaa in position 19 is Phe or Tyr
  Variant (21)..(21): Xaa in position 21 is Ala, Thr or Val
  Variant (23)..(23): Xaa in position 23 is any amino acid
  Variant (25)..(25): Xaa in position 25 is Ala, Gly, Ser or Thr
  Variant (26)..(26): Xaa in position 26 is Ser or Thr
  Variant (27)..(27): Xaa in position 27 is Ala, Cys, Gly or Ser
  Variant (29)..(29): Xaa in position 29 is Ala or Gly
  Variant (30)..(30): Xaa in position 30 is Phe, Ile, Leu or Val
  Variant (32)..(32): Xaa in position 32 is any or no amino acid
  Variant (34)..(34): Xaa in position 34 is any amino acid
  Variant (35)..(35): Xaa in position 35 is any or no amino acid
  Variant (38)..(38): Xaa in position 38 is any amino acid
  Variant (40)..(40): Xaa in position 40 is Ala or Ser
  Variant (41)..(41): Xaa in position 41 is any amino acid
  Variant (42)..(42): Xaa in position 42 is Ile, Leu or Val
  Variant (43)..(43): Xaa in position 43 is Ala, Gly or Thr
FXXXFGPNXTTFXXPXEXXPXRXRXXXHXXSXAXXGKXGXXXX

SEQ ID NO: 91951 - protein, 28 aa, Artificial sequence
  protein pattern
  Variant (2)..(3): Xaa in position 2 to 3 is any amino acid
  Variant (4)..(4): Xaa in position 4 is Leu or Met
  Variant (6)..(6): Xaa in position 6 is Phe, Ile, Leu or Val
  Variant (14)..(14): Xaa in position 14 is Ile, Leu or Met
  Variant (16)..(22): Xaa in position 16 to 22 is any or no amino acid
  Variant (24)..(27): Xaa in position 24 to 27 is any amino acid
  Variant (28)..(28): Xaa in position 28 is Glu or Arg
RXXXGXGIGGDYPXSXXXXXXXAXXXXX

SEQ ID NO: 91952 - protein, 16 aa, Artificial sequence
  protein pattern
  Variant (3)..(3): Xaa in position 3 is any amino acid
  Variant (6)..(6): Xaa in position 6 is Phe, Leu or Met
  Variant (7)..(7): Xaa in position 7 is any amino acid
  Variant (9)..(9): Xaa in position 9 is Ala or Ser
  Variant (12)..(12): Xaa in position 12 is Ile or Leu
  Variant (14)..(14): Xaa in position 14 is any amino acid
  Variant (15)..(15): Xaa in position 15 is Ala, Ile or Val
  Variant (16)..(16): Xaa in position 16 is Ala, Gly, Asn or Ser
AGXGFXXDXYDXFXXX

SEQ ID NO: 91953 - protein, 14 aa, Artificial sequence
  protein pattern
  Variant (2)..(2): Xaa in position 2 is any amino acid
  Variant (3)..(3): Xaa in position 3 is any or no amino acid
  Variant (5)..(7): Xaa in position 5 to 7 is any amino acid
  Variant (10)..(10): Xaa in position 10 is Pro, Ser or Thr
  Variant (11)..(11): Xaa in position 11 is Ala, Gly or Pro
  Variant (14)..(14): Xaa in position 14 is Ala, Gln, Ser or Thr
YXXRXXXPEXXRYX

SEQ ID NO: 91954 - protein, 26 aa, Artificial sequence
  protein pattern
  Variant (2)..(2): Xaa in position 2 is Phe, Ile, Leu or Val
  Variant (3)..(3): Xaa in position 3 is Ala or Gly
  Variant (4)..(4): Xaa in position 4 is Cys or Thr
  Variant (5)..(7): Xaa in position 5 to 7 is any amino acid
  Variant (10)..(10): Xaa in position 10 is any or no amino acid
  Variant (12)..(12): Xaa in position 12 is any or no amino acid
  Variant (14)..(14): Xaa in position 14 is any amino acid
  Variant (16)..(16): Xaa in position 16 is any amino acid
  Variant (18)..(18): Xaa in position 18 is Gly or Ser
  Variant (19)..(19): Xaa in position 19 is any amino acid
  Variant (20)..(20): Xaa in position 20 is Gly, Asn or Ser
  Variant (21)..(22): Xaa in position 21 to 22 is any amino acid
  Variant (23)..(23): Xaa in position 23 is Asn, Gln, Ser or Thr
  Variant (24)..(25): Xaa in position 24 to 25 is any amino acid
  Variant (26)..(26): Xaa in position 26 is Ile, Met or Val
LXXXXXXWFXLXDXAXYXXXXXXXXX

SEQ ID NO: 91955 - protein, 17 aa, Artificial sequence
  protein pattern
  Variant (3)..(3): Xaa in position 3 is Lys or Arg
  Variant (4)..(4): Xaa in position 4 is any amino acid
  Variant (5)..(5): Xaa in position 5 is Ile, Met or Val
  Variant (8)..(8): Xaa in position 8 is Phe, Ile, Leu, Met or Val
  Variant (9)..(9): Xaa in position 9 is Ala, Glu or Thr
  Variant (11)..(13): Xaa in position 11 to 13 is any amino acid
  Variant (14)..(14): Xaa in position 14 is Ala, Ile or Val
  Variant (15)..(15): Xaa in position 15 is any amino acid
  Variant (16)..(16): Xaa in position 16 is Ala, Cys, Gly, Ser or Thr
  Variant (17)..(17): Xaa in position 17 is Ala, Cys, Ser or Thr
GRXXXYGXXLXXXXXXX

SEQ ID NO: 91956 - protein, 15 aa, Artificial sequence
  protein pattern
  Variant (2)..(2): Xaa in position 2 is Ala or Gly
  Variant (5)..(5): Xaa in position 5 is any amino acid
  Variant (6)..(6): Xaa in position 6 is Ala, Asn, Ser or Thr
  Variant (7)..(9): Xaa in position 7 to 9 is any amino acid
  Variant (10)..(10): Xaa in position 10 is Ile, Leu or Val
  Variant (11)..(11): Xaa in position 11 is Asp or Glu
  Variant (12)..(13): Xaa in position 12 to 13 is any amino acid
PXYWXXXXXXXXXGR

SEQ ID NO: 91957 - protein, 19 aa, Artificial sequence
  protein pattern
  Variant (2)..(2): Xaa in position 2 is any or no amino acid
  Variant (5)..(5): Xaa in position 5 is Ala or Ser
  Variant (6)..(6): Xaa in position 6 is any amino acid
  Variant (8)..(9): Xaa in position 8 to 9 is any or no amino acid
  Variant (11)..(11): Xaa in position 11 is any amino acid
  Variant (12)..(12): Xaa in position 12 is Gly, Ile or Leu
  Variant (13)..(14): Xaa in position 13 to 14 is any amino acid
  Variant (15)..(15): Xaa in position 15 is Ala, Gly, Ser or Thr
  Variant (16)..(16): Xaa in position 16 is any amino acid
  Variant (17)..(17): Xaa in position 17 is Ala, Gly, Ile or Val
  Variant (18)..(18): Xaa in position 18 is any amino acid
  Variant (19)..(19): Xaa in position 19 is Phe, Ile, Leu, Met or Val
AXVFXXQXXGXXXXXXXXX

SEQ ID NO: 91958 - DNA, 1560 bp, Saccharomyces cerevisiae
  CDS (1)..(1560)
atggtcgctataatacctcatgcttcctttaccacaattaaactaacccagaaaactgagggaagccaaatgccaactgaggagatctgcaaaatcaatatgaggactcgtaaatttgatgtgggcgggaattctcgagattttgagtgcttttattcgaattttgttcaaactgttatattgttgggcacttttttttactgtgttgaaaggcttcagccgtggtccattgttaccgctgatatatcttataaacaaatctttgtaaatgtctttgtggtgtgtttgataatggttggtctgatattcacaaaatattggcaacatggttacaaaagcctacccaagttcgataccatttacagtttatatttaccgtttatggtttcgttgttgttcgatacatcatctacggtgataaatactattttgatcctttcggtattaaattcatatagatggcgaactcagttggtagtgatcattttacagctctgcctcatattttttaattttgaggctggtgacaggttaaagaatattattagcatagtaataaattctttactgtcgttaattttgaagtatattgggcaattgaaaagtttagataatatcgactctaatctttttagtatcctattaaccaatattctgtacgtttcagaggctggcacagtacattttagaattttgaagggcattatccttgctctcacaacaataatttcaattaactatgtgctcaaaaaggtaatgcactttaaaccgtttatgctgtcaatatcctttgccatcgggcttccactttttgccaataccttcattcatttagaagacggtgaaaatccgctactttggctggtaaaatatatcttagagtctactattcgtcaaaagattttgtttgcttggtcttcaattcttatactgtccataccaagtatattgatcgagaaggacagtctatcgttgaacacctcccgaaaattgtggcatttcatcattttcttactcataataccgtcattccaaatggattcaaactttgtgaaaattgcattgtccggaacaataccagtcttcttatcaattgagtacataagatttcaaaacctaccgccgttaggatctgctattgaattacaactaagaaggtttgctgatgatagggaccacagcgggccattgatcatatcatacctttatttactcttcggaatatcaacacctttattaatgaataactctccaatgggtctaataggattgggaattggtgattccttagcatctattattggtaaaaggtatggccgcattcgttggaaaggtacacaaaaaactttagagggaactcttgcgtttatagtaacgagttttatcgtttgtttggtattgttacgttttgataaagctgcaatttttaaccacctaactactttacaattgcttaccctttgtacactgagtggagtgctagaaggtaatagtgtgcttaatgacaatattttgatacctgcatttatgatgatttgtgaaaaattaattactctttga

SEQ ID NO: 91959 - protein, 519 aa, Saccharomyces cerevisiae
MVAIIPHASFTTIKLTQKTEGSQMPTEEICKINMRTRKFDVGGNSRDFECFYSNFVQTVILLGTFFYCVERLQPWSIVTADISYKQIFVNVFVVCLIMVGLIFTKYWQHGYKSLPKFDTIYSLYLPFMVSLLFDTSSTVINTILILSVLNSYRWRTQLVVIILQLCLIFFNFEAGDRLKNIISIVINSLLSLILKYIGQLKSLDNIDSNLFSILLTNILYVSEAGTVHFRILKGIILALTTIISINYVLKKVMHFKPFMLSISFAIGLPLFANTFIHLEDGENPLLWLVKYILESTIRQKILFAWSSILILSIPSILIEKDSLSLNTSRKLWHFIIFLLIIPSFQMDSNFVKIALSGTIPVFLSIEYIRFQNLPPLGSAIELQLRRFADDRDHSGPLIISYLYLLFGISTPLLMNNSPMGLIGLGIGDSLASIIGKRYGRIRWKGTQKTLEGTLAFIVTSFIVCLVLLRFDKAAIFNHLTTLQLLTLCTLSGVLEGNSVLNDNILIPAFMMICEKLITL

SEQ ID NO: 91960 - DNA, 1548 bp, Kluyveromyces lactis NRRL Y-1140
  CDS (1)..(1548)
atgccaacttccacgttagctaaaggtgctacctcggatttaggcgttggaaatgtatattctaaagagaactcaaatgtaaacagcggatctaaaggcaatttgtcacgtgatagtatcatttccgaggtgttggacaaggtatttgaggctgatagagtgattcaattaaccatattggggcttagttcgcatctagtgtatgcgaagtatggttcggaaccatggttctcgcagcaattttctatggtcacgtcagtattgatggcatatgttgttaatttatggatgtctgcgaccaggactaatttgggagtcaacactcttccaacattcaatacgatatatttattttacatgcagttgctactttctacactatttgtgccacaatatctactgctgaataccgttttggccttttccattagtgatatatctgtctttttcaagatcccattgcagataatatttcttctgatgggagacgacggatctgctaacattgccaacgatgttaaggcattggttttgaattatttcttcatatttggtctttataagacttccaaattgaaatctttagacaagaccgagtgtcatatgttcgctcttctttgcactgatattttggccctcgttgagtctgactctatttatttccaagttttccaagtatgctttacaagttttatcgtcttggtaactgtcacttccgcagtgtcgtacggcctggaaagtgtgggtgctactcggtggatccgaaccttactcttgttgccaatgattgttgtgggattttcgtattatatccaaacgaatctcatcattaacaatgtcccaccgttcacatggcttatagattacatcggttcctctatgatcagactgaaaataatggggatctggttaggttctgcattattgttgttgcccagtgtgtttgcgttgaaatctaattggtctttgaatacgtcaagaaaagtttggcattttgcaatcttacccctcttgattccggcaatcatgatggattcaaattttgtgaaaattgcgttggctggaactgtaaacctttttctcattgtcgagtacattcgtttcctacatatttacccagtgggacactatttggacaaacatttgagatctttcgctgacttcagagatgaaaaggggccaatcattatttcctacctttatttcattatcggtatctctttgccctttttgatcaatggttccattatcggtatcatctcgctaggcgtaggtgattcattggcttccattattggtaaaaaatttggaagaaacagatggccaaatacttgtaaaactttcgagggcacttttgcattcattgcagctactggcataactacagtgattatgaaagtttactttaactttttcaccgaggtgtcgttcatgaatttggttcttgtatgtttcctagctggcatcttggaaggtaatagtactttgaatgataacttactaattccaactttcatgttgatattgttggaatctatgaaggaatag

SEQ ID NO: 91961 - protein, 515 aa, Kluyveromyces lactis NRRL Y-1140
MPTSTLAKGATSDLGVGNVYSKENSNVNSGSKGNLSRDSIISEVLDKVFEADRVIQLTILGLSSHLVYAKYGSEPWFSQQFSMVTSVLMAYVVNLWMSATRTNLGVNTLPTFNTIYLFYMQLLLSTLFVPQYLLLNTVLAFSISDISVFFKIPLQIIFLLMGDDGSANIANDVKALVLNYFFIFGLYKTSKLKSLDKTECHMFALLCTDILALVESDSIYFQVFQVCFTSFIVLVTVTSAVSYGLESVGATRWIRTLLLLPMIVVGFSYYIQTNLIINNVPPFTWLIDYIGSSMIRLKIMGIWLGSALLLLPSVFALKSNWSLNTSRKVWHFAILPLLIPAIMMDSNFVKIALAGTVNLFLIVEYIRFLHIYPVGHYLDKHLRSFADFRDEKGPIIISYLYFIIGISLPFLINGSIIGIISLGVGDSLASIIGKKFGRNRWPNTCKTFEGTFAFIAATGITTVIMKVYFNFFTEVSFMNLVLVCFLAGILEGNSTLNDNLLIPTFMLILLESMKE

SEQ ID NO: 91962 - DNA, 1830 bp, Debaryomyces hansenii CBS767
  CDS (1)..(1830)
atgcctccaaagaaacacaatacaagagggagaagttcccaagctgcaacctcatcttctacgggagtaaggtctacagcagcgatatttgccaatcctgatgaaagagttgatgatgcgataattgatggatcgacacagccagctgcatcggacgtaccagtaagtgatgaaatagatgatccatcgtcttattcatttccacttaattacatctacaaggtacaagatttcctaaatgataacttagatttgtgtaaatttgtccaacttttggttgttttatacattagtgaagtaatatacttgacttatggtgaacaattctgggaaaattatgcaattattgggttcaatttattaggtctttcgttggcgttgattttgggttaccaagcacagttaaaaaaacatttggcaaaccctgaacagtttgtaagaccggaattacctgaattcaaccatatttactctgtattcattccattgaccatttcatttcttctcaagctggagttcttattggtcaatttagctttgaataatttcataatcgatagcttgcatcctattcctaaatttatttcggctgtgatctttttccaagtgtacaatgaaaatgaggacatcaccattttcaggatgtttcaaataactttcatgcactacatgttacaatatgttatcacgttagcaaattcgggaaatgacgatacatctacatacgtatcggatgaagtcattgatgaggatgacacaataaacttggaattggttgaaaagaatgatgataagaagtatagatcaggtacaagtaccacgttgaacaaagctgaaatccagttgttgtgcttaatggttactaatttgttgtttgggttgaaggaggcagataattttaatttgcccttaatcattttgcagaagttaattatcagtttaatagtaagtttaatgctcatctatcctctctttaaagcttatgaaaactggagactgaaaatatttggagtcttcattattgttacgtttgctgggttatttacatttgttacaaattacttattggcgcctatactttcgaattctaatgccatcgtttggttgtgggaattcattgccgaatctgaagaaagagtccaaatcttaagtgcatggggaattttattactagtttccattccagcagttttcatcaattccaacagactttccctcaattcgagaagaaaggtatggcattatgtcatcttagtaatgattgcgtatccaagcttgccaagacaaccgatttttacgattataagtttgctcggatctatcgttgttttcataaccatggaaatcgtcagatataataaattcaccatattgggggaatggttatatgaacaactagttattttccaggactttaaggatttgaagggaccattgaatttatcttatattttcttgatcataggtgttactattccgatcgtttttgattactgtattaagcgtgagcttacgtgtaaatcgtttattggaataattggcttaggaattggcgattcgtttgcatcggttattggtaaacattttggtaccctaaagtggaagggaagctccaaatccgtccaaggaactgcttcttttattttcttctccatggttggattctactttgtcgataagtatattttaacgcaacacgtacataactgggaaaacttatttgtctgttgtatcctaggtggtgtgttagaaggtgtcagcaatttaaacgataacttcttgatccctagtgtcatgtacatttcattacaggctcttgataatatttag

SEQ ID NO: 91963 - protein, 609 aa, Debaryomyces hansenii CBS767
MPPKKHNTRGRSSQAATSSSTGVRSTAAIFANPDERVDDAIIDGSTQPAASDVPVSDEIDDPSSYSFPLNYIYKVQDFLNDNLDLCKFVQLLVVLYISEVIYLTYGEQFWENYAIIGFNLLGLSLALILGYQAQLKKHLANPEQFVRPELPEFNHIYSVFIPLTISFLLKLEFLLVNLALNNFIIDSLHPIPKFISAVIFFQVYNENEDITIFRMFQITFMHYMLQYVITLANSGNDDTSTYVSDEVIDEDDTINLELVEKNDDKKYRSGTSTTLNKAEIQLLCLMVTNLLFGLKEADNFNLPLIILQKLIISLIVSLMLIYPLFKAYENWRLKIFGVFIIVTFAGLFTFVTNYLLAPILSNSNAIVWLWEFIAESEERVQILSAWGILLLVSIPAVFINSNRLSLNSRRKVWHYVILVMIAYPSLPRQPIFTIISLLGSIVVFITMEIVRYNKFTILGEWLYEQLVIFQDFKDLKGPLNLSYIFLIIGVTIPIVFDYCIKRELTCKSFIGIIGLGIGDSFASVIGKHFGTLKWKGSSKSVQGTASFIFFSMVGFYFVDKYILTQHVHNWENLFVCCILGGVLEGVSNLNDNFLIPSVMYISLQALDNI

SEQ ID NO: 91964 - DNA, 1761 bp, Candida albicans SC5314
  CDS (1)..(1761): transl_table=12
atggcaggaagaaaaagaaaaaacgaatctaagaaaccaaatcctactgcaagatcaactgccgcaatctttcaggatataaataatttagatgaattagaatctaaaactgaaatcgacaacaacaagagtaatgaagaaaccaatgatgaacctgcaggcagtcctgaagaagatattgccaatgctagtttcccatttaactatttgtatcgagtacaagaccatttaaacgaaaatatgtcagtagtacatgctgttcaatgtttggttagtttatttttcatccaaatggtatatttagatagagttaaaatcattgattattccaaagatgagcatttaccaatgcaagtaattgcggttatttttttcaattgggtaggtgtgttcctttgtaccgttttagggatggttaagaacaagagtgaaaacaaagtaatgccagatttcaattacatttatagtttgttacttccagcattattgagtgttttacatttcaataaagattggcttttggttaatctttcattgaattattttgttattgattcaatgaaccctattttcaatttgttttcaagtttagggttttatgaagtttataaagatgaggaaactactttgatttccactttccaatttggtcaatatgctgcaatctttttggtattccaatatatattaaactatataaacacagcagaaactgacgacgacagtaatgctaaaccaagaacaagtttgaaaagactggaaattcatttgattgtgcttttacttatcaatatcttattcaatcccgcatttaccggtggaaatgttttgccaatgaaaatattccaaaaacttattattagttttattatttcaagtttctttacattcccaattattagttttactccggggattcttgttattttgatttttggcggtatattctacggattcacaatcttccaattaacaccaattttaaatgataatgctgtaaattggttatacaattatgtcatgaaagatgaaacaagagttcacattatctcaatatgggtggcaatgtcagtgaccattatcccaattgtgttttattttgctaattatttgaggcttaatactagaagaaagatttggcatggcttaatggtgattgcattatgtttcaccccagaaatattatttggtcaaatcgagtttacattaataagtttattaggaacattaattgttttcatgatagtggaaggtattagatacaatagactttcttatattggagaattcttacacaagactttatctgttttccaagatacaaaagatttacaaggacctttgaatttatcttacatttatttattagcaggggttactatccctatagtttacgattatttggtcaataaagatactgtcactattatcagatatagtggattgattactttaggtgttggtgatacatttgcttctgtgattggtaaaaagtttggtacgttcaaatggaagggcagcaacaaatcagtacaaggaacaattgcttttattgttagtgttctcctttgtacttatagtgctgattactatttgacccagaataatacaaattatcttccaataaaaaattgggaaaatacctttgttactatacttttggcaggattcttggaaggaacttgtgatattaatgacaattacctcatcccaatatttttccctatttcctacgaactattaaacaaaagttacaaataa

SEQ ID NO: 91965 - protein, 586 aa, Candida albicans SC5314
MAGRKRKNESKKPNPTARSTAAIFQDINNLDELESKTEIDNNKSNEETNDEPAGSPEEDIANASFPFNYLYRVQDHLNENMSVVHAVQCLVSLFFIQMVYLDRVKIIDYSKDEHLPMQVIAVIFFNWVGVFLCTVLGMVKNKSENKVMPDFNYIYSLLLPALLSVLHFNKDWLLVNLSLNYFVIDSMNPIFNLFSSLGFYEVYKDEETTLISTFQFGQYAAIFLVFQYILNYINTAETDDDSNAKPRTSLKRSEIHLIVLLLINILFNPAFTGGNVLPMKIFQKLIISFIISSFFTFPIISFTPGILVILIFGGIFYGFTIFQLTPILNDNAVNWLYNYVMKDETRVHIISIWVAMSVTIIPIVFYFANYLRLNTRRKIWHGLMVIALCFTPEILFGQIEFTLISLLGTLIVFMIVEGIRYNRLSYIGEFLHKTLSVFQDTKDLQGPLNLSYIYLLAGVTIPIVYDYLVNKDTVTIIRYSGLITLGVGDTFASVIGKKFGTFKWKGSNKSVQGTIAFIVSVLLCTYSADYYLTQNNTNYLPIKNWENTFVTILLAGFLEGTCDINDNYLIPIFFPISYELLNKSYK

SEQ ID NO: 91966 - DNA, 25 bp, Artificial sequence
  primer
atggtcgctataatacctcatgctt

SEQ ID NO: 91967 - DNA, 28 bp, Artificial sequence
  primer
tcaaagagtaattaatttttcacaaatc

SEQ ID NO: 91968 - protein, 508 aa, Artificial sequence
  consensus sequence
  Variant (2)..(42): Xaa in position 2 to 42 is any amino acid
  Variant (43)..(49): Xaa in position 43 to 49 is any or no amino acid
  Variant (51)..(51): Xaa in position 51 is any amino acid
  Variant (53)..(54): Xaa in position 53 to 54 is any amino acid
  Variant (57)..(64): Xaa in position 57 to 64 is any amino acid
  Variant (66)..(66): Xaa in position 66 is any amino acid
  Variant (68)..(134): Xaa in position 68 to 134 is any amino acid
  Variant (135)..(173): Xaa in position 135 to 173 is any or no amino acid
  Variant (175)..(189): Xaa in position 175 to 189 is any amino acid
  Variant (191)..(257): Xaa in position 191 to 257 is any amino acid
  Variant (258)..(266): Xaa in position 258 to 266 is any or no amino acid
  Variant (269)..(277): Xaa in position 269 to 277 is any amino acid
  Variant (279)..(280): Xaa in position 279 to 280 is any amino acid
  Variant (282)..(284): Xaa in position 282 to 284 is any amino acid
  Variant (286)..(293): Xaa in position 286 to 293 is any amino acid
  Variant (295)..(304): Xaa in position 295 to 304 is any amino acid
  Variant (307)..(308): Xaa in position 307 to 308 is any amino acid
  Variant (311)..(311): Xaa in position 311 is any amino acid
  Variant (314)..(329): Xaa in position 314 to 329 is any amino acid
  Variant (330)..(332): Xaa in position 330 to 332 is any or no amino acid
  Variant (334)..(335): Xaa in position 334 to 335 is any amino acid
  Variant (337)..(337): Xaa in position 337 is any amino acid
  Variant (339)..(339): Xaa in position 339 is any amino acid
  Variant (341)..(344): Xaa in position 341 to 344 is any amino acid
  Variant (346)..(348): Xaa in position 346 to 348 is any amino acid
  Variant (350)..(351): Xaa in position 350 to 351 is any amino acid
  Variant (353)..(359): Xaa in position 353 to 359 is any amino acid
  Variant (361)..(366): Xaa in position 361 to 366 is any amino acid
  Variant (368)..(369): Xaa in position 368 to 369 is any amino acid
  Variant (371)..(371): Xaa in position 371 is any amino acid
  Variant (373)..(374): Xaa in position 373 to 374 is any amino acid
  Variant (376)..(377): Xaa in position 376 to 377 is any amino acid
  Variant (380)..(382): Xaa in position 380 to 382 is any amino acid
  Variant (385)..(389): Xaa in position 385 to 389 is any amino acid
  Variant (391)..(393): Xaa in position 391 to 393 is any amino acid
  Variant (395)..(402): Xaa in position 395 to 402 is any amino acid
  Variant (403)..(412): Xaa in position 403 to 412 is any or no amino acid
  Variant (414)..(414): Xaa in position 414 is any amino acid
  Variant (416)..(416): Xaa in position 416 is any amino acid
  Variant (419)..(419): Xaa in position 419 is any amino acid
  Variant (422)..(423): Xaa in position 422 to 423 is any amino acid
  Variant (426)..(426): Xaa in position 426 is any amino acid
  Variant (430)..(431): Xaa in position 430 to 431 is any amino acid
  Variant (433)..(435): Xaa in position 433 to 435 is any amino acid
  Variant (437)..(440): Xaa in position 437 to 440 is any amino acid
  Variant (442)..(444): Xaa in position 442 to 444 is any amino acid
  Variant (447)..(448): Xaa in position 447 to 448 is any amino acid
  Variant (451)..(480): Xaa in position 451 to 480 is any amino acid
  Variant (481)..(485): Xaa in position 481 to 485 is any or no amino acid
  Variant (487)..(487): Xaa in position 487 is any amino acid
  Variant (489)..(489): Xaa in position 489 is any amino acid
  Variant (493)..(496): Xaa in position 493 to 496 is any amino acid
  Variant (500)..(500): Xaa in position 500 is any amino acid
  Variant (504)..(507): Xaa in position 504 to 507 is any amino acid
YXXXXXXXXXXXXXXXXXXXXXXXXXXXXXXXXXXXXXXXXXXXXXXXXPXFXXIYXXXXXXXXSXLXXXXXXXXXXXXXXXXXXXXXXXXXXXXXXXXXXXXXXXXXXXXXXXXXXXXXXXXXXXXXXXXXXXXXXXXXXXXXXXXXXXXXXXXXXXXXXXXXXXXXXXXXXLXXXXXXXXXXXXXXXLXXXXXXXXXXXXXXXXXXXXXXXXXXXXXXXXXXXXXXXXXXXXXXXXXXXXXXXXXXXXXXXXXXXXXXXXXXXXWLXXXXXXXXXRXXIXXXWXXXXXXXXPXXXXXXXXXXLNXXRKXWHXXXXXXXXXXXXXXXXXXXFXXIXLXGXXXXFXXXEXXRXXXXXXXGXXXXXXLXXFXDXXDXXGPXXXSYXXXXXGXXXPXXXXXXXXXXXXXXXXXXGXIXLGXGDXXASXIGKXXGXXXWXXXXKXXXGTXXFIXXXXXXXXXXXXXXXXXXXXXXXXXXXXXXXXXXXLXGXLEGXXXXNDNXLIPXXXXI

SEQ ID NO: 91969 - protein, 38 aa, Artificial sequence
  protein pattern
  Variant (2)..(2): Xaa in position 2 is any amino acid
  Variant (4)..(4): Xaa in position 4 is Gly, Ser or Thr
  Variant (7)..(7): Xaa in position 7 is Ile or Val
  Variant (10)..(10): Xaa in position 10 is Ser or Thr
  Variant (11)..(11): Xaa in position 11 is Phe or Leu
  Variant (14)..(14): Xaa in position 14 is Ile or Val
  Variant (18)..(18): Xaa in position 18 is His, Lys or Arg
  Variant (19)..(19): Xaa in position 19 is Phe or Tyr
  Variant (21)..(22): Xaa in position 21 to 22 is any amino acid
  Variant (23)..(23): Xaa in position 23 is Lys or Arg
  Variant (25)..(25): Xaa in position 25 is any amino acid
  Variant (26)..(26): Xaa in position 26 is Gly or Asn
  Variant (27)..(27): Xaa in position 27 is Ser or Thr
  Variant (28)..(28): Xaa in position 28 is any amino acid
  Variant (30)..(30): Xaa in position 30 is Ser or Thr
  Variant (31)..(31): Xaa in position 31 is Phe, Leu or Val
  Variant (32)..(32): Xaa in position 32 is Glu or Gln
  Variant (35)..(35): Xaa in position 35 is any or no amino acid
  Variant (37)..(37): Xaa in position 37 is any amino acid
  Variant (38)..(38): Xaa in position 38 is Phe or Ile
GXIXLGXGDXXASXIGKXXGXXXWXXXXKXXXGTXAXX

SEQ ID NO: 91970 - protein, 47 aa, Artificial sequence
  protein pattern
  Variant (2)..(2): Xaa in position 2 is any amino acid
  Variant (3)..(4): Xaa in position 3 to 4 is any or no amino acid
  Variant (6)..(7): Xaa in position 6 to 7 is any or no amino acid
  Variant (9)..(9): Xaa in position 9 is Ile, Leu or Met
  Variant (10)..(10): Xaa in position 10 is any amino acid
  Variant (11)..(11): Xaa in position 11 is Ile, Met or Val
  Variant (13)..(13): Xaa in position 13 is any amino acid
  Variant (14)..(14): Xaa in position 14 is Ile or Val
  Variant (16)..(16): Xaa in position 16 is Phe or Tyr
  Variant (17)..(18): Xaa in position 17 to 18 is any amino acid
  Variant (19)..(19): Xaa in position 19 is Phe, Ile or Leu
  Variant (20)..(21): Xaa in position 20 to 21 is any amino acid
  Variant (22)..(22): Xaa in position 22 is Ile, Leu or Val
  Variant (24)..(25): Xaa in position 24 to 25 is any amino acid
  Variant (26)..(26): Xaa in position 26 is Ile or Leu
  Variant (27)..(29): Xaa in position 27 to 29 is any amino acid
  Variant (31)..(32): Xaa in position 31 to 32 is any amino acid
  Variant (34)..(34): Xaa in position 34 is Ala or Gln
  Variant (36)..(36): Xaa in position 36 is any amino acid
  Variant (37)..(37): Xaa in position 37 is Lys or Arg
  Variant (39)..(40): Xaa in position 39 to 40 is any amino acid
  Variant (43)..(43): Xaa in position 43 is Ile or Leu
  Variant (44)..(44): Xaa in position 44 is any amino acid
  Variant (45)..(45): Xaa in position 45 is Ile or Leu
GXXXVXXFXXXEXXRXXXXXXXGXXXXXXLXXFXDXXDXXGPXXXSY

SEQ ID NO: 91971 - protein, 53 aa, Artificial sequence
  protein pattern
  Variant (2)..(4): Xaa in position 2 to 4 is any amino acid
  Variant (5)..(6): Xaa in position 5 to 6 is any or no amino acid
  Variant (9)..(10): Xaa in position 9 to 10 is any amino acid
  Variant (11)..(11): Xaa in position 11 is Phe or Tyr
  Variant (12)..(12): Xaa in position 12 is Ile or Val
  Variant (13)..(14): Xaa in position 13 to 14 is any amino acid
  Variant (15)..(15): Xaa in position 15 is Asp or Ser
  Variant (16)..(17): Xaa in position 16 to 17 is any amino acid
  Variant (19)..(20): Xaa in position 19 to 20 is any amino acid
  Variant (22)..(22): Xaa in position 22 is Ile, Leu or Met
  Variant (23)..(23): Xaa in position 23 is any amino acid
  Variant (24)..(24): Xaa in position 24 is Ala or Ile
  Variant (26)..(29): Xaa in position 26 to 29 is any amino acid
  Variant (30)..(30): Xaa in position 30 is Ile, Leu or Val
  Variant (31)..(32): Xaa in position 31 to 32 is any amino acid
  Variant (33)..(33): Xaa in position 33 is Ile or Leu
  Variant (35)..(42): Xaa in position 35 to 42 is any amino acid
  Variant (43)..(44): Xaa in position 43 to 44 is any or no amino acid
  Variant (47)..(47): Xaa in position 47 is Ser or Thr
  Variant (48)..(48): Xaa in position 48 is Arg or Ser
  Variant (51)..(51): Xaa in position 51 is Ile, Leu or Val
NXXXXXWLXXXXXXXXXRXXIXXXWXXXXXXXXPXXXXXXXXXXLNXXRKXWH

SEQ ID NO: 91972 - protein, 23 aa, Artificial sequence
  protein pattern
  Variant (2)..(2): Xaa in position 2 is Phe, Ile or Val
  Variant (6)..(6): Xaa in position 6 is Asn, Thr or Val
  Variant (7)..(7): Xaa in position 7 is Cys or Ser
  Variant (8)..(8): Xaa in position 8 is Asp, Asn, Thr or Val
  Variant (9)..(9): Xaa in position 9 is Ile or Leu
  Variant (13)..(14): Xaa in position 13 to 14 is any or no amino acid
  Variant (16)..(17): Xaa in position 16 to 17 is any or no amino acid
  Variant (19)..(19): Xaa in position 19 is any amino acid
  Variant (20)..(20): Xaa in position 20 is Phe or Val
  Variant (21)..(21): Xaa in position 21 is Phe or Met
  Variant (22)..(22): Xaa in position 22 is any amino acid
GXLEGXXXXNDNXXIXXPXXXXI

SEQ ID NO: 91973 - DNA, 1779 bp, Saccharomyces cerevisiae; identical to SEQ ID NO: 56423
  CDS (1)..(1779)

SEQ ID NO: 91974 - protein, 592 aa, Saccharomyces cerevisiae; identical to SEQ ID NO: 56424

SEQ ID NO: 91975 - DNA, 1803 bp, Oryza sativa (japonica cultivar-group); identical to SEQ ID NO: 56499
  CDS (1)..(1803)

SEQ ID NO: 91976 - protein, 600 aa, Oryza sativa (japonica cultivar-group); identical to SEQ ID NO: 56500

SEQ ID NO: 91977 - DNA, 1725 bp, Xylella fastidiosa 9a5c
  CDS (1)..(1725): transl_table=11
ttgttccgccataaaaccaaaccgtttgacctggaaagggtccggtgcgtcgagagcaatgacccaggcattccaggatcccatcctgacaccgggaagacctacaatgctacctcactccactcccggcggttttgctttatggcatccgattttctgcccgtacatcgggcactgttatctgtttccgacaaaacagggctggtcgagttggcgcgcgcgctgctggcctacaacattgaattactgtctaccggtgggaccgcgacaatcatccgcgaggctggtctcccagtgcaggatgtggccgacctgacaggcttcccagaaatgatggacggccgcgtaaaaacactgcaccccatggtacacggtggtttgctcggacgcgccggtatcgacgacgccgtgatggccaaacacggcatcgcaccgatcgacctgctgatactgaatctgtatcccttcgaacagatcactgccaaaaaagattgcacgctagccgatgcagtggacaccattgatattggtggcccggcgatgctgcgctcggcggcaaagaatttcgcgcgcgtggctgtggcaacgtcaccggatcagtatcctgatctgcttgctgaactgcaggcgcaccacggccagctttccgccgaaaagcgtttcgcattggccgtggcggcgttcaaccacgttgcccagtacgatgcggcaatcagcaattatctgtcgagcgtgtccgacatgcacacaacgttgccgttgcgccatgaattcccagctcagttaaacaataccttcgtaaagatgacagaactccgctacggggaaaatccacatcaaacaggtgcgttctaccgcgatgtacatccgcaacccgggacgctggccaccttccagcaactccaaggcaagacactcagctacaacaatctcgtcgatgccgatgccgcatgggaatgcgtacgtcaattcgaagcaccggcctgcgtcatcgtcaaacatgccaacccttgtggtgtcgcagtcgggaaggcgtgcagtgatgcttacgaagaagcgtatgccactgatccaacgagtgcgtttggcggcattattgcggtgaaccgtatgctggatgtggcgaccatgcagagcattctagatcgtcaatttgtcgaggtgttgatagcacccgattacgatgcagacgccctcgcctatgcgaccaagaaggccaatgtgcgcgtgctgcgtatccccagcactggcgtgatgaatcgctatgatttcaaacggatcggctctggactattggtgcaaagcaccgacagtctgaacatccattcggatgcactgaaggtggtcactcagcttgctcccaccgatgcacaacagcgtgatctgttgtttgcatggcatgtcgccaagtatgtcaagtcaaatgcgattgtttacgccaaggacaatcgcacgattggtattggcgccggacaaatgagtcgcgtgtattcagcgcgtatcgctggtatcaaggcggccgatgcacatttggctgtcacaggttcggtgatggcaagtgatgccttctttccattccgtgacagcattgatgccgctgctgccgctggcatcaaggcggtgattcagccgggcggttcgatgcgcgataacgaggtgatcgcggcggccgatgaacacggcattgccatggtcttcaccgggatacggcatttccggcattga

SEQ ID NO: 91978 - protein, 574 aa, Xylella fastidiosa 9a5c
MFRHKTKPFDLERVRCVESNDPGIPGSHPDTGKTYNATSLHSRRFCFMASDFLPVHRALLSVSDKTGLVELARALLAYNIELLSTGGTATIIREAGLPVQDVADLTGFPEMMDGRVKTLHPMVHGGLLGRAGIDDAVMAKHGIAPIDLLILNLYPFEQITAKKDCTLADAVDTIDIGGPAMLRSAAKNFARVAVATSPDQYPDLLAELQAHHGQLSAEKRFALAVAAFNHVAQYDAAISNYLSSVSDMHTTLPLRHEFPAQLNNTFVKMTELRYGENPHQTGAFYRDVHPQPGTLATFQQLQGKTLSYNNLVDADAAWECVRQFEAPACVIVKHANPCGVAVGKACSDAYEEAYATDPTSAFGGIIAVNRMLDVATMQSILDRQFVEVLIAPDYDADALAYATKKANVRVLRIPSTGVMNRYDFKRIGSGLLVQSTDSLNIHSDALKVVTQLAPTDAQQRDLLFAWHVAKYVKSNAIVYAKDNRTIGIGAGQMSRVYSARIAGIKAADAHLAVTGSVMASDAFFPFRDSIDAAAAAGIKAVIQPGGSMRDNEVIAAADEHGIAMVFTGIRHFRH

SEQ ID NO: 91979 - DNA, 1689 bp, Agrobacterium tumefaciens str. C58; identical to SEQ ID NO: 56165
  CDS (1)..(1689): transl_table=11

SEQ ID NO: 91980 - protein, 562 aa, Agrobacterium tumefaciens str. C58; identical to SEQ ID NO: 56166

SEQ ID NO: 91981 - DNA, 1662 bp, Synechocystis sp. PCC 6803
  CDS (1)..(1662): transl_table=11
atggttgtcgtcaggcgatcgaggcagtgtaccatttccaaccgcctagtctggacaggaaagggtaagggagaccaactcctgggggataatgggggatggaaaaattaccaagaggagaaggcaatggcccgtttagccctgctgagtgtgtccgacaaaagtggcattgtggaactggcccaacggctagtgaatgaatttcagtttgacctgatcagtagtggtggtactgccaaaaccctcaaagaagctggggttcctgtcaccaaggtgagtgattacaccggggcaccagaaattttgggtggacgggtcaaaacgttgcatccccgcatccatgggggtattttagcccggcgggatttgcccagtgaccaggcggatttagaagctaacgatattcgtccgttagatctggtcgtggttaacctttatccctttgagcaaaccattgctaaaccgggggtcaccgttgctgaagcagtggaacagattgatattggtggcccggccatgattcgagccaccgccaaaaactttgcccataccactgtcctcaccaatcccaaccagtacgaagcctatctccaagctctgcaggaacagggggaaatacccttggctttgcgccaacaattcgctggggaagcctttgccctcaccaatgcctatgaccaggcgatcgccaattatttcagtggtttaagtggggacagtgcaaaccaatttggccttagcggtacattgcggcaaccgttgcggtatggggaaaatccccaccaaagtgcaggttggtatcaaactgggcgggaagccaccggctgggccaaggccgagaaactccagggcaaggaactgagctataacaatttggtggatttggaagcagcccggcgcattatcaacgaattcgatgtcagggaaccggcggcggtgattttaaagcacactaatccctgcggtgtcgccctggcccccacattggtagaagcctatcaaaaagcctttaatgctgatgccacttccgcttttgggggcattgtcgccttgaatcaacccctggatggacccacggcggcggccatggtcaaaacttttttggaatgtattgtggccccgggctgtgatgctgaagcccaggaaattctagctaagaaaaacaatttgcgggtattgattctccccgatctggccaccggccccagccaaaccattaaggcgatcgccggaggatttttagtacagtcagcggatgatgaacgggaagaccccagcacttggcaggtggtgacggaaaaacaacccagtggggaggagttggcggaactagcttttgcctggaaagtgtgcaaacacgttaaatccaacgccatcaccatcaccaaaaataaaaccaccttgggggtgggagcaggacaaatgaatcgagtcggctcggtggaaattgcccttaaacaagcgggcacagaagcccagggagcttgcttggccagtgatgcgttctttccctttgacgattctgtccgcaccgccgccgccgccggcattaccaccatcatccaaccgggggggtccatgcgggaccaggattccatccaagcggccaacgaattgggcttagtgatgattttcactggggtgcgccatttcctccactag

SEQ ID NO: 91982 - protein, 553 aa, Synechocystis sp. PCC 6803; identical to SEQ ID NO: 56154

SEQ ID NO: 91983 - DNA, 1617 bp, Methanosarcina acetivorans C2A
  CDS (1)..(1617): transl_table=11
ttggtaaaaagggcactgctcagcgtctcggacaagacaggaattacggaatttgcacgcgggcttgaagcacttggcgtgaagatcatctcaacaggcgggactgcgaaaatccttcgcgacgccggcatcgaggttaccgatgtctcggaggtcacaggctatccggagatgatggggggaagagtcaaaactctccacccgagaattcatggcgggctcctatgtctgcgggaaagcaaagaacagatggaggaagctgaaaaagaagatatctccctcatagatctggttgccgtgaacctgtacccctttgaaataacgatttccaaagagggtgtggaacttgaagaagccatcgaaaacatagacatcgggggcccgaccctcctccgttcggcagctaagaactatcgttcggtaacagtaatatccaacccttcggactacgggcatgtccttaaggaactgcgctcaagtgggataatctctgacaaaacccgtgctaacctcgcggttaaagctttcaggcataccgctgactatgatgcagccatcgatacctatctgagcaggaccctgcttggagaagaggtgctgcgcttgaagtttaccgatggggtcaaactccgctatggagagaactggcaccagagtgcctgtttctacaaagatcccggtatcgaaggcccgagtttggcaaaagcagttcagctccatggaaaagaactttcctacaacaactatgttgatgctgacaatgcccttcagacggtcaaagagctgggaaatgcctctcctgcagtagcaattgtaaaacacaataacccttgcggacttgccactggagacactctccttcaggccctgcaggctgcctgggacggagacccgatttcggcttatgggagcataatctgtacaaatgaaacttttgacctcgaagctgcaacttttctgaacgggaaattcatagaaatcattcttgctcctgatttcaagcccgatgctcttgaatacctgaaaaataaaagtgaaaatctgaggctcctgaagcttccggaactaagagaggttttcgggacggaatacacttacaaatacgtaatcggaggcatgctcaagcagagccgggatataggtatctatgacaaatgggaatctgttaccgaagtttcctatcccgaaggcaaacgcaccctttcggagttctgccttaaagcctgcaaagccacaaaatccaatgccgtgatccttgcccacgaatatgagcctggatatttcatggtgctgggtatgggggcaggacagcctaacagggtcgactcgatccgcaaactggcagccacaaaggcagttgaaaatctgaaggtaatctatgaacgtgagcagcctgctgtagccttcgaagaatattgccagaagattctgtccgaatgtgtaatggcatcggatgctttcttccccttcgatgacagcgtagtccatgcagcagaaaataacattcgttatattgtctccccgggcggatctatccgggacaacgaagttattgctactgcaaacaggcttggaattgccatggtttttacaggcatgcggcatttcctccactga

SEQ ID NO: 91984 - protein, 538 aa, Methanosarcina acetivorans C2A
MVKRALLSVSDKTGITEFARGLEALGVKIISTGGTAKILRDAGIEVTDVSEVTGYPEMMGGRVKTLHPRIHGGLLCLRESKEQMEEAEKEDISLIDLVAVNLYPFEITISKEGVELEEAIENIDIGGPTLLRSAAKNYRSVTVISNPSDYGHVLKELRSSGIISDKTRANLAVKAFRHTADYDAAIDTYLSRTLLGEEVLRLKFTDGVKLRYGENWHQSACFYKDPGIEGPSLAKAVQLHGKELSYNNYVDADNALQTVKELGNASPAVAIVKHNNPCGLATGDTLLQALQAAWDGDPISAYGSIICTNETFDLEAATFLNGKFIEIILAPDFKPDALEYLKNKSENLRLLKLPELREVFGTEYTYKYVIGGMLKQSRDIGIYDKWESVTEVSYPEGKRTLSEFCLKACKATKSNAVILAHEYEPGYFMVLGMGAGQPNRVDSIRKLAATKAVENLKVIYEREQPAVAFEEYCQKILSECVMASDAFFPFDDSVVHAAENNIRYIVSPGGSIRDNEVIATANRLGIAMVFTGMRHFLH

SEQ ID NO: 91985 - DNA, 1617 bp, Methanosarcina mazei Go1
  CDS (1)..(1617): transl_table=11
ttggtaaaaagggcattgctcagcgtctcagacaagacaggaattgtagaatttgcacgcgggctcgaagcacttggcgtgaaaattatctcaacaggcgggaccgcgaaaatccttcgcgatgcagacattgaggttactgatgtttcggaagtcacaggctacccggagatgatgggaggaagagtcaagaccctccacccgagaattcatggaggacttttatgcctccgggaaagcaaagaacagatggaggaagctgcaaaagaagacatctcccttatcgacctgatagccgtaaacctttacccctttgaaataaccgtttccagagagaatgtggagcttgaagaagccattgaaaatatagatatcggaggccctacccttctccgctccgcagccaagaactaccgctcggtgacggtgttatctgacccctcggactacgggcgtatccttaaggagctgcgctcaagcgggataatctctgataaaacccgtgctgaacttgcggtaaaagctttcaggcacacagccgactatgatgcggcaattgacacatatcttagcaggacccttcttggggaagaagttctccacctgaaatttgctgacggtgtaaagcttcgctatggagaaaactggcaccagaaagcatatttctataaagactctgcaataaaaggtccgagtctggcaaaagccatccagcttcatggaaaagaactctcctataacaactatgtggatgcggacaacgccctccagactgtcaaagaactcgggaacgcttcccctgccgtagcaatagtaaaacacaataacccatgcggacttgctaccggagagtccctccttcaggcgctgcattctgcctgggacggggaccctatttcggcttatgggagtataatctgcacaaacgaggtttttgacctggaagctgcaacttttttgaacgggaaattcgtagaaattatccttgcccctgatttcaagcccgatgcacttgaatacctgaaaaagaaaagcgaaaatctgaggctcctgaaacttcctgacctcagggagggcttcggagcggaatacacctacaaatacgtcataggcggcatgctcaagcagagccgggacatagggatctacgaaaaatgggagtctgttactgaagtaccttatcctgaaaataagcgtgccctctcggagttttgccttaaagcatgtaaagctacaaagtccaatgccgtgatccttgcttatgaatatgaaccagggaatttcatggtcctgggaatgggagccgggcagcctaacagggtagattccatccgtaaactggcagccacaaaagcagttgaaaacctgaaagtaatctacgaacgtgagcagcctgctgtaccctttgaagaatactgccagaagattatgtcagaatgtgtaatggcttcagatgctttcttcccatttgatgacagcgtggtccatgcagctgagaataatatccgctatatcgtttcccctggtggctcgataagggacaatgaggtcattgctactgcaaacagacttggagttgcccttgttttcacaggaatgcggcatttccttcactga

SEQ ID NO: 91986 - protein, 538 aa, Methanosarcina mazei Go1
MVKRALLSVSDKTGIVEFARGLEALGVKIISTGGTAKILRDADIEVTDVSEVTGYPEMMGGRVKTLHPRIHGGLLCLRESKEQMEEAAKEDISLIDLIAVNLYPFEITVSRENVELEEAIENIDIGGPTLLRSAAKNYRSVTVLSDPSDYGRILKELRSSGIISDKTRAELAVKAFRHTADYDAAIDTYLSRTLLGEEVLHLKFADGVKLRYGENWHQKAYFYKDSAIKGPSLAKAIQLHGKELSYNNYVDADNALQTVKELGNASPAVAIVKHNNPCGLATGESLLQALHSAWDGDPISAYGSIICTNEVFDLEAATFLNGKFVEIILAPDFKPDALEYLKKKSENLRLLKLPDLREGFGAEYTYKYVIGGMLKQSRDIGIYEKWESVTEVPYPENKRALSEFCLKACKATKSNAVILAYEYEPGNFMVLGMGAGQPNRVDSIRKLAATKAVENLKVIYEREQPAVPFEEYCQKIMSECVMASDAFFPFDDSVVHAAENNIRYIVSPGGSIRDNEVIATANRLGVALVFTGMRHFLH

SEQ ID NO: 91987 - DNA, 1773 bp, Drosophila melanogaster
  CDS (1)..(1773)
atgagctccagcaagattgctcttctcagtgtgtcggacaagacgggcctgctcgacttgggcaagagtttggtggcactgggctttgacctggttgccagtggaggcactgcaactagcttgcgtggcgctggcctgaaggtgagggatgtctcggagattacaggagcacctgagatgctcggtggacgtgtgaagacgctgcacccggctgtgcatgctggaatcctttcccgcaccaccgactctgatctggctgacatgcgcaagcagggcttcgatcttatccagctggtggtctgcaatctgtaccccttcgccagcaccgtagcgaagcctgatgttacgctggccgatgccgtggagaacatcgatattggaggcgttactctgctccgggcggctgctaagaatcaccagcgagtcacagttgtctgcgaagcagtggattatgatcgtgtcctgtcggagttgaaggcttcggggaataccaccgtggagacgcgtcaggctctggctctcaaggcattcacgcacaccgccacctacgatgatgccatctcagattacttcaggaaacagtatggatctggggtgtcccagctaccgttgcgctatggcatgaatccccaccagaagccggctcagctctacacgcagctggccaagcttccactgacggtcctcaatgcctcgccgggatttatcaacctgtgcgacgccctcaacggttggcagttggttagggaactgaagaaggctctgcagctgccggcggccaccagctttaagcacgtttctccagcgggtgcggctgttggagtgcctctaaatccggcacaggccaagctgtgcatggtggatgatctgtacgagcagttgacacctctggcaacggcctatgctcgtgcccgtggagccgaccgcatgagctccttcggcgactttgtggccctctctgatgtgtgcgatgttgtgacggccaggataatctcgcgagaggtgtccgatggtattattgccgcgggttatgagcccgaagctctggagatcctgaagaaaaagaagaatggcggctactgtatactgcagatggaccccaactacgaaccctccgcggtggagcgcaagactatttttggtctgacgctggagcagaagcgcaacgatgctgtcatcgacgcctcgctcttttccaatgtggtgagcaagcgtggtcctctgcccgaggtggctgtgcgggatctgatcgtggccaccattgccttgaagtacactcagagcaactccgtgtgctacgcccgcgatggccaggtcgtgggcatcggtgccggccagcagtcgaggattcactgcacccgcttggcgggcgagaaggcggacaactggtggctgcgtcagcatcccagcgtggccggcatgaagttcaaggctggtgtgaagcgggcggagatctctaatgcaatcgacaattacgtaaacggaactgtgggcaaggacatgcctttgtcgcagttcgagggaatgttcgataaggcaccagcccaactgaccagtgagcaaaaagtggaatggttaaagcagctgagtggcgtggccttgggatccgatgccttcttccccttccgtgataatatcgatcgcgctagcctgagcggcgtctcctacatagccagtcccgcaggatccaccaatgatgctggtgtcattgccgcctgcgatgagcacggtatcatcatggcccataccaatctgcgattgttccaccattag

SEQ ID NO: 91988 - protein, 590 aa, Drosophila melanogaster
MSSSKIALLSVSDKTGLLDLGKSLVALGFDLVASGGTATSLRGAGLKVRDVSEITGAPEMLGGRVKTLHPAVHAGILSRTTDSDLADMRKQGFDLIQLVVCNLYPFASTVAKPDVTLADAVENIDIGGVTLLRAAAKNHQRVTVVCEAVDYDRVLSELKASGNTTVETRQALALKAFTHTATYDDAISDYFRKQYGSGVSQLPLRYGMNPHQKPAQLYTQLAKLPLTVLNASPGFINLCDALNGWQLVRELKKALQLPAATSFKHVSPAGAAVGVPLNPAQAKLCMVDDLYEQLTPLATAYARARGADRMSSFGDFVALSDVCDVVTARIISREVSDGIIAAGYEPEALEILKKKKNGGYCILQMDPNYEPSAVERKTIFGLTLEQKRNDAVIDASLFSNVVSKRGPLPEVAVRDLIVATIALKYTQSNSVCYARDGQVVGIGAGQQSRIHCTRLAGEKADNWWLRQHPSVAGMKFKAGVKRAEISNAIDNYVNGTVGKDMPLSQFEGMFDKAPAQLTSEQKVEWLKQLSGVALGSDAFFPFRDNIDRASLSGVSYIASPAGSTNDAGVIAACDEHGIIMAHTNLRLFHH

SEQ ID NO: 91989 - DNA, 1635 bp, Yersinia pestis KIM; identical to SEQ ID NO: 56211
  CDS (1)..(1635): transl_table=11

SEQ ID NO: 91990 - protein, 544 aa, Yersinia pestis KIM; identical to SEQ ID NO: 56212

SEQ ID NO: 91991 - DNA, 1611 bp, Buchnera aphidicola str. Bp (Baizongia pistaciae)
  CDS (1)..(1611): transl_table=11
atgaagtatacactaaaaattatgacaaatagaaatgtaataaaaaacgtattaattagtgtttccgatacgtcaaatatcattgaattttctaaatcactaatatctaaaaacataaaattatttgcaactaaaggtacagctaacttcttaaaaaaaaataatatttatgcaacagatattactaattatactaattttccagaaattatgaatggaagaataaaaactttacatcataaaatatatgctagcatattagcacaaccaaaacatgataaaaaaacaatagaaaaatataatattatattaatggatatagttgtaatcaatttttacccatttgaagaagcttcaaataatacgaacttacatttaaatgacataatagaacatattgatattggtggacctgccatagttcgagcagcagcaaaaaattataaaaacgttcttgtagtcacgcaacctaatttataccaatccatcgtcaatgaaatgaatttaaataacaacattatttccgaaacaacaaaactaaaatttgcaactatagcttttaaacatactatgaattacgataataacatttatcaatatttatctaaaaaaaataaaactgtacccaaaaatactcaattacaaacgttactaccatcacatttaacaattaattttaaaaaaaaacaagatctttgctatggcgaaaacaaacaacagcaagcatcatggtatacaaacacttcaaaaaatacatctggaagaatgaaaattaaacaattacaaggaaaaattttatcatataataatctttctgatattcatttagcattatcttgtattcacgagtttaacaaaactacttgcgctattataaaacatggaaatccttgcggagttgcaacagcaaaaaataatgatcaagcttataaattagcatacgaaacagatccaatttcagctttcggaggtataattgtatttaatcaaaaattaaacgacgtaacagctagaaaaattattaaaacacaattctcagaaataattttagcacctgatttcacgcaagaagcaaaaaaaattttcgataaaaaacccaacttaagaatcataaaatatgatccaaactacaattatctgaattacaatatagacattaaatctatatatggagatatcttagtacaaagtaacacaaatagtattattaatataaatcaatgggatatagttagtaaaaaacgtccaaacgaacaagaaataaatgacgcaaaatttgctttacgagtagtaaaacatttaaaatctaattctatagtattaattaaaaaccaaattacgataagtatcggatcaggacaaactagtcgaatagacgcaacaaaaatcgcaatttataaagcaaacaataataatatttctttaaatcatacaacattagcttcagatgcattttttccattttcagatagcattgatttaatatctaaatcaggaataacatgtattgttcaaccaggggggtcaattcgagataatgaaattataatgtcagctaataaatataacatttccatgatctttactaaacaaagatattttaaacactaa

SEQ ID NO: 91992 - protein, 536 aa, Buchnera aphidicola str. Bp (Baizongia pistaciae)
MKYTLKIMTNRNVIKNVLISVSDTSNIIEFSKSLISKNIKLFATKGTANFLKKNNIYATDITNYTNFPEIMNGRIKTLHHKIYASILAQPKHDKKTIEKYNIILMDIVVINFYPFEEASNNTNLHLNDIIEHIDIGGPAIVRAAAKNYKNVLVVTQPNLYQSIVNEMNLNNNIISETTKLKFATIAFKHTMNYDNNIYQYLSKKNKTVPKNTQLQTLLPSHLTINFKKKQDLCYGENKQQQASWYTNTSKNTSGRMKIKQLQGKILSYNNLSDIHLALSCIHEFNKTTCAIIKHGNPCGVATAKNNDQAYKLAYETDPISAFGGIIVFNQKLNDVTARKIIKTQFSEIILAPDFTQEAKKIFDKKPNLRIIKYDPNYNYLNYNIDIKSIYGDILVQSNTNSIININQWDIVSKKRPNEQEINDAKFALRVVKHLKSNSIVLIKNQITISIGSGQTSRIDATKIAIYKANNNNISLNHTTLASDAFFPFSDSIDLISKSGITCIVQPGGSIRDNEIIMSANKYNISMIFTKQRYFKH

SEQ ID NO: 91993 - DNA, 1590 bp, Salmonella enterica subsp. enterica serovar Typhi Ty2
  CDS (1)..(1590): transl_table=11
atgcaacaacgtcgtccagtccgccgcgctttgctcagtgtttctgacaaggccggtatcatcgaattcgcccaggcactttccgcacgcggtgtggagctgctgtctacggggggcaccgcccgcctgttagcagaaaaaggcctgccggtgaccgaagtttccgattacaccggtttcccggaaatgatggatggacgcgtaaagaccctgcatccaaaagtacacggtggcatcctcggtcgtcgcggtcaggacgatgccattatggaacagcaccacatcgcccctatcgatatggttgtcgttaacctatatccgttcgccgaaaccgtggcacgcgaaggctgctcgctggcagatgcagtagagaacattgatatcggcggcccgaccatggtgcgctctgctgctaagaaccataaagacgtcgccatcgtggtgaagagcagcgactacgacgccattattaaagagatggatgctaacgaaggttctctgaccctcgacacccgtttcgatctcgcgattaaagccttcgaacacaccgccgcctacgacagcatgatcgccaactacttcggcagcatggttccggcctaccacggtgaaagcaaagaagccgccggtcgcttcccgcgtacgctgaacctgaacttcattaagaagcaggatatgcgctacggcgagaacagccaccagcaggctgccttctatatagaagagaatgtgaaagaagcatccgttgccaccgcacagcagattcagggcaaagcgctctcttataacaatatcgccgataccgatgcggcgctggaatgcgtgaaagagttcaacgagccagcctgcgtgatcgtcaagcacgccaacccgtgcggcgtggcggtaagtacctcgattctcgatgcttatgaccgtgcgtataaaacagacccgacctccgcgttcggcggcattatcgccttcaaccgcgagctggatgccgaaaccgcgcaggccatcatctcccgtcagttcgtggaagtgctcatcgccccatccgcaagcgaagaagcgctgaaaatcacctcagccaagcagaacgtccgtgttctgacctgcggccaatgggcaagccgcgttccgggcctggatttcaaacgcgttaacggcggtctgctggttcaggacagggatctgggtatggtgagcgaagctgaactgcgcgtggtgtccaaacgccagccgaccgagcaggaactgcgcgatgcgctgttctgctggaaggtagccaagttcgtgaaatccaacgccattgtgtatgccaaagagaacatgactatcggcataggcgcaggccagatgagccgcgtgtactccgcgaaaatcgctggcattaaagcggctgacgaaggtctggaagtgaaaggctctgctatggcttccgacgcgttcttcccgttccgtgatggcattgatgccgctgccgctgtcggcgtgagctgcgttatccagcctggcggttctatccgtgatgatgaagtcattgccgccgccgacgaacacggcattgcgatgatcttcaccgacatgcgccacttccgccattaa

SEQ ID NO: 91994 - protein, 529 aa, Salmonella enterica subsp. enterica serovar Typhi Ty2
MQQRRPVRRALLSVSDKAGIIEFAQALSARGVELLSTGGTARLLAEKGLPVTEVSDYTGFPEMMDGRVKTLHPKVHGGILGRRGQDDAIMEQHHIAPIDMVVVNLYPFAETVAREGCSLADAVENIDIGGPTMVRSAAKNHKDVAIVVKSSDYDAIIKEMDANEGSLTLDTRFDLAIKAFEHTAAYDSMIANYFGSMVPAYHGESKEAAGRFPRTLNLNFIKKQDMRYGENSHQQAAFYIEENVKEASVATAQQIQGKALSYNNIADTDAALECVKEFNEPACVIVKHANPCGVAVSTSILDAYDRAYKTDPTSAFGGIIAFNRELDAETAQAIISRQFVEVLIAPSASEEALKITSAKQNVRVLTCGQWASRVPGLDFKRVNGGLLVQDRDLGMVSEAELRVVSKRQPTEQELRDALFCWKVAKFVKSNAIVYAKENMTIGIGAGQMSRVYSAKIAGIKAADEGLEVKGSAMASDAFFPFRDGIDAAAAVGVSCVIQPGGSIRDDEVIAAADEHGIAMIFTDMRHFRH

SEQ ID NO: 91995 - DNA, 1581 bp, Coxiella burnetii RSA 493; identical to SEQ ID NO: 56175
  CDS (1)..(1581): transl_table=11

SEQ ID NO: 91996 - protein, 526 aa, Coxiella burnetii RSA 493; identical to SEQ ID NO: 56176

SEQ ID NO: 91997 - DNA, 1536 bp, Bacillus cereus ATCC 14579
  CDS (1)..(1536): transl_table=11
atgaaaaagcgtgcattagtaagtgtttcagataaaacaggagtagtagaatttgttaaagggttactagaacaagggattgaagttatttcaacaggtggtacgaaaaagttattagaagaaaacggtttacaagtaattggtatttctgaagtaactggtttccctgaaattatggatggccgtgtgaaaacgttacatccaaatattcatggtggtctattagcagttcgtgataatgaaacacatgtaacacaaatgaatgaattaggtatggagccaattgactttgttgttgttaacttatatccatttaaagaaacaatcgctaagcctgatgtaacatttgctgatgcaattgaaaatattgatatcggtggcccgacaatgattcgctctgctgcgaaaaatcataaattcgtatctgtaattgtagatccagtagattatgatattgtgttagcagaactgaaagagaacggtgaagtagcagaggaaacaaaacgtaaactagcagcgaaagtattccgtcatacagcagcgtatgatgcgttaatttctaactacttaacagagcaaatgggtgaagaaagtccagaaacattaactgtgacatttgagaaaaagcaagacttacgttatggcgagaacccacatcaaaaggcaactttctataaagcgccattcgcggcaacttcttctgttgcatacgcagaacaattacacggtaaagaattatcgtataacaatattaatgatgcagacgcagcacttagcatcgtaaaagaatttacagaaccagcagtagtagcagtaaaacatatgaatccatgtggtgttggagtaggaactgatattcacgaagcatatactcgcgcttatgaagcagatccagtatcaattttcggcggtattattgcagcaaatcgtgaaattgataaagctacagcagaaaagttacatgaaattttcttagaaattgttatcgcaccttcgttctcgcaagaagctttagaagtgttacaaagtaagaagaacttacgtttattaactataaatattgaaaaagcgacaagtgcaagcaaaaaactaacttctgtacaaggtggacttctcgttcaagaagaagatacgttatcattagatgaaagtacaatttcaattccaacgaaacgtgaaccttcagagcaagaatggaaagatttaaaactagcttggaaagttgtaaaacatgtgaaatcaaacgcaattgttttagcgaaagatgacatgacaattggcgtcggtgcgggacagatgaaccgtgtaggttctgcaaaaatcgcaattacacaagctggtgaaaaagcacaaggtagcgcacttgcatctgatgctttcttcccaatgccagatacattagaagaagcagcaaaagcaggaattacagcaatcattcaaccaggcggatcaatccgtgatgaagattctattaaagtggcagatacttatgggattgctatggtgttcactggcgtacgtcatttcaaacactaa

SEQ ID NO: 91998 - protein, 511 aa, Bacillus cereus ATCC 14579
MKKRALVSVSDKTGVVEFVKGLLEQGIEVISTGGTKKLLEENGLQVIGISEVTGFPEIMDGRVKTLHPNIHGGLLAVRDNETHVTQMNELGMEPIDFVVVNLYPFKETIAKPDVTFADAIENIDIGGPTMIRSAAKNHKFVSVIVDPVDYDIVLAELKENGEVAEETKRKLAAKVFRHTAAYDALISNYLTEQMGEESPETLTVTFEKKQDLRYGENPHQKATFYKAPFAATSSVAYAEQLHGKELSYNNINDADAALSIVKEFTEPAVVAVKHMNPCGVGVGTDIHEAYTRAYEADPVSIFGGIIAANREIDKATAEKLHEIFLEIVIAPSFSQEALEVLQSKKNLRLLTINIEKATSASKKLTSVQGGLLVQEEDTLSLDESTISIPTKREPSEQEWKDLKLAWKVVKHVKSNAIVLAKDDMTIGVGAGQMNRVGSAKIAITQAGEKAQGSALASDAFFPMPDTLEEAAKAGITAIIQPGGSIRDEDSIKVADTYGIAMVFTGVRHFKH

SEQ ID NO: 91999 - DNA, 1791 bp, Arabidopsis thaliana; identical to SEQ ID NO: 56181
  CDS (1)..(1791)

SEQ ID NO: 92000 - protein, 596 aa, Arabidopsis thaliana; identical to SEQ ID NO: 56182

SEQ ID NO: 92001 - DNA, 1650 bp, Candidatus Blochmannia floridanus
  CDS (1)..(1650): transl_table=11
atgtcatcatcattatctattcgtcaagcactaattagtgtatttgataaatctaatctattacatttttcaaaatcactctctcatcttggcataaaattactatcaactgaaggaacagcgttaatattaactaacgctggattaacagtaaacaaaatctctgactatactaattttccagaaattatgaatggacaagttaaaactttacatcataaaatatgcgctggaattttaagcagaaaaaatttagatgaatctataatacacaaatacggaattcaacctattgatatggttatagttaatttttatccctttcatttaattctacaaaacaaacaacacgattccgaaaaaatattagaatatattgatattggaggacctaatatggtcagagctgccgcaaagaattacaaaaacaccgtaatcattgttgataacaatgattacgataatattttaaacgaaataaacacacttcatggatctattagtttaaatactcgattaaatttagccgcaaaagcattcaaatatatcaaacaatatgacaccatgatctcagattattttcaacatcaactaaaattacagcctaataaacctcatcatactatccaaaaaagaatacaaccatttaatcattcccaattacctgaacatatacaatgcgtaaatttaacttttaaaaaaaaacaaacaatgcgttatggagaaaatccacaccaatactctgtattatatacagaaacaaacgctcctacagaaaatggatctgtagctacctctcaacaattacaaggaaaaacattatcttataacaatattattgatatggatactgccttagaatgtgtaaaaatgtttgatcaacccacttgtgtaattgtaaaacattcaaatccttgtggagtagcaacagcagataatattttcactgcatataataaagcttatcaagctgatcctacatctgcattcggaggtattatcgctttcaattacccgataaataacaaaaaattagcacaatctataattaaccaaaattttgtagaagcaataattgctccgtatgttcatcaagattgccttaatattttatctcaaaaaaaaaatatacgtgtattacaatccggtatgtggaataaaaatactctgaaatcaatttcaaatatagactttaaacgcattccagaaggtttattgattcaagaacatgatacacacacaattgatcatacaaaatcctttcaagtagttaccaataaacaacctactatacaagaaacacaagatgcattattctgctggaaaatagtaaaatttgttaaatctaacgccattgtttgcggaaaagatcaacaaaccactggtattggaacaggacaaacgaatagaattcttgctgtaaaaattgccacttctttaagattacaaaataccgtacacatttcaggatcatcaatggcatctgacgctttttttccttttccagatagcataaaagaagctgcttccatgggtattagttgcataatacaaccaggcggttctattcaagacccagaaataatcaaaatagctaatcaacacaagatttctatgattttcaccaaaatcagacattttcgtcattaa

SEQ ID NO: 92002 - protein, 549 aa, Candidatus Blochmannia floridanus
MSSSLSIRQALISVFDKSNLLHFSKSLSHLGIKLLSTEGTALILTNAGLTVNKISDYTNFPEIMNGQVKTLHHKICAGILSRKNLDESIIHKYGIQPIDMVIVNFYPFHLILQNKQHDSEKILEYIDIGGPNMVRAAAKNYKNTVIIVDNNDYDNILNEINTLHGSISLNTRLNLAAKAFKYIKQYDTMISDYFQHQLKLQPNKPHHTIQKRIQPFNHSQLPEHIQCVNLTFKKKQTMRYGENPHQYSVLYTETNAPTENGSVATSQQLQGKTLSYNNIIDMDTALECVKMFDQPTCVIVKHSNPCGVATADNIFTAYNKAYQADPTSAFGGIIAFNYPINNKKLAQSIINQNFVEAIIAPYVHQDCLNILSQKKNIRVLQSGMWNKNTLKSISNIDFKRIPEGLLIQEHDTHTIDHTKSFQVVTNKQPTIQETQDALFCWKIVKFVKSNAIVCGKDQQTTGIGTGQTNRILAVKIATSLRLQNTVHISGSSMASDAFFPFPDSIKEAASMGISCIIQPGGSIQDPEIIKIANQHKISMIFTKIRHFRH

SEQ ID NO: 92003 - DNA, 1554 bp, Prochlorococcus marinus str. MIT 9313
  CDS (1)..(1554): transl_table=11
atggctcccatcgccttgttgagcgtttcaaacaaacatgggattgtgcctctagcggaatccttgcatcgcatgcatgggtttcagctgctttccagcggtggcacagccaaagtgctggaggatgccggtctgcccgtgacgcgggttgctgagcacacaggtgcagcggaaattcttggaggaagggtgaagactctgcatcctcgtgtccatggaggcatcttggcgatgcggggcgaccctgatcatgaggtcgatctggagcagcatcagatccctcccattgatgtggtggtggtgaatctttacccgtttcgggaaacagtggccaatccgcaggtgagttgggaaactgcaattgagaatattgatatcggtggccccgccatggtgcgagcggcggcaaagaaccatgcgcatgtggctgtgctcacgaggccggatcagtacgacagattcctagtggctttaagtgatggtgtggatgaccagctccgtcgtgagcttgcccttgaagcctttgagcacaccgctgcctatgacgtggccatcagccattggatgggcgagcggctgactgagcaagcttcccaatggcttgaggctattccccttaggcagaggctgcgctatggcgagaatccccatcagcatgcggcttggtacagcgctccgcagcagggttggggaggtgccattcagttgcagggcaaggagctcagtaccaacaatttgcttgatttggaagctgccctggccactgttcgggagtttggatatggcacggaaggcgctcaacaagctgttcaagatgctgccgtggtggttaagcacaccaacccttgtggcgtcgcgattggcactggcgtggcgtcggccttaagccgtgccttggatgcggatcgggtgagtgcatttggagggatcgtggctctgaatggattggtggatgccacgactgctcgggagctcaccagtttgttcttggagtgtgttgtggcaccaggctttgaaccagaagctcgggaaatccttgccaccaaggccaacttacgtttgttggaactggcaccaggtgccattgatgcggctggtcgtgatcacattcgcaccatcctcggcggggtgttggtgcaggaccaagacgatcaatcgattgatcccaccagttggactgtggccagcaaacgctcgcctaatgctgaagaaaacgcggatctcacctttgcatggcgcctggtgagacatgtgcgctctaacgccatcgtggtggctcgtgctggccagagtctcggagttggagcgggccagatgaaccgagtcggctcggcgcgactagcccttgaggcagctggcgatcaagccaggggagctgttttggctagtgatggcttcttcccctttgatgacacggtgcgtttggcggctaaccatggcatctgtgccgtaatccagcctggtgggagcaagcgtgatgcagattcaatcgctgtttgcgatgattttggtctggcaatggtgttgacgggaaagcgccacttcttgcattaa

SEQ ID NO: 92004 - protein, 517 aa, Prochlorococcus marinus str. MIT 9313
MAPIALLSVSNKHGIVPLAESLHRMHGFQLLSSGGTAKVLEDAGLPVTRVAEHTGAAEILGGRVKTLHPRVHGGILAMRGDPDHEVDLEQHQIPPIDVVVVNLYPFRETVANPQVSWETAIENIDIGGPAMVRAAAKNHAHVAVLTRPDQYDRFLVALSDGVDDQLRRELALEAFEHTAAYDVAISHWMGERLTEQASQWLEAIPLRQRLRYGENPHQHAAWYSAPQQGWGGAIQLQGKELSTNNLLDLEAALATVREFGYGTEGAQQAVQDAAVVVKHTNPCGVAIGTGVASALSRALDADRVSAFGGIVALNGLVDATTARELTSLFLECVVAPGFEPEAREILATKANLRLLELAPGAIDAAGRDHIRTILGGVLVQDQDDQSIDPTSWTVASKRSPNAEENADLTFAWRLVRHVRSNAIVVARAGQSLGVGAGQMNRVGSARLALEAAGDQARGAVLASDGFFPFDDTVRLAANHGICAVIQPGGSKRDADSIAVCDDFGLAMVLTGKRHFLH

SEQ ID NO: 92005 - DNA, 1578 bp, Chromobacterium violaceum ATCC 12472; identical to SEQ ID NO: 56189
  CDS (1)..(1578): transl_table=11

SEQ ID NO: 92006 - protein, 525 aa, Chromobacterium violaceum ATCC 12472; identical to SEQ ID NO: 56190

SEQ ID NO: 92007 - DNA, 1533 bp, Wolinella succinogenes DSM 1740; identical to SEQ ID NO: 56193
  CDS (1)..(1533): transl_table=11

SEQ ID NO: 92008 - protein, 510 aa, Wolinella succinogenes DSM 1740; identical to SEQ ID NO: 56194

SEQ ID NO: 92009 - DNA, 1590 bp, Photorhabdus luminescens subsp. laumondii TTO1; identical to SEQ ID NO: 56197
  CDS (1)..(1590): transl_table=11

SEQ ID NO: 92010 - protein, 529 aa, Photorhabdus luminescens subsp. laumondii TTO1; identical to SEQ ID NO: 56198

SEQ ID NO: 92011 - DNA, 1593 bp, Rhodopseudomonas palustris CGA009; identical to SEQ ID NO: 56199
  CDS (1)..(1593): transl_table=11

SEQ ID NO: 92012 - protein, 530 aa, Rhodopseudomonas palustris CGA009; identical to SEQ ID NO: 56200

SEQ ID NO: 92013 - DNA, 1566 bp, Geobacter sulfurreducens PCA; identical to SEQ ID NO: 56201
  CDS (1)..(1566): transl_table=11

SEQ ID NO: 92014 - protein, 521 aa, Geobacter sulfurreducens PCA; identical to SEQ ID NO: 56202

SEQ ID NO: 92015 - DNA, 1524 bp, Bdellovibrio bacteriovorus HD100; identical to SEQ ID NO: 56207
  CDS (1)..(1524): transl_table=11

SEQ ID NO: 92016 - protein, 507 aa, Bdellovibrio bacteriovorus HD100; identical to SEQ ID NO: 56208

SEQ ID NO: 92017 - DNA, 1602 bp, Treponema denticola ATCC 35405; identical to SEQ ID NO: 56209
  CDS (1)..(1602): transl_table=11

SEQ ID NO: 92018 - protein, 533 aa, Treponema denticola ATCC 35405; identical to SEQ ID NO: 56210

SEQ ID NO: 92019 - DNA, 1536 bp, Bacillus cereus ATCC 10987
  CDS (1)..(1536): transl_table=11
atgaaaaagcgtgcattagtaagtgtttcagataaaacaggagtagtagaatttgttaaaggtttactagaacaagggatcgaagttatatcaacaggcggtacaaaaaaattactagaagaaaacggcttacaagtaatcggtatttctgaagtaactggtttcccagaaattatggatggtcgtgtgaaaacattacatccaaatattcatggtggtctattagcagttcgcgataatgaaacgcatgtagcacaaatgaatgagttaggtatagagccaattgattttgttatcgttaacttatacccattcaaagaaacaatcgctaagcctgatgtaacatttgctgatgcaattgaaaatattgatattggtggcccaacaatgattcgctctgctgcgaaaaatcacaaatttgtatcggtaattgtagatccagtagattacgatgttgtattagcagaactggaagagaacggtgaagtaaaagaagaaacgaaacgtaaattagcagcgaaagtattccgccatacagcagcatatgatgcgttaatctctaactacttaacagagcaaatgggtgaagaaagcccagaaacattaactgtgacatttgagaaaaagcaagacttacgttatggcgagaacccacatcaaaaggcaactttctataaagcgccattcgcagcaacttcttctgttgcatacgcagaacaattacacggtaaagaattatcatataacaatattaatgatgcagacgcagcacttagcatcgtaaaagaatttacagagccagcagtagtagcagtaaaacatatgaatccatgtggtgttggagtaggaactgatattcatgaagcatacacacgtgcttatgaagcggatccagtatcaatctttggagggattattgcagcgaatcgtgagatcgacaaatctacagctgaaaagttacatgaaattttcttagaaattattattgcaccttctttctcaaaagaagctttggaagtgttgcaaaataagaaaaacttacgtttactaactgtaaatattgaaaaatcgacaagtgcgagcaaaaaactaacttctgtacaaggcggacttcttgttcaagaggaagatacgttatcattagatgaaagtacaatttcaattccaacaaaacgtgaaccttcagagcaagaatggaaagatttaaaactagcttggaaagttgtaaaacatgtgaagtcaaatgcaattgttttagcgaaagatgatatgacaattggtgtcggtgcgggacagatgaaccgtgtaggttctgcaaaaattgcaattacacaagctggtgaaaaagcacaaggtagcgcgcttgcatctgatgctttcttcccaatgccagatacattagaagaagcagcaaaagcaggaattacagcaatcattcaaccaggcggatcaatccgtgatgaagattctattaaagtggcggatacgtatgggattgcgatggtgttcactggcgtacgtcatttcaaacactaa

SEQ ID NO: 92020 - protein, 511 aa, Bacillus cereus ATCC 10987
MKKRALVSVSDKTGVVEFVKGLLEQGIEVISTGGTKKLLEENGLQVIGISEVTGFPEIMDGRVKTLHPNIHGGLLAVRDNETHVAQMNELGIEPIDFVIVNLYPFKETIAKPDVTFADAIENIDIGGPTMIRSAAKNHKFVSVIVDPVDYDVVLAELEENGEVKEETKRKLAAKVFRHTAAYDALISNYLTEQMGEESPETLTVTFEKKQDLRYGENPHQKATFYKAPFAATSSVAYAEQLHGKELSYNNINDADAALSIVKEFTEPAVVAVKHMNPCGVGVGTDIHEAYTRAYEADPVSIFGGIIAANREIDKSTAEKLHEIFLEIIIAPSFSKEALEVLQNKKNLRLLTVNIEKSTSASKKLTSVQGGLLVQEEDTLSLDESTISIPTKREPSEQEWKDLKLAWKVVKHVKSNAIVLAKDDMTIGVGAGQMNRVGSAKIAITQAGEKAQGSALASDAFFPMPDTLEEAAKAGITAIIQPGGSIRDEDSIKVADTYGIAMVFTGVRHFKH

SEQ ID NO: 92021 - DNA, 1779 bp, Strongylocentrotus purpuratus
  CDS (1)..(1779)
atggccgcccaagaacttgcaatcttgagtgttttcaacaaggaaggtctgattgactttgccacccagcttcatcgcttaggtctacagctgattgcctctggaggaacatccaaggctctcaaggcggctggtatccctgtcaaagatgtgagtgacatcacaggagtagctgagatgcttggagggagagtaaaaaccctccatccagccgtccatggaggtatcctggcaaggaaaactgaggaagatgctgctgatctgctgaaaaataactaccaatacatcagggtggtagcatgtaacctgtatccctttgagcagactatcgccaaaccggaagtagccgtggcagatgctgtggagaacatcgatattggtggtgtgactctcctgagggctgcagctaagaatcatgctagagtaaccactgtgtgcgatcccacagactactccaacattatccaagagatggttgagaggccagataatgatacaaccattgagagtaggaaggcactagcagtcaaggccttcaatcacacagccacctacgacatggccatctccaactacttcaggcagcagtacagcgagggtcagtccaaccttcctctgcggtacggcaccaatcctcaccagaaaccggcccagctatccaccttcctccccaagctaccgctagaggtcatcaacgggtcaccaggattcatcaatctctgcgatgctttcaatgcttggcagctggttaaggaactcaaagctgctctgggtctccctgctgcttcttccttcaagcatgtcagtcctgcaggtgctgctgttggagttcccttgtccgctgaggaagctaaggtttctatggtggatgacatgatagacacgcttactccattagctacagcatatgcaagggcaaggggtgcagacagaatgtcatcttttggtgattttgttgctctttccgatgtctgtgatctaccaacagctaaaatcatctctagagaggtctctgatggcatcattgccccaggatatgaccctgaggctctagctgtgctagccaagaagaaaggaggcaaatattgtgtgcttaagatggatcctacctatgagcctgatgcaatggagacacgtacattgtatggaatgcagctgactcagctcaggaacaacgcagacatcaccaagaaaatgtttggcaatgtggttacagacaagaacgtgttgagtgacggcgcccttcgtgacctgattgttgccacaatagcagtcaagtacatccaatctaactcgatctgctacgctaagaacggtcaggtcatcggcacaggagcaggccagcagtcccgtattcactgcacaagacttgcgggagacaaggctaacaactggtggctccgtcatcaccccaatgttcagtcaatgaagttcaagcctggtgtgaagagagccgagatgtccaatgtcatagatgtctatgtgaacggaactgtaggagaggacatgagccgagagacttgggaagggatgttggaaaatccacctgccattctgaccgaggctgagcgcaaggaatggatctcacagctgagtgatgtcgctttgagttcagatgctttcttcccattcagagacaacattgaccgagctagtcagagtggcgtgtcctacattgctagtcctaaaggagctttggcagaccaggctatcatcgaggcatgtaatgaacaccatatcatcctctcccatactgacgtcagactgttccatcattag

SEQ ID NO: 92022 - protein, 592 aa, Strongylocentrotus purpuratus
MAAQELAILSVFNKEGLIDFATQLHRLGLQLIASGGTSKALKAAGIPVKDVSDITGVAEMLGGRVKTLHPAVHGGILARKTEEDAADLLKNNYQYIRVVACNLYPFEQTIAKPEVAVADAVENIDIGGVTLLRAAAKNHARVTTVCDPTDYSNIIQEMVERPDNDTTIESRKALAVKAFNHTATYDMAISNYFRQQYSEGQSNLPLRYGTNPHQKPAQLSTFLPKLPLEVINGSPGFINLCDAFNAWQLVKELKAALGLPAASSFKHVSPAGAAVGVPLSAEEAKVSMVDDMIDTLTPLATAYARARGADRMSSFGDFVALSDVCDLPTAKIISREVSDGIIAPGYDPEALAVLAKKKGGKYCVLKMDPTYEPDAMETRTLYGMQLTQLRNNADITKKMFGNVVTDKNVLSDGALRDLIVATIAVKYIQSNSICYAKNGQVIGTGAGQQSRIHCTRLAGDKANNWWLRHHPNVQSMKFKPGVKRAEMSNVIDVYVNGTVGEDMSRETWEGMLENPPAILTEAERKEWISQLSDVALSSDAFFPFRDNIDRASQSGVSYIASPKGALADQAIIEACNEHHIILSHTDVRLFHH

SEQ ID NO: 92023 - DNA, 1779 bp, Nasonia vitripennis
  CDS (1)..(1779)
atgtccggcggaaaactcgctctcttgagtgtctccgacaaaacaaatctccttccttttgccaaaaaactccatgagtttggtctgactctggtggcatctggaggtacagctaaatctttgagagatgctggacttccagtcaaagatgtctcagacattactggtgcacctgaaatgcttggtggacgtgtcaagacattgcacccagcagttcatggtggtatcctggccagattaactgaatcagacaaggctgatcttgccaagcaaaactttgaatacattcgcattgtggtttgcaatctctatccttttgtcaacaccatttccaagcctgatgtgactatcgaagatgccgtagaaaacgttgatattggtggagtgacgttgttgagggcagcagccaagaatcattccagagtaacagttatctgtgaccccaatgattacgaaaaggttatctcagaattacaaaattctgcagacaaggatacttctttgcaaacaagacagactctggctgtcaaggccttcacccacactgcccagtacgacgacgcgatctcggactacttccgtcgtcagtacagcgccaacgtatcccagctgtcccttcgttatggtatgaacccacaccagaagcctgcccagatctttacgactctggacaagctgcccctgactgttgtcaatggctcacccggcttcatcaacctttgcgatgcccttaacggttaccagctcgttaaggagctgaaggcggctctcggcttgcccgcagctacctctttcaagcacgtcagtcccgctggtgccgctgttggtattcccctcaataaggttcacgctaagctttgtcaggtcgatgacattgcggatcaattgacacctctggctactgcatacgccagagcccgtggagccgacagaatgtccagtttcggagacttcgtcgctctgtctgacccctgcgacttgcctactgccaaaatcatctctagagaggtatctgacggtatcatcgcgccaggctacaccgaggaagctctggctgtcctccgcaagaagaagaacggcggatactgcgtactgcagatcgacccctcgtacgagccttcgccaattgaacgcaaggttctgttcggtctgacgatggagcagcgtcgcaacgatgccaagatcaacagttcgaccttctccaacatcgtcaccaagcacaagaatctttctgaggctggtctccgtgatctgatcgtcgccacgatcgccgtcaagtacacccagagtaactcggtctgttacgccagagacggacaggtcatcggtatcggtgccggtcagcagtccaggatacactgcaccaggcttgccggtgacaaggccgacaactggtggctgcgtcaacaccccaaggttaccggaatgaaattcaagaagggcgtcaagcgcgctgagatctcaaacgccatcgacaactacgttaatggtacgatcggtcgcgatatggaagagagcgcatgggcggctatgtacgaggtcgtaccagagaagctcacccaagctgacaaggacgattgggcgaagcagctcgacaacgtggccatcagcagtgatgccttcttcccattccgtgacaacgtcgacagggctagactgagtggcgtacgttacatcggcgcacctgccggctcgacaaacgacgaggctgtgattgaagcttgcaacgagcacggcattgtcttggctcacactggcatccgacttttccaccattaa

SEQ ID NO: 92024 - protein, 592 aa, Nasonia vitripennis
MSGGKLALLSVSDKTNLLPFAKKLHEFGLTLVASGGTAKSLRDAGLPVKDVSDITGAPEMLGGRVKTLHPAVHGGILARLTESDKADLAKQNFEYIRIVVCNLYPFVNTISKPDVTIEDAVENVDIGGVTLLRAAAKNHSRVTVICDPNDYEKVISELQNSADKDTSLQTRQTLAVKAFTHTAQYDDAISDYFRRQYSANVSQLSLRYGMNPHQKPAQIFTTLDKLPLTVVNGSPGFINLCDALNGYQLVKELKAALGLPAATSFKHVSPAGAAVGIPLNKVHAKLCQVDDIADQLTPLATAYARARGADRMSSFGDFVALSDPCDLPTAKIISREVSDGIIAPGYTEEALAVLRKKKNGGYCVLQIDPSYEPSPIERKVLFGLTMEQRRNDAKINSSTFSNIVTKHKNLSEAGLRDLIVATIAVKYTQSNSVCYARDGQVIGIGAGQQSRIHCTRLAGDKADNWWLRQHPKVTGMKFKKGVKRAEISNAIDNYVNGTIGRDMEESAWAAMYEVVPEKLTQADKDDWAKQLDNVAISSDAFFPFRDNVDRARLSGVRYIGAPAGSTNDEAVIEACNEHGIVLAHTGIRLFHH

SEQ ID NO: 92025 - DNA, 1788 bp, Magnaporthe grisea 70-15; identical to SEQ ID NO: 56213
  CDS (1)..(1788)

SEQ ID NO: 92026 - protein, 595 aa, Magnaporthe grisea 70-15; identical to SEQ ID NO: 56214

SEQ ID NO: 92027 - DNA, 1788 bp, Gibberella zeae PH-1; identical to SEQ ID NO: 56215
  CDS (1)..(1788)

SEQ ID NO: 92028 - protein, 595 aa, Gibberella zeae PH-1; identical to SEQ ID NO: 56216

SEQ ID NO: 92029 - DNA, 1782 bp, Apis mellifera
  CDS (1)..(1782)
atgtctagtggaaatttagcattattaagtgtctctgataaaacaaatcttttaccatttgctaagaaattgcatgaactaggtttgacattagttgcttctggtggaacagcaaaatgtttgagaaatgctaatcttccagtaaaagatgtttctaatattactggtgctcctgaaatgcttaatggaagagtcaaaactcttcatcctgctgttcatgctggtatattagctagatttacagagtcagatcaacaagatcttcataaacaaaattatgaacttattcaggttgtggtatgtaacttatatccatttgtaaatacagttacaaaactagaagtaaaacttgaagatgcaatagaaaacatagatattggtggagtaactttattacgagctgctgctaaaaatcataatagagtaacagttatttgtgatcctaatgattatgaaaaagttggaaaagaaatgcaatcttctattaacaaagatacttctttagaaactagacaattattagcagttaaagcattcactcatacagcagaatatgataatgcaatctcagattatttccgtaaacaatatagtaataaagtttctcagttgacactgagatatggaatgaatccacatcaaaaacctgcacaaatttttacaactttagataaattaccattaacagtaataaatggttccccaggttttattaatctctgtgatgcattaaatggttatcaattagtaaaagaattgaaagtagctctaaatttaccagctgcaacatcttttaagcatgttagtccagctggggcagcagttgctgtgccattaaatatagtacaagcaaaattatgtcaagtagatgatttattagaccagcttacaccattagcaactgcttatgcgcgtgcacgaggagccgatagaatgtctagttttggagattttatagcattatcagatacatgtgatgaagttactgctaaaattatatctagagaggtttctgatggtattattgcacctgattattcagaaaatgcgctcaaaattttaaaaaagaaaaaaaatggtgcttattgtatacttcaaattgatccaaattatatgccacctcaaatggaatatagaattttatttggattaactatggaacaaaaacgtaatgatgcgattattgatagaaatatattttctaatatagtaaccaaaaagtatacaactatttctgattctgctatgagagatttaattgtagctactattgctttaaaatatacacaaagtaattcagtatgctatgcaaaagatgggcaaataattggaattggtgcaggacagcaatcaagaattcattgcacaagacttgctggtgataaagctgataattggtggcttcgacagcatcctaaagttattaatatgaaatttaagaaaaatgtaaaaagagcagaaatttcaaatgctattgacaattatataaatggatttgttggaaaagatatggatgaagctttttgcacagcaatgtatgaggaagtgccacaaaaactctcagaaagtgaaaaaatagaatggataaaaaaagcagacaatattgctctgagtagtgatgctttttttccatttagagataatgtggatagagctaaattaagtggtgttaaatatattgcaagtccttctggttctgtaaatgatgaagcaataatacaagcttgtgatgaacataaaatagtattaattcatactaatctgagattgttccatcactaa

SEQ ID NO: 92030 - protein, 593 aa, Apis mellifera
MSSGNLALLSVSDKTNLLPFAKKLHELGLTLVASGGTAKCLRNANLPVKDVSNITGAPEMLNGRVKTLHPAVHAGILARFTESDQQDLHKQNYELIQVVVCNLYPFVNTVTKLEVKLEDAIENIDIGGVTLLRAAAKNHNRVTVICDPNDYEKVGKEMQSSINKDTSLETRQLLAVKAFTHTAEYDNAISDYFRKQYSNKVSQLTLRYGMNPHQKPAQIFTTLDKLPLTVINGSPGFINLCDALNGYQLVKELKVALNLPAATSFKHVSPAGAAVAVPLNIVQAKLCQVDDLLDQLTPLATAYARARGADRMSSFGDFIALSDTCDEVTAKIISREVSDGIIAPDYSENALKILKKKKNGAYCILQIDPNYMPPQMEYRILFGLTMEQKRNDAIIDRNIFSNIVTKKYTTISDSAMRDLIVATIALKYTQSNSVCYAKDGQIIGIGAGQQSRIHCTRLAGDKADNWWLRQHPKVINMKFKKNVKRAEISNAIDNYINGFVGKDMDEAFCTAMYEEVPQKLSESEKIEWIKKADNIALSSDAFFPFRDNVDRAKLSGVKYIASPSGSVNDEAIIQACDEHKIVLIHTNLRLFHH

SEQ ID NO: 92031 - DNA, 1773 bp, Candida glabrata CBS 138; identical to SEQ ID NO: 56217
  CDS (1)..(1773)

SEQ ID NO: 92032 - protein, 590 aa, Candida glabrata CBS 138; identical to SEQ ID NO: 56218

SEQ ID NO: 92033 - DNA, 1773 bp, Kluyveromyces lactis NRRL Y-1140; identical to SEQ ID NO: 56219
  CDS (1)..(1773)

SEQ ID NO: 92034 - protein, 590 aa, Kluyveromyces lactis NRRL Y-1140; identical to SEQ ID NO: 56220

SEQ ID NO: 92035 - DNA, 1773 bp, Debaryomyces hansenii CBS767; identical to SEQ ID NO: 56221
  CDS (1)..(1773)

SEQ ID NO: 92036 - protein, 590 aa, Debaryomyces hansenii CBS767; identical to SEQ ID NO: 56222

SEQ ID NO: 92037 - DNA, 1773 bp, Yarrowia lipolytica CLIB122; identical to SEQ ID NO: 56223
  CDS (1)..(1773)

SEQ ID NO: 92038 - protein, 590 aa, Yarrowia lipolytica CLIB122; identical to SEQ ID NO: 56224

SEQ ID NO: 92039 - DNA, 1803 bp, Aspergillus nidulans FGSC A4
  CDS (1)..(1803)
atgtctcagcaaaagtcagctattctctctgtctacgacaagaccggtcttctggacctggcaaaaggccttgccaagcacaatgtccgcctgctcgcctccggtggtaccgcgaggatgattcgggaggcaggattcccagttgaactgacggacatcagagatgtttcagctatcactcacgcacctgagatgctgggtggtcgtgtaaagaccctccaccctgccgtccacggcggtattcttgcccgtgatattgagtccgacgagaaggatctggccgatcagaacatcgccaaggtcgatttcgttgtctgcaacctgtacccgttcaaagaaaccgtcaacaaggttaacgtcaccatcgaagaggctgttgaggagattgatattggcggtgtgactttgctccgtgctgcggctaagaaccactcccgcgttaccattctctcggatccccaggattaccccgaattcctcaaggaactcgaggcaggtgagatcaccgagaccagccgccgatcctacgccctcaaggccttcgaacacactgcggactacgatactgccatctctggcttcttccgcaagcaatatgctgggaacggcgagaagcacctctctcttcgctacggaaccaatccccatcagaagcctgcgtcggcttgcatgcctcagggcaaacttcctttcaaggcactcaacggctcccccggctatgtcaatcttctagatgctctcaacgcgtgggccctcgtcaaggagctcaagcaggctctcggatacccggctgccgcgagtttcaagcatgtgtcgccggctggtgccgctgtaggtgtccctcttagcgataaggagcgcaaggtctacatggtcgacgatattgccggcattgagtcctctggattggctcaggcatatgctcgtgctcggggtgcagaccgcatgtccagctttggtgatgtcctggctctcagcgatgttgtggacgtcaccaccgccaagatcatctcccgcgaggtttcggacggtgtcatcgctcctggatacgaaaaggaggcgctcgagatcctgtctaagaagaaaggtggcaagtaccttgtccttcaaatggacgactcttacgtgcctgccggtgaggaaacccgtactgtttatggtgttcagcttaaccagcaccgcaacgacgttgttatttctccctccaagaccttcaacaccatcattactcctaaggatctcaagaccctccccgatgccgctctgagggatctcaccgtggctaccattgctctcaaatacacccagtcaaattcggtctgctacgcccttaatggtcaggttgttggtctgggcgctggccagcagagccgtatccactgcactcgtcttgcaggtgacaagaccgacaactggtggatgcgtttccacgaacgtgtcttgaatatcaaatggaaggcaggcaccaaacgtgctgacaagagcaacgccattgacctgctgtgctcaggtcagactcctcgtaacgagattgagcaggccgagtacgagcgcgtcttcgaggaggtgcctgcgccattcacacaggaggagcgcgaatcctggctcaagcagctgagcgaggttgcagtctcctcggacgctttcttccccttcatcgacaacgttttccgcgccgcccgctctggtgtcaagtacattgctgctcccagcggtagccaaaatgacggtcctgtcttcgagaccgcggagaagcttggcattaccttcgtcgagcaaggaacccgtctcttccaccactaa

SEQ ID NO: 92040 - protein, 600 aa, Aspergillus nidulans FGSC A4
MSQQKSAILSVYDKTGLLDLAKGLAKHNVRLLASGGTARMIREAGFPVELTDIRDVSAITHAPEMLGGRVKTLHPAVHGGILARDIESDEKDLADQNIAKVDFVVCNLYPFKETVNKVNVTIEEAVEEIDIGGVTLLRAAAKNHSRVTILSDPQDYPEFLKELEAGEITETSRRSYALKAFEHTADYDTAISGFFRKQYAGNGEKHLSLRYGTNPHQKPASACMPQGKLPFKALNGSPGYVNLLDALNAWALVKELKQALGYPAAASFKHVSPAGAAVGVPLSDKERKVYMVDDIAGIESSGLAQAYARARGADRMSSFGDVLALSDVVDVTTAKIISREVSDGVIAPGYEKEALEILSKKKGGKYLVLQMDDSYVPAGEETRTVYGVQLNQHRNDVVISPSKTFNTIITPKDLKTLPDAALRDLTVATIALKYTQSNSVCYALNGQVVGLGAGQQSRIHCTRLAGDKTDNWWMRFHERVLNIKWKAGTKRADKSNAIDLLCSGQTPRNEIEQAEYERVFEEVPAPFTQEERESWLKQLSEVAVSSDAFFPFIDNVFRAARSGVKYIAAPSGSQNDGPVFETAEKLGITFVEQGTRLFHH

SEQ ID NO: 92041 - DNA, 1779 bp, Candida albicans SC5314; identical to SEQ ID NO: 56225
  CDS (1)..(1779): transl_table=12

SEQ ID NO: 92042 - protein, 592 aa, Candida albicans SC5314; identical to SEQ ID NO: 56226

SEQ ID NO: 92043 - DNA, 1806 bp, Ustilago maydis 521; identical to SEQ ID NO: 56227
  CDS (1)..(1806)

SEQ ID NO: 92044 - protein, 601 aa, Ustilago maydis 521; identical to SEQ ID NO: 56228

SEQ ID NO: 92045 - DNA, 1782 bp, Tribolium castaneum
  CDS (1)..(1782)
atggcaacaggtggtaatttggctcttttatcggtttccaacaaaaccggtctcatatccctcgggaaaaaccttaaagatttgggttttacccttgtggcaagtggtggtactgcgaagagtctcagggaggcggggctcgctgttaaggatgtctcagagatctctggagctcctgagatactgggaggaagggtgaagacgctgcatccggcagtgcacggggggattttagctagactcatcccttcagatcaggaggatttaaaaagacaaaaaatcgatatgatccgagtcgtagtttgcaacttgtatccattcgttgaaacagtttcaaacccaaatgttacaatcgccgatgctgttgaaaacatcgacattggcggcgttactctgctcagagccgccgccaaaaaccactcaagagtcaccgtagtctgtgacccttcagactacgataaaatcatcacagaaatgcgtagcacccccaataaagacaccacagctcagactcgtcaaactctggctcttaaggccttcacacacacctcagactatgacctagccattacagactatttcagaaaacagtattcggccggagtttcgcaacttacgttgcgttatggcatgaatccgcaccaaaagccggcgcaaatttttactactttatccaaactaccgttaacagtagtcaacggagcccccggttttattaacttgtgtgatgccctcaatggatggcagttggttaaggaacttaaggcgggtttggggctcccggcagctacgagttttaaacacgtatcgccagcgggagcggctgtggctgttcctctagatagtactcaggcgaaagtatgtatggtcgacgatattttctcggaactaacccccatctctacggcctatgcgcgagcccgtggagcggaccgtatgtcatctttcggtgactttgtcgctctttccgacccttgtgacgtaatcacggcccgaatcatctccagagaggtgtccgatggaatcatcgctccaggtttcacacctgaagctttggaaattttgaggaagaagaagaatggcaattactgtgtccttcaaatagaccccaattacgaacccgatccaattgaacgcaaagtcctgttcggccttactttggaacagcaaagaaacaacgctgttattaacaaatcgctctttaccaacattgtcaccaagaataagtctttgccggatggagccgttcgtgacttgattgtggccaccatagccttgaaatacacacaaagtaactcggtttgttacgcgaaagatgggcaagttattgggattggagcgggacaacaatctaggattcattgtacgaggcttgcaggggataaggctgataactggtggatcagacagcacccgaaagttatcaacatgaagttcaggaaaggggtgaaaagggctgagatttcaaacgcgatagataactacgttaacgggactgttggcaaagatatggataggaaagtgttcgaatcgatgtatgatgaagtaccgactgagttgactcaagccgagaaaagggcatggttggatcaattgaagggtgttgctgttgggtcggatgcgtttttccccttccgggataacgtggatagggcccgtctgagtggggtctcctacattggggctcccgccggttcgacaaatgacgccgaagtcattgttgcgtgcaacgaacacaacattactttggcccacacaaacttgcggctcttccaccactaa

SEQ ID NO: 92046 - protein, 593 aa, Tribolium castaneum
MATGGNLALLSVSNKTGLISLGKNLKDLGFTLVASGGTAKSLREAGLAVKDVSEISGAPEILGGRVKTLHPAVHGGILARLIPSDQEDLKRQKIDMIRVVVCNLYPFVETVSNPNVTIADAVENIDIGGVTLLRAAAKNHSRVTVVCDPSDYDKIITEMRSTPNKDTTAQTRQTLALKAFTHTSDYDLAITDYFRKQYSAGVSQLTLRYGMNPHQKPAQIFTTLSKLPLTVVNGAPGFINLCDALNGWQLVKELKAGLGLPAATSFKHVSPAGAAVAVPLDSTQAKVCMVDDIFSELTPISTAYARARGADRMSSFGDFVALSDPCDVITARIISREVSDGIIAPGFTPEALEILRKKKNGNYCVLQIDPNYEPDPIERKVLFGLTLEQQRNNAVINKSLFTNIVTKNKSLPDGAVRDLIVATIALKYTQSNSVCYAKDGQVIGIGAGQQSRIHCTRLAGDKADNWWIRQHPKVINMKFRKGVKRAEISNAIDNYVNGTVGKDMDRKVFESMYDEVPTELTQAEKRAWLDQLKGVAVGSDAFFPFRDNVDRARLSGVSYIGAPAGSTNDAEVIVACNEHNITLAHTNLRLFHH

SEQ ID NO: 92047 - DNA, 1617 bp, Bartonella quintana str. Toulouse
  CDS (1)..(1617): transl_table=11
atgggtgttgttgccaaaaaatttcccatacctgatcttcatcgggttcgtcgtgttctgctctctgtgtctgataaaacgggtgtggtggcgtttgcacaagcgcttcatgcttacagtgttgaacttatttcgactgggggaacagccaaagtcttaatggatgctggtttacccgtaaaagatgttgctgaagttactgggtttccggaaataatggatgggcgtgtcaaaacactccatcctctgatccatggtgctttgttaggggtaaggcaggatccaagtcatgccgtggctatggagaagcatggcattcacggaattgatcttctggtggtgaatctttatccttttgaaaaaacttcccaatctggggctgatggacaaacaattcttgaaaatattgatatcggtggaccggcaatgatccgcgctgcagcaaagaatcatgcttatactggtgttgtaacagcggtgagtgattatgattttgttctagctgaattaaagcagcatgatgggtgtttaagcttttccatgcgacgtcagttagcaatgcgtgcttatgcacacacggctgcttatgatgcggcgatagcaacgtggtttgcgcaggatttaaaaattgaaacgccatcttggcaaagtttttctggttatcttgaaaatgtcatgcgttacggagaaaatccacatcaacaggcggcattttatcgcaataatgaaaaacgttttggtgttgcaacagcaaaacttttacaaggcaaagcactttcttataacaatatgaatgatacagatgcagcatttgaacttgtggcagaatttgatccacaaaaaaccactgctgttgctcttattaaacatgctaatccttgcggtgttgcagaaggaaaaagtttaaaggaagcttatttgaaagctcttatgtgtgataatgtctcggcatttggtggaattgttgctttaaatcaaccccttgatgaagaatgtgctgaagagattgttaaaatttttacggaagtgattattgcgcctgatgcaacgatagctgcacgcgaaattattgccaggaaaaaaaatcttcgtttgctaaccacaggtggtttgcctgatccacgttgcggagggcttgttgccaaaacgcttgcagggggaattttagtgcagtcacgtgataatatggttgttgatgatcttaacctgcaagtggtgacaaagcgggccccaagtcaagatgaaatgcgtgatcttcaatttgcttttcgtgtggtgaaacatgtcaaatcaaatgctatcgtttacgcaaaaaatagtgcaacagttgggattggtgcaggtcagatgagtcgcatcgattcagctaaaatcgctgcgcgtaaagctgaagaaagtgcacaaagagcaggtttaacagaatctcctactcgagggtccgtggttgcatcagatgcgttttttccttttgcagatggtttattagcggctgttgaagctggtgcaacagcgcttattcaaccgggcgggtcaatgcgtgatgaagaagtcattgccgcagctgatgcgcatggtttggctatggttttcaccggtgtgcggcattttcgtcattag

SEQ ID NO: 92048 - protein, 538 aa, Bartonella quintana str. Toulouse
MGVVAKKFPIPDLHRVRRVLLSVSDKTGVVAFAQALHAYSVELISTGGTAKVLMDAGLPVKDVAEVTGFPEIMDGRVKTLHPLIHGALLGVRQDPSHAVAMEKHGIHGIDLLVVNLYPFEKTSQSGADGQTILENIDIGGPAMIRAAAKNHAYTGVVTAVSDYDFVLAELKQHDGCLSFSMRRQLAMRAYAHTAAYDAAIATWFAQDLKIETPSWQSFSGYLENVMRYGENPHQQAAFYRNNEKRFGVATAKLLQGKALSYNNMNDTDAAFELVAEFDPQKTTAVALIKHANPCGVAEGKSLKEAYLKALMCDNVSAFGGIVALNQPLDEECAEEIVKIFTEVIIAPDATIAAREIIARKKNLRLLTTGGLPDPRCGGLVAKTLAGGILVQSRDNMVVDDLNLQVVTKRAPSQDEMRDLQFAFRVVKHVKSNAIVYAKNSATVGIGAGQMSRIDSAKIAARKAEESAQRAGLTESPTRGSVVASDAFFPFADGLLAAVEAGATALIQPGGSMRDEEVIAAADAHGLAMVFTGVRHFRH

SEQ ID NO: 92049 - DNA, 1617 bp, Bartonella henselae str. Houston-1; identical to SEQ ID NO: 56249
  CDS (1)..(1617): transl_table=11

SEQ ID NO: 92050 - protein, 538 aa, Bartonella henselae str. Houston-1; identical to SEQ ID NO: 56250

SEQ ID NO: 92051 - DNA, 1536 bp, Bacillus thuringiensis serovar konkukian str. 97-27
  CDS (1)..(1536): transl_table=11
atgaaaaagcgtgcattagtaagtgtttcagataaaacaggagtagtagaatttgttaaaggtttactagaacaagggatcgaagttatatcaacaggtggtacgaaaaaattactagaaaaaaacggtttacaagtaattggtatttctgaagtaactgggttcccagaaattatggatggtcgtgtgaaaacattacatccaaatattcatggtggtctattagcagttcgcgataatgaaacgcatgtagcgcaaatgaatgagttaggtatggagccaattgattttgttattgttaacttatacccattcaaagaaacgatcgctaagcctgatgtaacatttgctgatgcaattgaaaatattgatatcggtggcccaacaatgattcgctctgctgcgaaaaatcataaattcgtgtctgtaattgtagatccagtagattatgatgttgtattagcagaactgaaagaaaacggagaagtaaaagaagaaacgaaacgtaaattagcagcgaaagtattccgtcatacagcggcatatgatgcgttaatctctaactacttaacagagcaaatgggagaagaaagcccagaaacattaacagtgacatttgagaaaaaacaagatttacgctatggagaaaatccacatcaaaaagcaacattttataaagcaccattcgctgtaacttcttctgttgcgtacgcagaacaattacatggcaaagaattatcgtataacaatattaacgatgcagatgcagcgcttagtatcgtgaaagaatttacagaaccagcagtagtagcggtaaaacatatgaatccatgtggtgttggagtaggtacggatattcatgaagcatacacacgtgcttatgaagcggatccagtatcaatttttggaggcattattgcagcgaatcgtgaaattgataaagctacagctgaaaagttacatgaaattttcttagagattattatcgcaccttctttctcgaaagaagctttagaagtactgcaaagtaagaaaaacttacgtttattaactgtaaatattgaaaaagcgacaagcgcaagcaaaaaattaacttctgtacaaggtggccttctcgttcaagaggaagatacgttatcattagatgaaagtacaatttcaattccaacgaaacgtgaaccttcagagcaagaatggaaagatttaaaactagcttggaaagttgtaaagcatgtgaaatcaaatgcaattgttttagcaaaagatgatatgacaattggtgtcggtgctggacagatgaaccgtgtaggttctgcaaaaatcgcaattacacaagctggcgaaaaagcacaaggtagcgcacttgcatctgatgctttcttcccaatgccagatacagtagaagaagcagcaaaagcaggaattacggcaatcattcaaccaggcggatcaatccgtgacgaagattctattaaagtggcggatacgtatgggattgctatggtgttcactggcgtacgtcatttcaaacactaa

SEQ ID NO: 92052 - protein, 511 aa, Bacillus thuringiensis serovar konkukian str. 97-27
MKKRALVSVSDKTGVVEFVKGLLEQGIEVISTGGTKKLLEKNGLQVIGISEVTGFPEIMDGRVKTLHPNIHGGLLAVRDNETHVAQMNELGMEPIDFVIVNLYPFKETIAKPDVTFADAIENIDIGGPTMIRSAAKNHKFVSVIVDPVDYDVVLAELKENGEVKEETKRKLAAKVFRHTAAYDALISNYLTEQMGEESPETLTVTFEKKQDLRYGENPHQKATFYKAPFAVTSSVAYAEQLHGKELSYNNINDADAALSIVKEFTEPAVVAVKHMNPCGVGVGTDIHEAYTRAYEADPVSIFGGIIAANREIDKATAEKLHEIFLEIIIAPSFSKEALEVLQSKKNLRLLTVNIEKATSASKKLTSVQGGLLVQEEDTLSLDESTISIPTKREPSEQEWKDLKLAWKVVKHVKSNAIVLAKDDMTIGVGAGQMNRVGSAKIAITQAGEKAQGSALASDAFFPMPDTVEEAAKAGITAIIQPGGSIRDEDSIKVADTYGIAMVFTGVRHFKH

SEQ ID NO: 92053 - DNA, 1575 bp, Acinetobacter sp. ADP1; identical to SEQ ID NO: 56251
  CDS (1)..(1575): transl_table=11

SEQ ID NO: 92054 - protein, 524 aa, Acinetobacter sp. ADP1; identical to SEQ ID NO: 56252

SEQ ID NO: 92055 - DNA, 1590 bp, Erwinia carotovora subsp. atroseptica SCRI1043; identical to SEQ ID NO: 56253
  CDS (1)..(1590): transl_table=11

SEQ ID NO: 92056 - protein, 529 aa, Erwinia carotovora subsp. atroseptica SCRI1043; identical to SEQ ID NO: 56254

SEQ ID NO: 92057 - DNA, 1623 bp, Symbiobacterium thermophilum IAM 14863; identical to SEQ ID NO: 56257
  CDS (1)..(1623): transl_table=11

SEQ ID NO: 92058 - protein, 540 aa, Symbiobacterium thermophilum IAM 14863; identical to SEQ ID NO: 56258

SEQ ID NO: 92059 - DNA, 1539 bp, Bacillus licheniformis ATCC 14580; identical to SEQ ID NO: 56261
  CDS (1)..(1539): transl_table=11

SEQ ID NO: 92060 - protein, 512 aa, Bacillus licheniformis ATCC 14580; identical to SEQ ID NO: 56262

SEQ ID NO: 92061 - DNA, 1536 bp, Bacillus cereus E33L
  CDS (1)..(1536): transl_table=11
atgaaaaagcgtgcattagtaagtgtttcagataaaacaggagtagtagaatttgttaaaggtttactagaacaagggatcgaagttatatcaacaggtggtacaaaaaaattactagaagaaaacggtttacaagtaattggtatttctgaagtaactgggttcccagaaattatggatggtcgtgtgaaaacattacatccaaatattcatggtggtctattagcagttcgcgataatgaaacgcatgtagcgcaaatgaatgagttaggtatggagccaattgattttgttattgttaacttatacccattcaaagaaacaatcgctaagcctgatgtaacatttgctgatgcaattgaaaatattgatatcggtggcccaacaatgattcgctctgctgcgaaaaatcataaattcgtgtctgtaattgtagatccagtagattatgatgtcgtattagcagaactgaaagtgaacggagaagtaaaagaagaaacgaaacgtaaattagcagcgaaagtattccgtcatacagcggcatatgatgcgttaatctctaactacttaacagagcaaatgggagaagaaagcccagaaacattaacagtgacatttgagaaaaaacaagatttacgctatggagaaaatccacatcaaacagcaacattttataaagcaccattcgctgtaacttcttctgttgcatacgcagaacaattacatggcaaagaattatcgtataacaatattaacgatgcagatgcagcgcttagtatcgtgaaagaatttacagaaccagcagtagtagcggtaaaacatatgaatccatgtggtgttggagtaggtacggatattcatgaagcatacacacgtgcttatgaagcggatccagtatcaatttttggaggcattattgcagcgaatcgtgaaattgataaagctacagctgaaaagttacacgaaattttcttagagattattatcgcaccttctttctcgaaagaagctttagaagtactgcaaagtaagaaaaacttacgtttattaactgtaaatattgaaaaagcgacaagcgcaagcaaaaaattaacttctgtacaaggtggccttctcgttcaagaggaagatacgttatcattagatgaaagtacaatttcaattccaacgaaacgtgaaccttcagagcaagaatggaaagatttaaaactagcttggaaagttgtaaagcatgtgaaatcaaatgcaattgttttagcaaaagatgatatgacaattggtgtcggtgctggacagatgaaccgtgtaggttctgcaaaaatcgcaattacacaagctggtgaaaaagcacaaggtagcgcacttgcatctgatgctttcttcccaatgccagatacattggaagaagcagcaaaagcagggattacggcaatcattcaaccaggcggatcaatccgtgatgaagattctattaaagtggcggatacgtatgggattgctatggtgttcactggcgtccgtcatttcaaacactaa

SEQ ID NO: 92062 - protein, 511 aa, Bacillus cereus E33L
MKKRALVSVSDKTGVVEFVKGLLEQGIEVISTGGTKKLLEENGLQVIGISEVTGFPEIMDGRVKTLHPNIHGGLLAVRDNETHVAQMNELGMEPIDFVIVNLYPFKETIAKPDVTFADAIENIDIGGPTMIRSAAKNHKFVSVIVDPVDYDVVLAELKVNGEVKEETKRKLAAKVFRHTAAYDALISNYLTEQMGEESPETLTVTFEKKQDLRYGENPHQTATFYKAPFAVTSSVAYAEQLHGKELSYNNINDADAALSIVKEFTEPAVVAVKHMNPCGVGVGTDIHEAYTRAYEADPVSIFGGIIAANREIDKATAEKLHEIFLEIIIAPSFSKEALEVLQSKKNLRLLTVNIEKATSASKKLTSVQGGLLVQEEDTLSLDESTISIPTKREPSEQEWKDLKLAWKVVKHVKSNAIVLAKDDMTIGVGAGQMNRVGSAKIAITQAGEKAQGSALASDAFFPMPDTLEEAAKAGITAIIQPGGSIRDEDSIKVADTYGIAMVFTGVRHFKH

SEQ ID NO: 92063 - DNA, 1599 bp, Mannheimia succiniciproducens MBEL55E; identical to SEQ ID NO: 56259
  CDS (1)..(1599): transl_table=11

SEQ ID NO: 92064 - protein, 532 aa, Mannheimia succiniciproducens MBEL55E; identical to SEQ ID NO: 56260

SEQ ID NO: 92065 - DNA, 1590 bp, Legionella pneumophila subsp. pneumophila str. Philadelphia 1; identical to SEQ ID NO: 56263
  CDS (1)..(1590): transl_table=11

SEQ ID NO: 92066 - protein, 529 aa, Legionella pneumophila subsp. pneumophila str. Philadelphia 1; identical to SEQ ID NO: 56264

SEQ ID NO: 92067 - DNA, 1566 bp, Burkholderia mallei ATCC 23344
  CDS (1)..(1566): transl_table=11
atgatcaagcaagcgctcatttccgtttccgacaagaccggcatcgtcgacttcgcgaaagcgctgtccgcgctcggcgtcaagctgctgtcgacgggcggcaccgcgaaactgctcgccgacgcgggcctgcccgtcaccgaagtggccgactacaccggcttcccggaaatgctcgatgggcgcgtgaagacgctgcacccgaaggtgcacggcggcatcctcgcccgccgcgacctgcccgagcacatgcaggcgctcgaagcgcacgggattccgacgatcgacctgctcgtcgtgaacctgtatccgttcgtccagacgattgcgaaggacgactgcacgctcgccgacgcgatcgagaacatcgacatcggcggcccgacgatgctgcgctcggcggcgaagaaccaccgcgacgtgacggtcgtcgtcgacccggccgattacgcggtcgtgctcgacgagatgaaagcgaacggcaacacgctcggctacaagacgaatttccgcctcgcgaccaaggtgttcgcgcacaccgcgcagtacgacggcgcgatcacgaactacctgacgagcctcggcgacgatctgcagcacggctcgcgcagcgcatacccggcaacgctgaacctcgcgttcgacaaggtgcaggacctgcgctacggcgagaatccgcaccagagcgccgcgttctaccgcgacgtcgcgacgccggccggcgcgctcgcgaactaccgccagttgcagggcaaggaactgtcgtacaacaacatcgccgattcggacgccgcgtgggaatgcgtgaagacgttcgacgcgccggcgtgcgtgatcatcaagcacgcgaatccgtgcggcgtcgcggtgggcgcggacgcgggcgaagcgtacgcgaaggcgttccagaccgatccgacctccgcgttcggcggcatcatcgcgttcaaccgcgaagtcgacgaggccgcggcccaggcggtcgcgaagcaattcgtcgaagtgctgatcgcgccgtcgttctcggacgcggccaagcaggtgttcgcggccaagcagaacgtgcgcctgctcgaaatcgcgctgggcgaaggccataacgcgttcgatctgaagcgcgtgggcggcggcctgctcgtgcaatcgctcgattcgaagaacgtgcagccgcgcgagctgcgcgtcgtcacgaaacgccacccgacgccgaaggaaatggacgacctcctgttcgcatggcgcgtcgcgaaatacgtgaagtcgaacgcgatcgtgttctgcggcaacgggatgacgctcggcgtcggcgcaggccagatgagccgcgtcgattcggcgcgcatcgcgagcatcaaggcacagaacgcgggcctcacgctcgcgggctcggccgtcgcgtcggacgcgttcttcccgttccgcgacggcctcgacgtcgtcgtcgcggcaggcgcgacctgcgtgatccagccgggcggctcggtgcgcgacgacgaggtgatcgccgccgccgacgagcacaacatcgcgatggtcgtgacgggcgtgcgccacttccgtcactga

SEQ ID NO: 92068 - protein, 521 aa, Burkholderia mallei ATCC 23344
MIKQALISVSDKTGIVDFAKALSALGVKLLSTGGTAKLLADAGLPVTEVADYTGFPEMLDGRVKTLHPKVHGGILARRDLPEHMQALEAHGIPTIDLLVVNLYPFVQTIAKDDCTLADAIENIDIGGPTMLRSAAKNHRDVTVVVDPADYAVVLDEMKANGNTLGYKTNFRLATKVFAHTAQYDGAITNYLTSLGDDLQHGSRSAYPATLNLAFDKVQDLRYGENPHQSAAFYRDVATPAGALANYRQLQGKELSYNNIADSDAAWECVKTFDAPACVIIKHANPCGVAVGADAGEAYAKAFQTDPTSAFGGIIAFNREVDEAAAQAVAKQFVEVLIAPSFSDAAKQVFAAKQNVRLLEIALGEGHNAFDLKRVGGGLLVQSLDSKNVQPRELRVVTKRHPTPKEMDDLLFAWRVAKYVKSNAIVFCGNGMTLGVGAGQMSRVDSARIASIKAQNAGLTLAGSAVASDAFFPFRDGLDVVVAAGATCVIQPGGSVRDDEVIAAADEHNIAMVVTGVRHFRH

SEQ ID NO: 92069 - DNA, 1563 bp, Methylococcus capsulatus str. Bath; identical to SEQ ID NO: 56265
  CDS (1)..(1563): transl_table=11

SEQ ID NO: 92070 - protein, 520 aa, Methylococcus capsulatus str. Bath; identical to SEQ ID NO: 56266

SEQ ID NO: 92071 - DNA, 1542 bp, Anaplasma marginale str. St. Maries
  CDS (1)..(1542): transl_table=11
atgactgcttcctcaacgggcagaacagccctgatatcggtatatgacaagacaaatattgagaaactcgcccagtttatagcagcacgagggtttcgcataatagcaacaaaaaatacatgtggcctgctgcagcaggctggtattcctgcggttgaagtttcagagtacaccggatacccagaaatgatggacggtagggttaagactctgcacccaaaaatattcgccggcattttgcgcaatggagacagccacgattccgagttggacaggctagccgtagatgcaatcgatctggtcatagtaaatctataccccttccagagccttgcagctgctaaggccgcagatgttgcagtggtggagcagatagacataggcggggtgtcgcttctgagggcgggagccaagaattttcagcatgttacggttatacccgacgtgcacgaatacgaagggctgatgcaggaaatgtccagtaacgggaacgcaacaacactcgaatatagaaggcgcatggccgctaaaactttcgccaacgtatcttcttacgattcatgcattcatgcgtggttaaacggtacagaagcgccagacatgccgcaagaaatcacaatacgcggaaggaaaattcaggatttgcgcattggtgagaacccgcatcagaaagccgccgtgtacggcatgtatcacgatagttcacctatgacattgcccattgagcagatgcacggcaaggagctgagctttaataatatcgtcgatatcgagtccgctgttgctatagtagccgagtttgacgtcccagcagtttctgtaataaagcacgggaacccatgcggggtggcagtttctagcgcaaatgtggacgatgcctatgaaaaggcaattacttgtgacccaaaaagcagtttcggcgggataatagcgtgtaataggccggttacagaggaaattgcacacaaggtcgcagacatgtttgtggaagcggtggttgccccagattttgctgaggatgcactgaaagtattgtacacaaaaaagaacttacgtgtggtaaagtgcacgccctacatggcgagtaggttggttttcaaaagcgcgcttggtagcggcttgcttatgcaggaacgcaattgcagcacaataggcattgacgacctgcttaaggttacaactaaaacagcgcctcccgcggttctgcaggatttgctgttcgcgtggcgggtatgcaagcatgtgaagtccaacgcaattgtaatagcacgtgacgggcgcgccataggagtaggcgcaggacaaatgagcagggttgacagcgtggagcttgctgtcaaaaaggcacaagactgcacaggtgctgttatggcgtctgacgcatttttcccatttgcagatagtatacatcacgccgcgactgcaggcatatttgctatagtgcagcctggtggttctttgcgggacaaagaagtaatagaggctgctgacgatagtggcattgcgatgtacttcacgggcctcaggagtttttgccactaa

SEQ ID NO: 92072 - protein, 513 aa, Anaplasma marginale str. St. Maries
MTASSTGRTALISVYDKTNIEKLAQFIAARGFRIIATKNTCGLLQQAGIPAVEVSEYTGYPEMMDGRVKTLHPKIFAGILRNGDSHDSELDRLAVDAIDLVIVNLYPFQSLAAAKAADVAVVEQIDIGGVSLLRAGAKNFQHVTVIPDVHEYEGLMQEMSSNGNATTLEYRRRMAAKTFANVSSYDSCIHAWLNGTEAPDMPQEITIRGRKIQDLRIGENPHQKAAVYGMYHDSSPMTLPIEQMHGKELSFNNIVDIESAVAIVAEFDVPAVSVIKHGNPCGVAVSSANVDDAYEKAITCDPKSSFGGIIACNRPVTEEIAHKVADMFVEAVVAPDFAEDALKVLYTKKNLRVVKCTPYMASRLVFKSALGSGLLMQERNCSTIGIDDLLKVTTKTAPPAVLQDLLFAWRVCKHVKSNAIVIARDGRAIGVGAGQMSRVDSVELAVKKAQDCTGAVMASDAFFPFADSIHHAATAGIFAIVQPGGSLRDKEVIEAADDSGIAMYFTGLRSFCH

SEQ ID NO: 92073 - DNA, 1590 bp, Silicibacter pomeroyi DSS-3; identical to SEQ ID NO: 56267
  CDS (1)..(1590): transl_table=11

SEQ ID NO: 92074 - protein, 529 aa, Silicibacter pomeroyi DSS-3; identical to SEQ ID NO: 56268

SEQ ID NO: 92075 - DNA, 1536 bp, Bacillus clausii KSM-K16
  CDS (1)..(1536): transl_table=11
atgacgaagcgagcacttgttagtgtatcaaataaaacaggcttaatcccgtttgtaaaagggttggcagaagcaggggtggagatcctatctactggcggcggcaccaaacgggcattagaagaagcgggcatcgctgttgtcaatgtgtcagatgtaacgggctttccggaaattttagatggccgtgtcaaaacactccatccgaacatccacggcggcctattagcgatgcgcactaacgatgaacatatcaaacaaatagaagaacttggcattgagccgattgattatgttgtcgtcaatttgtatccatttgcagaaacaatcgccaacccagacgcgtcatttgctgacgcgatcgaaaacatcgatatcggtggtccgagcatgctccgctccgctgctaaaaaccacgccgatgtaacagtagtggtagatccagccgattatgacgctgtgcttgcttcccttgacgcaagcaaagaagagcaacttgccctacggcaaaaactagctgcaaaagtattccgccatacagcggcctatgatgcgatgatcggcagctacctaaccgatgccgttggcgaggaaaatcccgaaagcttgacggttacgtatacacataaacaaacgctccgttacggggaaaatccacaccaaaaagctgctttttatgaaagcaggacaagttcgccgtcatccattgcccaagcaaaacaacttcatggcaaggaattgtcttacaacaatatcaatgatgccaatgcagcgcttgaaatcgtaaaagaatttagcgaacctgcggcggtagctgtcaaacatatgaacccatgcggtgttggcactggcgccactgttggcgaagcctatacgcgcgcttatgaagcagacccgaaatcaatttttggcggcattgtagccctgaaccgagaggtggaccgtgcaactgctgaaaaaatggcggcgatctttttagaagtcattctcgccccttcatttagcgaagaggcaaaagcgattttgcagcagaaaaaaaacatccgtctgctagaagtcgctgttactaaaggcgagctggagaaaaagcttgcctccgtccatggcggcttgctcattcaggaagaagaccatttaggttttgacgacggggacatccgcattccaacgaaacgggaaccgacagaagaagaatggacggcgttgaaactcggctggaaagttgtcaagcatgtgaaatcaaacgcaattgtgcttacgaacggcgaaatgacagtcggcattggcgctggccaaatgaaccgtgtcggtgccgcagcaattgcaattgaacaagcaggtgaacgggcgcaaggcgctgccctcgcatcggatgcgttctttccgtatggagatacagttgaagcagccgcaaaagcgggcattaccgcgattattcagccaggcggctccgttcgtgacaacgaatcgattgaaaaagcagatgaatatggaatcgccatggtctttacaggcgtacgccacttcaaacattaa

SEQ ID NO: 92076 - protein, 511 aa, Bacillus clausii KSM-K16
MTKRALVSVSNKTGLIPFVKGLAEAGVEILSTGGGTKRALEEAGIAVVNVSDVTGFPEILDGRVKTLHPNIHGGLLAMRTNDEHIKQIEELGIEPIDYVVVNLYPFAETIANPDASFADAIENIDIGGPSMLRSAAKNHADVTVVVDPADYDAVLASLDASKEEQLALRQKLAAKVFRHTAAYDAMIGSYLTDAVGEENPESLTVTYTHKQTLRYGENPHQKAAFYESRTSSPSSIAQAKQLHGKELSYNNINDANAALEIVKEFSEPAAVAVKHMNPCGVGTGATVGEAYTRAYEADPKSIFGGIVALNREVDRATAEKMAAIFLEVILAPSFSEEAKAILQQKKNIRLLEVAVTKGELEKKLASVHGGLLIQEEDHLGFDDGDIRIPTKREPTEEEWTALKLGWKVVKHVKSNAIVLTNGEMTVGIGAGQMNRVGAAAIAIEQAGERAQGAALASDAFFPYGDTVEAAAKAGITAIIQPGGSVRDNESIEKADEYGIAMVFTGVRHFKH

SEQ ID NO: 92077 - DNA, 1515 bp, Ehrlichia ruminantium str. Welgevonden
  CDS (1)..(1515): transl_table=11
atgaaaattaacagagcaattatatcagtatatgataagacaaatattgtgaaatttgcaaaatttcttattgaacaaaaagtagaaattattgcaacaagcagtacttacaaaatcttagtagatgctgggttacaagttatagaggtatctgattatactaaatttccagaaataatggatggtagggttaaaacattacacccaaaaattcatggtggtatactaagtaaccgtaatagccacactgaggaaagtaataaatttaacatacagaatatagatttagttatagtaaacttatatcctttttctcaagttgctagtattaaaacctctactgatgatcaaataatagaacaaatagacataggtggtattactttactcagatctgcagcaaagaattttaataatgttactgtgctctctgatataaatgattatgacacactacaaacagaaatgaccaataataacaatgaaacaacactatcatatagaaaacatctcgcagcaaaagcatttgctattacatcaacttatgatagcattatacacaattggttaaacaacaatactcaagatattttaccaaatacatttgctattcatggaaataaagtacaagatctcagatgtggagaaaaccctcatcaaaaaggtgcattttacagtgcttcagcagataagtatccattaaaacaattacatggtaaacaattaagttataataacatagttgatatagaagctgctattaatatagtagcagaatttacagaaccagcagcagtaattataaaacatagtaatccttgtggagcagcaactgctgatgatataacaagtgcttataataaagcttttgcatgtgatccaaaaagtagtttcggtggtattgttgctcttaatagggaaataaatgaagagatagcagaaaaaatcaatcaaatcttcattgaggtagtagtaggaccatctattacagataaagcaatagaaataatacaaaagaagaaaaatgtaaggataattttatctacagagtacaacctaccaaaatatactattaagaatgttagtggaggatttttgctacaggaaagtaatacaaatagattatcagaaaaagatttaatacaagttacaaattttccagtatcacctgatataatttccaacttactgtttgcatggaaaatatgtaagcatgtaaagtctaatgcaatagttattgcacgagaccatcgtgcaattggtgttggagctggacaaatgagtcgtgtagatagtttagaaattgcaataaaaaaatcccaagactgtactggagctgttctagcatctgatgcattttttccgttcacagatagtatactattaagtgcatctgcaaaaataagtgcaataattcaacctggaggatcactacgtgatcaagaagtaatagaagaagcaaataatcaaaaaatagcgatgttctttactaatattagaaatttctatcattaa

SEQ ID NO: 92078 - protein, 504 aa, Ehrlichia ruminantium str. Welgevonden
MKINRAIISVYDKTNIVKFAKFLIEQKVEIIATSSTYKILVDAGLQVIEVSDYTKFPEIMDGRVKTLHPKIHGGILSNRNSHTEESNKFNIQNIDLVIVNLYPFSQVASIKTSTDDQIIEQIDIGGITLLRSAAKNFNNVTVLSDINDYDTLQTEMTNNNNETTLSYRKHLAAKAFAITSTYDSIIHNWLNNNTQDILPNTFAIHGNKVQDLRCGENPHQKGAFYSASADKYPLKQLHGKQLSYNNIVDIEAAINIVAEFTEPAAVIIKHSNPCGAATADDITSAYNKAFACDPKSSFGGIVALNREINEEIAEKINQIFIEVVVGPSITDKAIEIIQKKKNVRIILSTEYNLPKYTIKNVSGGFLLQESNTNRLSEKDLIQVTNFPVSPDIISNLLFAWKICKHVKSNAIVIARDHRAIGVGAGQMSRVDSLEIAIKKSQDCTGAVLASDAFFPFTDSILLSASAKISAIIQPGGSLRDQEVIEEANNQKIAMFFTNIRNFYH

SEQ ID NO: 92079 - DNA, 1581 bp, Neisseria gonorrhoeae FA 1090; identical to SEQ ID NO: 56271
  CDS (1)..(1581): transl_table=11

SEQ ID NO: 92080 - protein, 526 aa, Neisseria gonorrhoeae FA 1090; identical to SEQ ID NO: 56272

SEQ ID NO: 92081 - DNA, 1617 bp, Pseudomonas syringae pv. syringae B728a; identical to SEQ ID NO: 56273
  CDS (1)..(1617): transl_table=11

SEQ ID NO: 92082 - protein, 538 aa, Pseudomonas syringae pv. syringae B728a; identical to SEQ ID NO: 56274

SEQ ID NO: 92083 - DNA, 1602 bp, Colwellia psychrerythraea 34H; identical to SEQ ID NO: 56277
  CDS (1)..(1602): transl_table=11

SEQ ID NO: 92084 - protein, 533 aa, Colwellia psychrerythraea 34H; identical to SEQ ID NO: 56278

SEQ ID NO: 92085 - DNA, 1617 bp, Pseudomonas syringae pv. phaseolicola 1448A
  CDS (1)..(1617): transl_table=11
atggaaatcgagatgaccgaccagactacccgcctgcctatccgtcgcgccctgatcagcgtatccgacaagacaggaatccttgagtttgcccgcgagcttgaagcgctgggcgtcgagattctttccactggcggtacgttcaaactgctcaaggacaacggtgtcgcggcagtcgaagtggctgactataccggcttcgctgagatgatggatggccgggtcaagactctgcaccccatgatccacggcggcattctgggtcgtcgcggcatcgacgacgccatcatgaccgagcacggcatcaagccgatcgatctggttgcggtcaatctgtacccgtttgaagccaccgtctccaagccaggctgcgacctgccgaccgccatcgaaaacatcgatatcggcggcccgaccatggtccgttccgctgcgaagaaccataaagatgtcgcaatcgtggtcaacgccagtgactacggtcaggtattggaaagcctcaaggctggcggcctgacctacgcacagcgcttcgacctgatgctcaaggcgttcgagcacaccgccgcctacgacggcatgatcgccaactacctgggcggcgtcgaccagactgccgaaaccctgagcaccgaaggccgcagtcagttcccgcgcaccttcaacacccagttcgtcaaggcccaggaaatgcgctacggcgagaacccgcaccagagcgcggcgttttacgttgaagccaaacctgccgaggtcggcattgccacggccacccagttgcaaggcaaggaactgtcgttcaacaacgtcgccgataccgacgccgcgctggaatgcgtcaagagcttcgtcaaaccggcctgcgtgatcgtcaaacacgccaacccgtgcggtgtcgcggtctgcccggatgatgaaggcggcattcgtcaggcgtacgagctggcctatgccaccgactccgaatcggcatttggcggcatcatcgccttcaaccgcgagctggacgcagcaacggccaaggccatcgtcgagcgccagttcgtcgaagtgatcatcgcgccaagcgtcagcgccgaagcgcgtgccatcgtggccagcaaagccaatgtgcgcctgctgaccagcggccagtggagcgagcgtctgcctgcctgggactacaaacgcgtcaatggcggcttgctggtacagagccgcgatatcggcatgatcaccgaggccgacctcaaggtcgtcaccctgcgtgcgcctacagaacaggaaatgcatgacctgatcttcgcttggaaagtcgccaagtacgtcaagtccaacgccatcgtctacgcccgcaaccgccagaccgtcggcgtcggcgctggccagatgagccgtgtgaactcggcgcgtatcgcggccatcaaggctgagcatgccgggctgcaggtacagggcgcagtcatggcctccgatgcgttcttcccgttccgtgacggtatcgacaacgcggccaaggtcggcatcactgccgtcatccagcccggcggctcgatgcgtgacaacgaagtgattgcagcagcagatgaagcaggcatcgcgatggtcttcaccggcatgcgccatttcaggcactaa

SEQ ID NO: 92086 - protein, 538 aa, Pseudomonas syringae pv. phaseolicola 1448A
MEIEMTDQTTRLPIRRALISVSDKTGILEFARELEALGVEILSTGGTFKLLKDNGVAAVEVADYTGFAEMMDGRVKTLHPMIHGGILGRRGIDDAIMTEHGIKPIDLVAVNLYPFEATVSKPGCDLPTAIENIDIGGPTMVRSAAKNHKDVAIVVNASDYGQVLESLKAGGLTYAQRFDLMLKAFEHTAAYDGMIANYLGGVDQTAETLSTEGRSQFPRTFNTQFVKAQEMRYGENPHQSAAFYVEAKPAEVGIATATQLQGKELSFNNVADTDAALECVKSFVKPACVIVKHANPCGVAVCPDDEGGIRQAYELAYATDSESAFGGIIAFNRELDAATAKAIVERQFVEVIIAPSVSAEARAIVASKANVRLLTSGQWSERLPAWDYKRVNGGLLVQSRDIGMITEADLKVVTLRAPTEQEMHDLIFAWKVAKYVKSNAIVYARNRQTVGVGAGQMSRVNSARIAAIKAEHAGLQVQGAVMASDAFFPFRDGIDNAAKVGITAVIQPGGSMRDNEVIAAADEAGIAMVFTGMRHFRH

SEQ ID NO: 92087 - DNA, 1593 bp, Dechloromonas aromatica RCB; identical to SEQ ID NO: 56279
  CDS (1)..(1593): transl_table=11

SEQ ID NO: 92088 - protein, 530 aa, Dechloromonas aromatica RCB; identical to SEQ ID NO: 56280

SEQ ID NO: 92089 - DNA, 1617 bp, Methanosarcina barkeri str. Fusaro; identical to SEQ ID NO: 56287
  CDS (1)..(1617): transl_table=11

SEQ ID NO: 92090 - protein, 538 aa, Methanosarcina barkeri str. Fusaro; identical to SEQ ID NO: 56288

SEQ ID NO: 92091 - DNA, 1560 bp, Thiobacillus denitrificans ATCC 25259; identical to SEQ ID NO: 56291
  CDS (1)..(1560): transl_table=11

SEQ ID NO: 92092 - protein, 519 aa, Thiobacillus denitrificans ATCC 25259; identical to SEQ ID NO: 56292

SEQ ID NO: 92093 - DNA, 1620 bp, Pseudomonas fluorescens PfO-1; identical to SEQ ID NO: 56295
  CDS (1)..(1620): transl_table=11

SEQ ID NO: 92094 - protein, 539 aa, Pseudomonas fluorescens PfO-1; identical to SEQ ID NO: 56296

SEQ ID NO: 92095 - DNA, 1590 bp, Rhodobacter sphaeroides 2.4.1; identical to SEQ ID NO: 56297
  CDS (1)..(1590): transl_table=11

SEQ ID NO: 92096 - protein, 529 aa, Rhodobacter sphaeroides 2.4.1; identical to SEQ ID NO: 56298

SEQ ID NO: 92097 - DNA, 1563 bp, Synechococcus sp. CC9605
  CDS (1)..(1563): transl_table=11
atggctcctgtcgctctgctgagtgtttccgataagtccgggctggtgcccctggcggaggccctgcatcggacccatggctatcagctgctctccagtgggggcacggccaaggtgctcgagcaggccggcctaccggtgacccgtgtgtcggaccacaccggggctccagaaattcttggcggtcgtgtgaaaacgctccatccaagggtgcatggcgggattttggccaagcggggtgacgcgtctcaccaggccgatcttgagcagcagaacatcgcccccatcgatatggtggtggtcaacctctatcccttccgcgaaacgattgcgcggcctgacgtcacctgggatcaggcgatcgagaacatcgacatcggtggccctgccatggtgcgggcggccgccaagaatcacgccgatgtggctgtcctcaccagtcctgaccaatacgaccgtctgttgaccgccatggcggagtcgggcgggagcgtgccttcggcgctgcggcgccaactggcccttgaagcgttcaatcacaccgcgtcgtacgacaccgccatcggccgctggatggccgagcaagccaccgcaaaaggctgcccctggttggaggcggtgccgctgcggcagaccctgcggtatggcgaaaatccccaccagaaagcgcgctggttcagccatcccaaacagggttggggtggtgccattcagctgcagggcaaggagctgagcactaacaaccttctggatctcgaggcggccctcgccacggtgcgggagttcggctacggagccgacggctccgcaccggcgtcgcaacccgcggccgtggtcgtcaagcacaccaatccctgtggcgtggccgtcggagcttcgatgcctgcagcactgacgcgggccctggatgccgatcgggtgagtgccttcggcggcatcatcgccatgaacgatgtggtggaagcaacggcggcccgtgagctcaccagcctgttcctggaatgcgtcgtggcaccaggtttcacgcccgaagcgcgggaggtgctggcggccaaagccaatctgcgcttgttggaactggctccgcaggccattgatgtggctggccccgatcacgtgcggagcattctgggtggtctcctggttcaggatctcgatgaccaggcgatcacgccgaccgactggaccgtggccagccagcggccgcccacaccccaggaaaagctggaccttgaatttgcctggcgtttggtgcgtcacgtgcgctccaacgccatcgttgttgccaaggatgggcagagccttggcgtgggtgccgggcagatgaatcgcgtgggctccgcgcggattgccctggaagctgcaggtgagaaagcgcagggagccgttctggcaagtgatggcttcttcccgtttgacgacacagtgcgtctggctgccagccagggcatcaccgcagtgattcatcccggcgggagcatgcgcgatggcgattcgatcaaagcttgcgatgagctcggcctggcgatgcagctcacggggcgccgtcatttcctgcattga

SEQ ID NO: 92098 - protein, 520 aa, Synechococcus sp. CC9605
MAPVALLSVSDKSGLVPLAEALHRTHGYQLLSSGGTAKVLEQAGLPVTRVSDHTGAPEILGGRVKTLHPRVHGGILAKRGDASHQADLEQQNIAPIDMVVVNLYPFRETIARPDVTWDQAIENIDIGGPAMVRAAAKNHADVAVLTSPDQYDRLLTAMAESGGSVPSALRRQLALEAFNHTASYDTAIGRWMAEQATAKGCPWLEAVPLRQTLRYGENPHQKARWFSHPKQGWGGAIQLQGKELSTNNLLDLEAALATVREFGYGADGSAPASQPAAVVVKHTNPCGVAVGASMPAALTRALDADRVSAFGGIIAMNDVVEATAARELTSLFLECVVAPGFTPEAREVLAAKANLRLLELAPQAIDVAGPDHVRSILGGLLVQDLDDQAITPTDWTVASQRPPTPQEKLDLEFAWRLVRHVRSNAIVVAKDGQSLGVGAGQMNRVGSARIALEAAGEKAQGAVLASDGFFPFDDTVRLAASQGITAVIHPGGSMRDGDSIKACDELGLAMQLTGRRHFLH

SEQ ID NO: 92099 - DNA, 1581 bp, Rhodospirillum rubrum ATCC 11170; identical to SEQ ID NO: 56303
  CDS (1)..(1581): transl_table=11

SEQ ID NO: 92100 - protein, 526 aa, Rhodospirillum rubrum ATCC 11170; identical to SEQ ID NO: 56304

SEQ ID NO: 92101 - DNA, 1542 bp, Moorella thermoacetica ATCC 39073; identical to SEQ ID NO: 56305
  CDS (1)..(1542): transl_table=11

SEQ ID NO: 92102 - protein, 513 aa, Moorella thermoacetica ATCC 39073; identical to SEQ ID NO: 56306

SEQ ID NO: 92103 - DNA, 1587 bp, Syntrophus aciditrophicus SB
  CDS (1)..(1587): transl_table=11
ttgaggagagggataatgaatttgaacgaaataaaacgggtactcatcagcgtaaccgataagacaggaattgttgaatttgctcagggtttatctcagttcggtgtggagattctttcgacgggaggaacagcagcgcaattgaggatgaacggtctttccgtgagggatgtttccgactatacggggtttcccgaaatgatggatggaagactgaaaacactgcaccccaaaattcatggcgggcttctggctctccgggatcaggacagccacagggaagcggccagaaatcatgggatcgacatgatcgatatggtggtcatcaatctttaccgattcgaagacaccgttgctcgagaaggatgctcccttgatgaggccatcgagaatatagacatcgggggacccaccatgcttcgagccgccgcgaagaattatcgttttgtcagcgtagttacggatcccgcggattacacgagtattcttgaagaaatgaaacaggaaggtggcaagatatccgagaccaccaacttcgaattgtccgtaaaaaccttccaactgacagctaggtatgacgcggcgatttccaattacctcggcaagctgacaccttacggaggcgattccaagacattttccgatacactcaccatgcagtttaagaaagcccaagacctccgttacggtgaaaaccctcatcagcaggccgtcttctatcgtgaacacaatccttttccggcatcgattgccaatgcccgtcaacttcatgggaaggagttatcctataacaacatcatggacagcgatgccgcatggaacatggtttctgatttcatcctgccggctgccgtgattatgaagcacgccaatccctgtggggcagccacggcctcccaggatctgtccgaggcgtaccggaaagccatggaaacggatcccatctccgccttcggaggcatcgtcgctcttaatcgccccattgacaagaaaacggcagaagagattgccaagacattcctggaagttatcatcgctcccggatttgaggaagaagcattgaaccttttgcaggcgaagaaaaatgtgagattgctgcaaatttccggagaataccagagagagtgcctgggactcgattttcgtcgcgtcgtcggcgggctgcttgttcaggaacgcgacatggattcctttgatatccgaacagcgaaaatcgtgaccagacgagttccaacggaagaagaataccaggccttggattttgcctggcgcgttgtcaaacacgtcaaatccaacgccatcgtgttcactgccagggaccagctggtaggggtcggcgccggccagatgagccgagttgattccgtcaagatcgccaagatgaaagccatacttcccacaaaaggctgtgtccttggttccgatgcgttcttccctttccgtgacggggttgacatggctgccgaggcgggaataaccgccattatccagccaggggggtccgtgcgggatgaagaagccatcgaggccgccaatgagcatggaatggccatgatttttgcaggcatccgccatttcaagcattag

SEQ ID NO: 92104 - protein, 528 aa, Syntrophus aciditrophicus SB
MRRGIMNLNEIKRVLISVTDKTGIVEFAQGLSQFGVEILSTGGTAAQLRMNGLSVRDVSDYTGFPEMMDGRLKTLHPKIHGGLLALRDQDSHREAARNHGIDMIDMVVINLYRFEDTVAREGCSLDEAIENIDIGGPTMLRAAAKNYRFVSVVTDPADYTSILEEMKQEGGKISETTNFELSVKTFQLTARYDAAISNYLGKLTPYGGDSKTFSDTLTMQFKKAQDLRYGENPHQQAVFYREHNPFPASIANARQLHGKELSYNNIMDSDAAWNMVSDFILPAAVIMKHANPCGAATASQDLSEAYRKAMETDPISAFGGIVALNRPIDKKTAEEIAKTFLEVIIAPGFEEEALNLLQAKKNVRLLQISGEYQRECLGLDFRRVVGGLLVQERDMDSFDIRTAKIVTRRVPTEEEYQALDFAWRVVKHVKSNAIVFTARDQLVGVGAGQMSRVDSVKIAKMKAILPTKGCVLGSDAFFPFRDGVDMAAEAGITAIIQPGGSVRDEEAIEAANEHGMAMIFAGIRHFKH

SEQ ID NO: 92105 - DNA, 1557 bp, Desulfitobacterium hafniense Y51; identical to SEQ ID NO: 56317
  CDS (1)..(1557): transl_table=11

SEQ ID NO: 92106 - protein, 518 aa, Desulfitobacterium hafniense Y51; identical to SEQ ID NO: 56318

SEQ ID NO: 92107 - DNA, 1587 bp, Methylobacillus flagellatus KT; identical to SEQ ID NO: 56321
  CDS (1)..(1587): transl_table=11

SEQ ID NO: 92108 - protein, 528 aa, Methylobacillus flagellatus KT; identical to SEQ ID NO: 56322

SEQ ID NO: 92109 - DNA, 1617 bp, Methanococcoides burtonii DSM 6242
  CDS (1)..(1617): transl_table=11
ttggtaaaaagggcactgctaagcgtctcagacaagactggaatcgtggatttcgcacggggactagagcaactgaacatagagattatatcgactggcggaactgcgaagatgcttcgcgatgcgggtattgagacgatcgacgtctcagaagttaccggatttcctgaaatgatgggagggcgtgtaaaaacactccacccaaaaatacacggcggattgctgtgtatgagaggagatcccgaacatatgggagaagctgagaaggaatctattaagcttatcgatctggtagctgtcaatctgtacccctttgagataacagtctcgaaagaaggtgtgaaccttgacgaagcgatcgagaacatcgatatcggaggaccaaccttacttcgttctgccgctaagaactacaaatctgtaacagtagtatcagaccctgaagattatggagagatcctcaaggaattgagatcatccggcacagtctctgacaccacccgcgagaaacttgcggtcaaagtattcaggtacactgcaaattatgacagcaatattgatacgtacctgagcaagacccttctcgatgaagatgtcctgcgtatgaacttcactgagggtacaaagctcagatatggagagaactggcaccaggatgctacattctataaggatgagacaattgttggtcctgcactttcaaatgcaaagcaattgcatggaaaggaactttcatacaacaactatgtagatgcggacaatgccctccagaccatcaaagaggtagggaacaggaatcccgcagttgccattgtcaaacacaataacccatgcggactggcaaccggtaacactctttgcgaagctttggagcatgcatgggatggtgaccctgtatcagcatttggtagtataatctgcaccaataccgttttcgaccttgaatccgcagagttccttaagggtaagttcgtggagatcatactcgcaccaggattcgagcatgatgcccttgaatatctggaagataagagctcaaatctgcgccttcttgaattgccacagttcaacgaagcatttgataccgagaccacatacaaatatgtgatcggtggaatgctgaaacagacaaggaacatcgggctttacgagaagtgggactgtgttactgaaactgcgtaccctgaagagaaacgcggactgtccgaattctgtatttgcgcctgcaagagtacaaaatccaattccgtgacacttgcatacgaatacaaggacggatgctacgttatgatagcaatgggagcaggacagccaaaccgtgttgattccatacgtaaacttgcagcaacaaaagcaaaagagaaccttgagataatctacgaaagggaaaaaccagacatgagcttcgaagaatactggcaatccatactttcagaagcggttatggcttctgatgctttcttcccattcgatgacagtataatctattctgatgaaagcaagataagatacatactttcaccgggcggttccatccgtgatgacgaggtcatagctactgcaaatcgtctgaacatatcaatggtgttcactggaatgagacacttccttcactga

SEQ ID NO: 92110 - protein, 538 aa, Methanococcoides burtonii DSM 6242
MVKRALLSVSDKTGIVDFARGLEQLNIEIISTGGTAKMLRDAGIETIDVSEVTGFPEMMGGRVKTLHPKIHGGLLCMRGDPEHMGEAEKESIKLIDLVAVNLYPFEITVSKEGVNLDEAIENIDIGGPTLLRSAAKNYKSVTVVSDPEDYGEILKELRSSGTVSDTTREKLAVKVFRYTANYDSNIDTYLSKTLLDEDVLRMNFTEGTKLRYGENWHQDATFYKDETIVGPALSNAKQLHGKELSYNNYVDADNALQTIKEVGNRNPAVAIVKHNNPCGLATGNTLCEALEHAWDGDPVSAFGSIICTNTVFDLESAEFLKGKFVEIILAPGFEHDALEYLEDKSSNLRLLELPQFNEAFDTETTYKYVIGGMLKQTRNIGLYEKWDCVTETAYPEEKRGLSEFCICACKSTKSNSVTLAYEYKDGCYVMIAMGAGQPNRVDSIRKLAATKAKENLEIIYEREKPDMSFEEYWQSILSEAVMASDAFFPFDDSIIYSDESKIRYILSPGGSIRDDEVIATANRLNISMVFTGMRHFLH

SEQ ID NO: 92111 - DNA, 1572 bp, Acidobacteria bacterium Ellin345; identical to SEQ ID NO: 56325
  CDS (1)..(1572): transl_table=11

SEQ ID NO: 92112 - protein, 523 aa, Acidobacteria bacterium Ellin345; identical to SEQ ID NO: 56326

SEQ ID NO: 92113 - DNA, 1590 bp, Silicibacter sp. TM1040; identical to SEQ ID NO: 56327
  CDS (1)..(1590): transl_table=11

SEQ ID NO: 92114 - protein, 529 aa, Silicibacter sp. TM1040; identical to SEQ ID NO: 56328

SEQ ID NO: 92115 - DNA, 1614 bp, Mesorhizobium sp. BNC1
  CDS (1)..(1614): transl_table=11
atgaccgtttccgcgaagaatattccggcgcccgatctcgttcctgtgcggcgcgcgctcatatccgtctctgacaagacaggcattgtcgatttcgcccgcagtctggctgcccgggaagttgcgcttgcatccaccggcggcaccgcggcgctgctcgcgcgaagcggcatcggcgtgatggacgtctctcagctcaccggatttccggagatcatggacggacgcgtgaaaacgcttcatcctgccgtgcacggcggcctcctcgccatccgtgacgaccccgatcatcgatccgcaatggaaacacatgccatcaagccaatcgatctggtggtaatcaatctctatccgttcgaagacgtgcgtttcggcggaggggattatgcggcgacggtggagaatatagacattggcggcccagccatgttgcgcgctgcagccaagaaccacgcctatgtggcggtcgttaccgatccggcagattatgcccgagtattggaagccctggaaaaaaacgatggcgcgctcccctaccgcctgagacaggaactggcggccaaagcctatgcgcgtaccgcggcctatgacgcggcaatttcgcaatggtttgcagaatcccttgctattgctgagccggaatggcgctcctttggcggcagacttgctcaagtgatgcgctatggcgagaatccgcaccagcaggcaggcttttacgccaccggcgagaagcggccgggtgtggcgacggcgcgccaggtacagggcaagcagctttcctacaacaacatcaacgacacggacgccgccttcgagctggtctgcgaattcgacccgaaaaaggtcgcggccgttgccatcatcaagcacgccaatccctgcggcgtggcggagggaacctcactggccgaagcctatcgcaaagcacttgcctgtgatcccgtttccgccttcggcggcattgtcgcactcaatcgcattctggatgcggaggcggccgaggaaatcgcaaaaattttcaccgaggtaatcatcgcgcccgacgcgacggaggaagcgcaggcgattatcgccaccaagaagaacttgcgcctgctcttgacggaaggggtagccgacccgcgtgcgcctgggctttcggccaagaccgtagcgggcgggctgctcgtccagacgcgagacaatggcgtgatcgatgatctcgatctccgggtggtcaccaggcgtgcgccgtccgagaaggaaatggcaaacctgaaattcgccttccgcgtcgccaagcacgtgaagtcgaacgctatagtctacgcgcgggacctcgccacggtgggcatcggtgcgggccagatgagccgcgtcgattccgcccgcatcgccgcgcgaaaggcggaagatgccgctgctgccgcgggcggacagccgttgacgaaaggttctgtggtggcttcggacgcattcttcccctttgccgacggccttctctcggccgtggaggcgggggccacagcggttattcagccgggtggttccatgcgcgacgacgaggtgatcaaggcagccgacgagcacggcatcgccatggtcttcaccggcatgcggcatttcaggcactga

SEQ ID NO: 92116 - protein, 537 aa, Mesorhizobium sp. BNC1
MTVSAKNIPAPDLVPVRRALISVSDKTGIVDFARSLAAREVALASTGGTAALLARSGIGVMDVSQLTGFPEIMDGRVKTLHPAVHGGLLAIRDDPDHRSAMETHAIKPIDLVVINLYPFEDVRFGGGDYAATVENIDIGGPAMLRAAAKNHAYVAVVTDPADYARVLEALEKNDGALPYRLRQELAAKAYARTAAYDAAISQWFAESLAIAEPEWRSFGGRLAQVMRYGENPHQQAGFYATGEKRPGVATARQVQGKQLSYNNINDTDAAFELVCEFDPKKVAAVAIIKHANPCGVAEGTSLAEAYRKALACDPVSAFGGIVALNRILDAEAAEEIAKIFTEVIIAPDATEEAQAIIATKKNLRLLLTEGVADPRAPGLSAKTVAGGLLVQTRDNGVIDDLDLRVVTRRAPSEKEMANLKFAFRVAKHVKSNAIVYARDLATVGIGAGQMSRVDSARIAARKAEDAAAAAGGQPLTKGSVVASDAFFPFADGLLSAVEAGATAVIQPGGSMRDDEVIKAADEHGIAMVFTGMRHFRH

SEQ ID NO: 92117 - DNA, 1506 bp, Clostridium perfringens ATCC 13124
  CDS (1)..(1506): transl_table=11
atgaaaaagagagctttaataagtgtttttgataaagatggagttttagaacttgcaaaatttttaagagatagagatgtagaaataatatcaagtggtggaacttataaatatttaaaagaaaataacatagaggttaaagagataagtgaaataactgacttcccagaaatgttagatggaagagtaaaaactctacatcctttagttcatgctggaatattagcaataagagataataaagagcatatgaaaactttagaagagagagaaataaatactatagattatgtagttgtaaatttatatcctttctttgaaaaagttagagagaatttaagctttgaagaaaaggttgaatttattgatataggtggaccaacaatgttaagagcagcagctaagaattttaaagatgtggtagttctttcagataaaaaagattatgaaaaagtaatgaatgaaattaaagaaaataattgtgtttcatttaaattaagaaaaactcttgcaggaaaagtatttaacttaatgagtgcttatgatgctgcaatttctaacttcttactagagggagaagaggaatatccagaatatctatcagtttcatataagaaaattcaagatcttagatatggagaaaatccacatcaaggagctgcttattatagttcaacagaatttgatggagctatgaatagctttgaaattttaaatggaaaagctttatcttacaataatataaaggatttagatatagcatggaaggttgcttgtgaatttgaagaaacagcttgttgtgcattaaaacataatacaccttgtggggtagctgtaggagaaaattctaaagaggtttatttaaaggcttatgatgctgatccagtttcaatatttggtggaatagttgctataaatagaaagatagataaggctacagcagaagaaatggttaaaattttcttagaggtggtagcagcaccggattttgatgaagatgctttagaagtattaagaactaaaaagaatttaagagttataaaatgtaagaatactcctcaggctaaaaattacatggtaacagtagatggtggaatattagttcaaggagaagataataaacttgctaatgagtataaagttgtaactgaaaaagagccaacagaaatggaattaagagatatgatctttggaatgaaggttgtgaaatatgtaaaatctaatgctatagtagttgtaaaagatggagttgccactggtattggtggaggacaagttaatagaatttgggctactaaagaagctttagaaagaggaaaaggtggagcagtattagcatcagatgctttcttcccatttagagactgtgttgacgaagcggctaaaaatggaataaaagcaataattcaaccaggtggatctattagagatgaggagtctatagaggcttgtaatgaacatggaataagcatggtatttacaggagttagacattttaaacattag

SEQ ID NO: 92118 - protein, 501 aa, Clostridium perfringens ATCC 13124
MKKRALISVFDKDGVLELAKFLRDRDVEIISSGGTYKYLKENNIEVKEISEITDFPEMLDGRVKTLHPLVHAGILAIRDNKEHMKTLEEREINTIDYVVVNLYPFFEKVRENLSFEEKVEFIDIGGPTMLRAAAKNFKDVVVLSDKKDYEKVMNEIKENNCVSFKLRKTLAGKVFNLMSAYDAAISNFLLEGEEEYPEYLSVSYKKIQDLRYGENPHQGAAYYSSTEFDGAMNSFEILNGKALSYNNIKDLDIAWKVACEFEETACCALKHNTPCGVAVGENSKEVYLKAYDADPVSIFGGIVAINRKIDKATAEEMVKIFLEVVAAPDFDEDALEVLRTKKNLRVIKCKNTPQAKNYMVTVDGGILVQGEDNKLANEYKVVTEKEPTEMELRDMIFGMKVVKYVKSNAIVVVKDGVATGIGGGQVNRIWATKEALERGKGGAVLASDAFFPFRDCVDEAAKNGIKAIIQPGGSIRDEESIEACNEHGISMVFTGVRHFKH

SEQ ID NO: 92119 - DNA, 1554 bp, Trichodesmium erythraeum IMS101; identical to SEQ ID NO: 56335
  CDS (1)..(1554): transl_table=11

SEQ ID NO: 92120 - protein, 517 aa, Trichodesmium erythraeum IMS101; identical to SEQ ID NO: 56336

SEQ ID NO: 92121 - DNA, 1581 bp, Alkalilimnicola ehrlichei MLHE-1; identical to SEQ ID NO: 56339
  CDS (1)..(1581): transl_table=11

SEQ ID NO: 92122 - protein, 526 aa, Alkalilimnicola ehrlichei MLHE-1; identical to SEQ ID NO: 56340

SEQ ID NO: 92123 - DNA, 1590 bp, Hyphomonas neptunium ATCC 15444; identical to SEQ ID NO: 56341
  CDS (1)..(1590): transl_table=11

SEQ ID NO: 92124 - protein, 529 aa, Hyphomonas neptunium ATCC 15444; identical to SEQ ID NO: 56342

SEQ ID NO: 92125 - DNA, 1530 bp, Oenococcus oeni PSU-1; identical to SEQ ID NO: 56347
  CDS (1)..(1530): transl_table=11

SEQ ID NO: 92126 - protein, 509 aa, Oenococcus oeni PSU-1; identical to SEQ ID NO: 56348

SEQ ID NO: 92127 - DNA, 1530 bp, Solibacter usitatus Ellin6076
  CDS (1)..(1530): transl_table=11
atgccaaaaatcgcacgtgtactgattagcgttaccgacaaaaccgggatcatcgacttcgcgtccgccctctccgcaatgggcgccgacctgatctccaccggtggcaccgcccgcatgatccgcgaagccggcatccccgtagccgacgttagcgacgtcaccggcttccccgagatgctcgacggccgcgtcaagaccatgcacccgaagatcgccggcggcatcctggcgatgcgcggcaatcccgagcacatggccgcgatctccactcacggaatcgcacccattgacatggtggtggtcaatctctaccgattcgaagaagtcgcagccaaggccggcgcgcacctcgaagagctcatcgagaacatcgatatcggcggccccaccatgctccgcgcggccgcgaaaaactatcaggacgtcgccgtcgtcgtctctcccgccgattacccggcattgatcgaggagatgcgcgcctccgccggcgcactctcccacgaaaccaagtggcgcctggccaaaaaggtcttccgcgccaccgcggattacgacgccgccatcagcgcccgcctcgaacaagtggacgcccccgccgcgctcctcccacacttggcgatccgcgccgccaagctgatggacctccgctacggcgaaaatccgcatcaatccgccgccctctatggccaccgcggccagggcatcgccggcgccgagcagctccacggcaaggagctcagctacaacaacctggtggacctcgacgccgcctggcagctcgtcaacgaattcaaccggccggccgtcgccatcatcaaacacaccaacccctgcggttgcgccgagcaggataccctcgccgccgcataccgcaaggccttcgaagccgaccctgtttcggccttcggcggcgtgatcggcatcaatcgcaccgtggacgaggaaaccgcgcgcgagctcgccaagaccttcctcgaagccatcgccgcgcctgacttcaccgccgaggcgctctccatcctcaccgcgaagaagaacctccgtctcatgcgcgtggccccagccgccgaccccttggtggtgaaatcgatctccggcggctacctcgcccagaccgccgacaccgcgaagttggaccgcgcccaggccgtcgtcaaaaccaggcgcgccccgaccgaagaggaatgggtggccctggagtttggctggaaggtggccaagcacgtcaagtcgaacgccatcgtctatgcgcgcgccggccagaccgtcggtgtcggagccggccagatgagccgcgtcgattccgtcaagttaggcgccatgaaggccgtgctccccgtggccggcaccgtcgttgcatcggacgccttcttcccgttccccgatggagtcgaagaggccgctaagaacggcgcaacggcattcatccagcccggaggctccgtgcgcgacgaagaagtcatcgccgccgccgaccgcctcggcgtcgccatggtcttcaccggcgtccgccacttccgccactaa

SEQ ID NO: 92128 - protein, 509 aa, Solibacter usitatus Ellin6076
MPKIARVLISVTDKTGIIDFASALSAMGADLISTGGTARMIREAGIPVADVSDVTGFPEMLDGRVKTMHPKIAGGILAMRGNPEHMAAISTHGIAPIDMVVVNLYRFEEVAAKAGAHLEELIENIDIGGPTMLRAAAKNYQDVAVVVSPADYPALIEEMRASAGALSHETKWRLAKKVFRATADYDAAISARLEQVDAPAALLPHLAIRAAKLMDLRYGENPHQSAALYGHRGQGIAGAEQLHGKELSYNNLVDLDAAWQLVNEFNRPAVAIIKHTNPCGCAEQDTLAAAYRKAFEADPVSAFGGVIGINRTVDEETARELAKTFLEAIAAPDFTAEALSILTAKKNLRLMRVAPAADPLVVKSISGGYLAQTADTAKLDRAQAVVKTRRAPTEEEWVALEFGWKVAKHVKSNAIVYARAGQTVGVGAGQMSRVDSVKLGAMKAVLPVAGTVVASDAFFPFPDGVEEAAKNGATAFIQPGGSVRDEEVIAAADRLGVAMVFTGVRHFRH

SEQ ID NO: 92129 - DNA, 1599 bp, Magnetococcus sp. MC-1
  CDS (1)..(1599): transl_table=11
atggctaagattaaacgcgctcttatcagcgtctcggacaaaacaggtctggttcccttctgtcagggactggcggagcatggggtaagctttctctccacggggggcacggcccgcctgttgcgtgaaagtggcctggatgtaatggatgtatcagaatttacaggttttccagagatgttggatggccgggttaagacgttgcatcccaaggtgcatgggggtttgttggggttgcgtgacaatgcctctcaccagcagcagatgggggagcatggtattgagcccattgatatggtagtggtcaatctctatccctttgaggcgacggtggctaaggaggggtgtacattggaggaggccattgagaacattgatattggtggtccatccatgttgcgcagtgcggccaagaactatcgttcggtgacggtggtgacggatccagcggattatgcccgggtattggagagtttgcgtgcccatgatggccagtgtgatgcggggttgaatgcgcagttggcgcgtaaggtttatgcacgtacggcggcttatgatgcggcgatttccaactggttatcggcgttggataatgagggtcgccctggtgcttttcctgagacctacacggtacaatttaagaaggttcagggcatgcgttatggtgagaatccccatcagagtgcggccttttacgcagagagtccacccagtgaggaggcatcattagccacggccacgcagttacagggcaaggagctatcctttaacaacattcatgatgccaatggtgcgttggagttggtgaaggagtttagcaagccggcggcggtggtggtgaagcatgcgaatccgtgtggtgtggcggtgcatgatggggatctgttggcggcctatcgcatggcgcgggatacggatccggtatcggcgtttgggggtattatcgctttgaaccgttgtgtggatgtggcggtggccaaggagattgcgcagttatttgtcgaggtcattattgcaccggagtatgatgagcaggcattggagttgtttgcgaccaagaagaatttgcgtttattacgggtgcccaacattggggtagcgacggcggtgagcaccatggatctgaagcgggtgacgggtggattactgttacaggatcgggatttgaagcagttaccggagggttcgctcaaggtggtgacggagcgtgcgccgtcggaggcggagatgcgggatcttttatttgcgtggaaggtggttaagcacgtgaagtccaacgccattgtgtatgctaaagaacagcgcacgttgggtgttggggcgggtcagatgagtcgtgtggatgcttcacgcattgcggtatggaaggcgcaggatacggcgcacacggcgggtttgcgggagaatccattattgggtgcggcgatggcgtcggatgcatttttcccgttccgggatggagtggatgctgcggccaaggcgggggccaaggcggtgattcagccgggtggttcggttcgggatgaagaggtgattgcggcggccaatgagcatggtatggcgatggtgtttacgggcatgcgtcattttaagcactga

SEQ ID NO: 92130 - protein, 532 aa, Magnetococcus sp. MC-1
MAKIKRALISVSDKTGLVPFCQGLAEHGVSFLSTGGTARLLRESGLDVMDVSEFTGFPEMLDGRVKTLHPKVHGGLLGLRDNASHQQQMGEHGIEPIDMVVVNLYPFEATVAKEGCTLEEAIENIDIGGPSMLRSAAKNYRSVTVVTDPADYARVLESLRAHDGQCDAGLNAQLARKVYARTAAYDAAISNWLSALDNEGRPGAFPETYTVQFKKVQGMRYGENPHQSAAFYAESPPSEEASLATATQLQGKELSFNNIHDANGALELVKEFSKPAAVVVKHANPCGVAVHDGDLLAAYRMARDTDPVSAFGGIIALNRCVDVAVAKEIAQLFVEVIIAPEYDEQALELFATKKNLRLLRVPNIGVATAVSTMDLKRVTGGLLLQDRDLKQLPEGSLKVVTERAPSEAEMRDLLFAWKVVKHVKSNAIVYAKEQRTLGVGAGQMSRVDASRIAVWKAQDTAHTAGLRENPLLGAAMASDAFFPFRDGVDAAAKAGAKAVIQPGGSVRDEEVIAAANEHGMAMVFTGMRHFKH

SEQ ID NO: 92131 - DNA, 1599 bp, Shewanella sp. ANA-3
  CDS (1)..(1599): transl_table=11
atgactgttgcaaataatgccagacccattcgtcgcgcgctgttaagcgtttcagataaaaccggaattctcgaattcgccaaagcattacacgcccaaggcgttgaactgctgtcaacgggcggcaccgctcgcttgttagcggataacggcgtgcctgttatcgaagtatctgactatacaggacaccctgagatcatggatggtcgcgttaagaccctgcaccctaaagtgcatggtggcattttggcgcgtcgcggtcttgatgaaaatgtcatggctgccaacaacatcaatgcaatcgatctggttgcggttaacctctacccctttgccgataccgttgctaaagccggttgcaccctagaagatgcgattgaaaacatcgacatcggtggcccgactatggtgcgcgccgcggcgaaaaaccataaagacgtgactatcgtggtaaatgcggccgactataaccgcgtattagccgaaatggccgccaacaatggcagcacgactcacacgacccgtttcgatttagcgattgctgccttcgaacacactgcgggttacgatggcatgatcgccaactacttcggcactatggttcctgcacacagcactgacgagtgcttcgaagattctaagttcccacgcaccttcaacacccaattagtgaagaagcaagatctacgttacggtgaaaacagccaccaaactgcggccttctatgtcgacactaagatcgacgaagcctctgttgcgacagccgtccagctgcaaggtaaggcactgtcttacaacaacatcgccgataccgatgccgcccttgagtgtgtgaaagagttcagcgagccagcctgcgttatcgttaaacacgctaacccatgtggtgttgcactgggtaaagacttgctcgatgcctataaccgcgcctatcaaactgatccaacttcagccttcggcggcattatcgccttcaacggcgagttagatgcagcaacggctagcgctatcgttgagcgtcaattcgttgaagtgattattgcgccagtcgtgagccaaggcgcacgcgatgtagtggccaagaaaaccaacgtgcgtctgttagagtgcggtcaatgggatactaagaccaagaccttagactataagcgcgtgaacggtggcctgctggtgcaagaccgcgatcaaggcatggttggtttagatgacattaaagtcgtgactaaacgtcaaccgaccgagagcgagctgaaggacttaatgttctgctggaaagtggctaagttcgttaaatctaacgccattgtttacgctaaagacggtatgaccatcggtgtcggcgccggccaaatgagccgcgtctacagcgctaagattgccggtatcaaggcggccgatgaaggcctagaagtggttaactctgtgatggcgtccgatgccttcttcccattccgcgacggtatcgatgccgcagcggcggcgggcatcagctgcatcatccagccaggtggctcaatgcgcgatgctgaaatcatcgctgctgccgacgagcacggcatggccatggtaatgacgggcatgcgccacttccgtcactaa

SEQ ID NO: 92132 - protein, 532 aa, Shewanella sp. ANA-3
MTVANNARPIRRALLSVSDKTGILEFAKALHAQGVELLSTGGTARLLADNGVPVIEVSDYTGHPEIMDGRVKTLHPKVHGGILARRGLDENVMAANNINAIDLVAVNLYPFADTVAKAGCTLEDAIENIDIGGPTMVRAAAKNHKDVTIVVNAADYNRVLAEMAANNGSTTHTTRFDLAIAAFEHTAGYDGMIANYFGTMVPAHSTDECFEDSKFPRTFNTQLVKKQDLRYGENSHQTAAFYVDTKIDEASVATAVQLQGKALSYNNIADTDAALECVKEFSEPACVIVKHANPCGVALGKDLLDAYNRAYQTDPTSAFGGIIAFNGELDAATASAIVERQFVEVIIAPVVSQGARDVVAKKTNVRLLECGQWDTKTKTLDYKRVNGGLLVQDRDQGMVGLDDIKVVTKRQPTESELKDLMFCWKVAKFVKSNAIVYAKDGMTIGVGAGQMSRVYSAKIAGIKAADEGLEVVNSVMASDAFFPFRDGIDAAAAAGISCIIQPGGSMRDAEIIAAADEHGMAMVMTGMRHFRH

SEQ ID NO: 92133 - DNA, 1584 bp, Mycobacterium smegmatis str. MC2 155
  CDS (1)..(1584): transl_table=11
atgagcgacaagaaaccggtccggcgggccctgatcagtgtctacgacaagaccggtctcgccgatctggcgcgcggcctgcaccaggccggcgtcgcgatcgtctccaccggctcgaccgcaaaaaccattgccgccgccggtgttccggtgacgccggtggaacaggtcaccggtttccccgaggtgctcgacggccgggtcaagacgctgcacccgcgcgttcacgcagggttgctcgccgacacccgcaagcccgaacatctcgcggcgctcaaggaactcgacgtcgaggcgttcgaactggtggtggtgaacctctatccgttcagcgagaccgtggcctccggggcgtcggtggacgagtgcgtcgagcagatcgacatcggcggaccgtcgatggtgcgcgctgcggccaagaaccacccgagcgtcgcggtggtcgtcgacccgctgggctacgacggcgtgctcgccgcggtgcgtgccggcggcttcacgctcgccgagcgaaagaagttggcatcggtggcgttccgccacaccgccgagtacgacgtcgcggtcgcgagctggatgggctcgacgctgtcgccggaggagggctccgccgaaggtggagccgtcgaaccgtcgctgccgcagtggttcgccggtacgtggcaccgcgccgcggtgctgcgctacggcgagaacccgcaccagaaggccgcggtgtaccgcgacaacgcggcgtggcccggtctggcgcaggccgagcagttgcacggcaaggagatgtcctacaacaactacacggatgccgacgcggcgtggcgcgctgcgttcgaccacgagcagacgtgcgtggcgatcatcaagcatgccaacccctgtggcatcgcgatctcgtcgacatcggtggccgacgcgcaccgcaaggcccacgagtgcgacccgctgagcgcgttcggtggcgtcatcgcggccaacaccgaggtgagtgtcgagatggccgagaccatttcggagatcttcaccgaggtgatcatcgcgccggcctacgaacccggcgcggtcgaggtgctcgcccgcaagaagaacatccgcatcctggtggcctcacaaccgcccatcggcggcaccgaggtgcgccagatcagtggcggtctgctcctgcagcagcgcgacgcgctcgacgccgacggtgacgaccccaacaactggacgctggccaccggtgaaccggccgacccgaagacgttggaggacctcgtgttcgcgtggcgcgcgtgccgcgcggtgaagtccaacgcgatcgtcgtcgcgcgcgacggcgccacggtgggcgtgggcatgggccaggtgaaccgcgtcgacgccgcgaagctcgcggtgcagcgtggcggggaccgtgtggccggtgccgtcgccgcgtccgacgcgttcttcccgttccccgacgggctgcaggtactcaccgaggccgacgtcaaggccatcgtgcaccccggcggatcggtgcgcgacgccgaggtgaccgccgctgccgagcttgccggcatcacgctctacctcaccggcgcaaggcatttcgcgcactga

SEQ ID NO: 92134 - protein, 527 aa, Mycobacterium smegmatis str. MC2 155
MSDKKPVRRALISVYDKTGLADLARGLHQAGVAIVSTGSTAKTIAAAGVPVTPVEQVTGFPEVLDGRVKTLHPRVHAGLLADTRKPEHLAALKELDVEAFELVVVNLYPFSETVASGASVDECVEQIDIGGPSMVRAAAKNHPSVAVVVDPLGYDGVLAAVRAGGFTLAERKKLASVAFRHTAEYDVAVASWMGSTLSPEEGSAEGGAVEPSLPQWFAGTWHRAAVLRYGENPHQKAAVYRDNAAWPGLAQAEQLHGKEMSYNNYTDADAAWRAAFDHEQTCVAIIKHANPCGIAISSTSVADAHRKAHECDPLSAFGGVIAANTEVSVEMAETISEIFTEVIIAPAYEPGAVEVLARKKNIRILVASQPPIGGTEVRQISGGLLLQQRDALDADGDDPNNWTLATGEPADPKTLEDLVFAWRACRAVKSNAIVVARDGATVGVGMGQVNRVDAAKLAVQRGGDRVAGAVAASDAFFPFPDGLQVLTEADVKAIVHPGGSVRDAEVTAAAELAGITLYLTGARHFAH

SEQ ID NO: 92135 - DNA, 1581 bp, Neisseria meningitidis FAM18
  CDS (1)..(1581): transl_table=11
atgccttccatcaaacgcgccctgatcagcctgtccgacaagacgggcgcagtcgaatttgcccaaaccctgaccaagctcggtgtcgaaatcctctctaccggcggcacggcgaagctgcttgccgatgcgggcgttcccgtgattgaagttgccgactacaccggtttccccgaaatgctcgacggccgcgtgaaaaccctgcatccgaaaatccacggcggtattttgggccggcgcgatttggacgaacacgtcgccaagatggaagaacacggcatcggcaacatcgacctcgtgtgtgtcaacctctaccccttcgccgccaccatcgccaaaccaaactgcacgctggaagacgcgattgaaaacatcgacatcggcggcccgaccatggtgcgctccgccgcgaaaaactggaaacacgtcgccatcgttaccgacacagccgatttcccggccatcgccgccgaactcgaagccaacaatggcgcattgagcgacaaaacccgcttcaacctgtcgcgcaaggcgttcagccacaccgcccaatacgacggcatgatttccaactacctgacctcactttcagacgacgttttgagcggagagcctgaaatcggcgaatttccaagccagttcaaccaaagctggattaaagtgcaagacatgcgctatggcgaaaacccgcatcagcgcgccgcgttctaccgcgatattgaccccgccgcaggcagcctttccgcctacaaacaactgcaaggcaaagaattgtcttacaacaacatcgccgatgccgatgccgcatgggaagccgtcaaatcctttgacgcgccagcctgcgtgatcgtcaaacacgccaatccgtgcggcgtcgccgttgcagccgatacattgaccgcctacaaactcgcctacgtcaccgacaccaccagcgcgttcggcggcatcatcgccttcaaccgcgaagtggacggcgaaaccgtcaaacagattaccgacaaccagtttatggaagtcttgatggcgccgaagtttaccgccgaagccctcgaaatcgccgccgccaagaaaaacgtgcgcgtattggaagtgccgcttgaggcaggcgcaaaccgcttcgaactcaaacgcgtcggcggcggactgttggtacaaacccctgatattcaccgcctcaaccgcgccgatttgaaagtcgtctccaaacgccaaccaaccgagcaagaatggaacgacctgatgtttgtttggaacgtcgcaaaatacgtcaaatccaacgccatcgtcttcggcaaaggcggtcaaacctacggcatcggcgcaggccaaatgagccgcgtggacagcacccgcatcgccgcccgcaaagcgcaagatgccaatctcgacctcaacggcgcatgtgccgcttccgatgctttcttccccttccgcgacggcgtggacgtgattgccgagcagggcatcaaagccatcatccatccggcaggttcgatgcgcgatcaggaagtcttcgacgcagcggacgaacacggcatcgccatggtcgtaaccgacgtgcgccacttccgccattaa

SEQ ID NO: 92136 - protein, 526 aa, Neisseria meningitidis FAM18
MPSIKRALISLSDKTGAVEFAQTLTKLGVEILSTGGTAKLLADAGVPVIEVADYTGFPEMLDGRVKTLHPKIHGGILGRRDLDEHVAKMEEHGIGNIDLVCVNLYPFAATIAKPNCTLEDAIENIDIGGPTMVRSAAKNWKHVAIVTDTADFPAIAAELEANNGALSDKTRFNLSRKAFSHTAQYDGMISNYLTSLSDDVLSGEPEIGEFPSQFNQSWIKVQDMRYGENPHQRAAFYRDIDPAAGSLSAYKQLQGKELSYNNIADADAAWEAVKSFDAPACVIVKHANPCGVAVAADTLTAYKLAYVTDTTSAFGGIIAFNREVDGETVKQITDNQFMEVLMAPKFTAEALEIAAAKKNVRVLEVPLEAGANRFELKRVGGGLLVQTPDIHRLNRADLKVVSKRQPTEQEWNDLMFVWNVAKYVKSNAIVFGKGGQTYGIGAGQMSRVDSTRIAARKAQDANLDLNGACAASDAFFPFRDGVDVIAEQGIKAIIHPAGSMRDQEVFDAADEHGIAMVVTDVRHFRH

SEQ ID NO: 92137 - DNA, 1599 bp, Haemophilus somnus 2336
  CDS (1)..(1599): transl_table=11
atgcaattaaatcatcctattcgtcaagcattactcagcgtttcagataaatcaggaattgttgaatttgcacaaggtttagttagacgaggtgtaaaactattatcaacaggggggacggcaaaattactcgctgaaaacgggattcctgttacggaagtatctgattatacaggttttcctgaaatgatggagggacgtgtaaaaaccttgcatcctaaaattcatgggggcattttaggtcgccgtggtatagatgatgaagttatgatgcaacatcaaattgatgctattgatatggttgtagtgaacttatatccttttgcggcaactgtagcaaaacctgattgcacacttgaagatgcagtagaaaacattgatattggcggtccgacaatggtacgttctgccgcaaaaaatcatcaacatgtggctattgtagtcaataatagcgattttaatgcaattcttgctgaaatggatcaaaatcgaaatagtttaacattagagacaagatttgatttagccattaaagcgtttgaacataccgcacaatatgacagcatgatcgccaattatttcggacaaatggtaaaaccttatttcagagctgaagaagaagctgaagcgaagtgcggtcaatttccacgaactttaaatcttaattttatacgtaaacaatctatgcgttatggtgaaaacggtcatcaaaaagcagcattctatgtagaacaagacgtaaaagaagcaagtgtctcaaccgctaaacagttacaaggtaaagcactttcttataataatattgccgacactgatgccgcacttgaatgtgtgaaatctttttccgagccggcttgtgttattgttaagcatgctaacccttgcggtgtagcactgggcaaggatattctcgaagcctataatcgagcttaccaaacggatccaacctcagctttcggtggaattattgcatttaatcgtgagttagatgaagacacggcaaaagccattattgagcggcaattcgttgaagtgatcattgcaccgaccgtcagttccgccgcccaagaaattgtgaaaagtaagaaaaatgttcgcttattgatgtgtggcaattgggaaagtgcaatacaacgcttggattttaaacgtgtcaatggcggtttgttggtacaagaggctgatttatctatggtggatttagcagatcttgaagtagtcagtaaacgtcaaccgaccaaacaagagttggaagatcttttattctgttggaaagtggcaaaatttgtgaaatccaacgctattgtatacgctaaaaataatcaaactgtagggattggtgccggacaaatgagccgtgtttattcagcgaaaattgcagggatcaaagcaaaagatgaaggtttggaagtaaaaggctgtgtaatggcatcggatgctttctttccgttccgtgatggcattgatgcagccgcaaaagttggtattgaatgcgtaatccatccaggcggttcaatgcgtgatcaagaagttatcgatgccgccaatgagcataatatggtaatggtactcactaaaatgcgtcattttagacattaa

SEQ ID NO: 92138 - protein, 532 aa, Haemophilus somnus 2336
MQLNHPIRQALLSVSDKSGIVEFAQGLVRRGVKLLSTGGTAKLLAENGIPVTEVSDYTGFPEMMEGRVKTLHPKIHGGILGRRGIDDEVMMQHQIDAIDMVVVNLYPFAATVAKPDCTLEDAVENIDIGGPTMVRSAAKNHQHVAIVVNNSDFNAILAEMDQNRNSLTLETRFDLAIKAFEHTAQYDSMIANYFGQMVKPYFRAEEEAEAKCGQFPRTLNLNFIRKQSMRYGENGHQKAAFYVEQDVKEASVSTAKQLQGKALSYNNIADTDAALECVKSFSEPACVIVKHANPCGVALGKDILEAYNRAYQTDPTSAFGGIIAFNRELDEDTAKAIIERQFVEVIIAPTVSSAAQEIVKSKKNVRLLMCGNWESAIQRLDFKRVNGGLLVQEADLSMVDLADLEVVSKRQPTKQELEDLLFCWKVAKFVKSNAIVYAKNNQTVGIGAGQMSRVYSAKIAGIKAKDEGLEVKGCVMASDAFFPFRDGIDAAAKVGIECVIHPGGSMRDQEVIDAANEHNMVMVLTKMRHFRH

SEQ ID NO: 92139 - DNA, 1590 bp, Actinobacillus pleuropneumoniae serovar 1 str. 4074
  CDS (1)..(1590): transl_table=11
atggcgattcaacaggcgttattaagtgtgtctgacaaaaaaggtattgtagaatttgcacaagggctggtagctcgcggtgtgaaattactttcgacaggcggtacggcaaagctgttagctgaagctggcttaccggtcacggaagtatcggactacaccggcttccctgaaatgatggacggtcgcgtaaaaaccctgcatccgaaagtacacggcggtattcttggtcgccgcggtacggatgatgaagtgatgaaccgacacggtatcgaacgtattgatatagtggtagtaaacttatacccgtttgcggcaaccgttgcgaatccaaattgcaccttagcggatgcagttgaaaatattgatatcggcggcccgaccatggtgcgttctgcagcgaaaaaccataaagatgtggcgatcgtggtgaataataacgattttgatgcaattcttgccgaaatggatcaaaaccaaaacgaattaacccttgaaacgcgtttcaacctggcaattaaagcatttgaacatacggcacaatacgattcaatgattgcaaactacttcggtaaacttgtcccgccataccaaggtgctgaggaagaagatttaactcaagtctgcggtcaattccctcgtacattaaacttaaatttcgtacgcaaacaaaccatgcgttacggtgaaaactcacatcaaaatgcagcattctatgtagaaaacgaagtgaaagaagcttctgtttcaaccgcaaaacaattacaaggtaaagcactttcttataacaatattgcggataccgatgcggcacttgagtgcgtaaaagaatttgcagaaccggcttgcgtgattgtgaaacacgctaacccttgcggtgtggcattaggtaaagacattttagaagcttataaccgtgcttaccaaaccgacccgacatcagcattcggcggtattattgctttcaaccgtgagttagacggtgaaacggcacaaacgatcgcagaacgccaatttgtggaagtgattattgctccaagcgtttcagaagcggcaaaagcagcgcttgcgaagaagaaaaatgtgcgtgtcttagaatgtggtgaatttactcaagcgcaaaaacgtttagatttcaaacgtgtaaacggcggtttattagtgcaagatgcggatcaaggttcggtttcaattgatgatttacaagtggtatccgaacgtaaaccaagcaaagaagagcttgaagacttattattctgctggaaagtggcaaaatatgtgaaatcaaatgcgattgtctatgcgaaaaacggtcaaactatcggtatcggtgcaggtcaaatgagccgtgtctattcagcgaaaattgccggtattaaagcggaagacgaaggcttacaagttgctggctgcgtaatggcttcagatgcgttcttcccattccgtgacggtattgatgcggcagctaaagtcggcattacttgcgtaatccatccgggtggctcaatgcgagatcaagaagtgattgatgctgctaacgaacacggtatggcaatggtcttaaccggtatgcgccatttccgtcactaa

SEQ ID NO: 92140 - protein, 529 aa, Actinobacillus pleuropneumoniae serovar 1 str. 4074
MAIQQALLSVSDKKGIVEFAQGLVARGVKLLSTGGTAKLLAEAGLPVTEVSDYTGFPEMMDGRVKTLHPKVHGGILGRRGTDDEVMNRHGIERIDIVVVNLYPFAATVANPNCTLADAVENIDIGGPTMVRSAAKNHKDVAIVVNNNDFDAILAEMDQNQNELTLETRFNLAIKAFEHTAQYDSMIANYFGKLVPPYQGAEEEDLTQVCGQFPRTLNLNFVRKQTMRYGENSHQNAAFYVENEVKEASVSTAKQLQGKALSYNNIADTDAALECVKEFAEPACVIVKHANPCGVALGKDILEAYNRAYQTDPTSAFGGIIAFNRELDGETAQTIAERQFVEVIIAPSVSEAAKAALAKKKNVRVLECGEFTQAQKRLDFKRVNGGLLVQDADQGSVSIDDLQVVSERKPSKEELEDLLFCWKVAKYVKSNAIVYAKNGQTIGIGAGQMSRVYSAKIAGIKAEDEGLQVAGCVMASDAFFPFRDGIDAAAKVGITCVIHPGGSMRDQEVIDAANEHGMAMVLTGMRHFRH

SEQ ID NO: 92141 - DNA, 1515 bp, Fusobacterium nucleatum subsp. vincentii ATCC 49256; identical to SEQ ID NO: 56357
  CDS (1)..(1515): transl_table=11

SEQ ID NO: 92142 - protein, 504 aa, Fusobacterium nucleatum subsp. vincentii ATCC 49256; identical to SEQ ID NO: 56358

SEQ ID NO: 92143 - DNA, 1599 bp, Haemophilus influenzae R2846
  CDS (1)..(1599): transl_table=11
atggcagatcgtccaattcgtcaggctttactgagtgtgtctgataaaacgggtattgtagagtttgctcaaggtttagttaaacgtggtgtaaaactactttcaacaggtggaacggcaaaacttttagcacaaaatggtttacctgtaatggaagtgtctgattacacaggtttcccagaaatgatggacggtcgagtgaaaaccttacatcccaaagtacatggcggtattcttggtcgtcgtggtacagatgatgccatcatgcagcaacatgccattgaaggcattgatatggtggtggtgaatttatatccatttgcagccactgtggctaaacctgattgcactttggctgatgcggtagaaaatatcgatattggcggtccaacaatggttcgttctgcggcgaaaaaccacaaagatgtggcgatcgtagttaataacaatgatttcaacgcaattctagccgaaatggatcaacatcaaaacagcctaacttttgaaactcgttttgaccttgcgattaaagcatttgaacataccgctcaatatgattctatgattgccaactatttcggtcagctagtaaaaccttatcatattgcagaggaagaagaggcgaatgcgaagtgcggtcaattcccacgaactttaaaccttaacttcgtgcgtaaacaaactatgcgttacggcgaaaacgcccatcaaaatgcggcattttatgttgatttaaatgtgaaagaagcgagcgtggctacagctaatcaactgcaaggtaaagccttgtcttacaataatattgccgacactgatgcagcacttgaatgcgtgaaagaatttgacgagccagcttgcgtaatcgttaaacacgccaatccatgtggcgtggcgttaggtaaggatattttagacgcctataatcgcgcttaccaaaccgatccaacgtctgcttttggcggcattattgcttttaaccgtgaattagacgaaaaaacggcgaatgaaattgtggaacgccaattcgttgaagtgattatcgcaccgaaagtttctgctgaagcgcaagaagtaatgaagcgtaagaaaaatgtgcgtttgcttgaatgtggtgaatggacttcttgttccgaacgtttggatttcaaacgtgtaaacggcggtttattagtacaagatgcggatttaggtatggttggcgtgaatgatttaaaagtcgtgagtaaacgtcagccaactgaacaagaattaaaagacttattattctgctggaaagtggcaaaatttgtgaaatcgaatgccattgtttacgccaaagacaatcaaactatcggcattggtgcaggtcaaatgagccgcgtatattctgcgaagattgcgggtattaaagcgcaagatgaaggtttagaagtggctggttgtgtgatggcatctgatgcgttcttcccattccgtgacggcattgatgcggcggcgaaagtggggattcaatgtgtgatccagccaggtggatcaatgcgcgatcaagaagtcattgatgcggcggatgaacataatatggtgatggtattgactggaatgcgacattttagacattaa

SEQ ID NO: 92144 - protein, 532 aa, Haemophilus influenzae R2846
MADRPIRQALLSVSDKTGIVEFAQGLVKRGVKLLSTGGTAKLLAQNGLPVMEVSDYTGFPEMMDGRVKTLHPKVHGGILGRRGTDDAIMQQHAIEGIDMVVVNLYPFAATVAKPDCTLADAVENIDIGGPTMVRSAAKNHKDVAIVVNNNDFNAILAEMDQHQNSLTFETRFDLAIKAFEHTAQYDSMIANYFGQLVKPYHIAEEEEANAKCGQFPRTLNLNFVRKQTMRYGENAHQNAAFYVDLNVKEASVATANQLQGKALSYNNIADTDAALECVKEFDEPACVIVKHANPCGVALGKDILDAYNRAYQTDPTSAFGGIIAFNRELDEKTANEIVERQFVEVIIAPKVSAEAQEVMKRKKNVRLLECGEWTSCSERLDFKRVNGGLLVQDADLGMVGVNDLKVVSKRQPTEQELKDLLFCWKVAKFVKSNAIVYAKDNQTIGIGAGQMSRVYSAKIAGIKAQDEGLEVAGCVMASDAFFPFRDGIDAAAKVGIQCVIQPGGSMRDQEVIDAADEHNMVMVLTGMRHFRH

SEQ ID NO: 92145 - DNA, 1551 bp, Crocosphaera watsonii WH 8501; identical to SEQ ID NO: 56359
  CDS (1)..(1551): transl_table=11

SEQ ID NO: 92146 - protein, 516 aa, Crocosphaera watsonii WH 8501; identical to SEQ ID NO: 56360

SEQ ID NO: 92147 - DNA, 1578 bp, Prosthecochloris aestuarii DSM 271
  CDS (1)..(1578): transl_table=11
atgtctgatcctgttatcaagcgagcgttggtttctgtttctgataaaaccggcatcgtcgatttttgccgtgagctgggggctatgggtgtcgagattttttcaaccggaggcaccctgcgtattcttcaggagtccggtatcgaagctgcttcaatttcgacgataaccggttttcctgagattatggatggccgcgtgaaaacgcttcacccgaaaattcacggcggcctgcttgctgttcgtgacaacgaggatcatgtcggccaggcaaaggcgaatggtattgagtttatcgatatggttgttgttaatctctaccctttcgaggctactgttgccaagcctgatgtgacgtttgaagaagctatcgaaaatattgacatcggcggtccgtcgatgcttcgcagcgcagcgaagaataacgagtctgtcacggtggtgaccgacagcgctgattatgcaacggttcttgatgagatgcgctccaataatggtgcgacccgtcgtgagactcgcctgacccttgcaagaaaggtgtttgaacttacctcgcgctatgaccgtgcgattgctgattacctgatcggtgccgaggagagtggcgaaacggaggctccggccgctatttccgtgaagcttgaaaaagagctcgatatgcgttatggcgagaatcctcatcagagcgccggtttctatcgtcttgtggatggtcagggatcacgctgttttgatgatttcttcgacaagttgcacggtaaggagttgtcgtacaacaatatgcttgatattgccgctgcgactggacttgtcgaggagtttcgcggtgaggatcctgcagtggttatcatcaaacacaccaacccgtgcggggttgctcaggcaggaactcttgttgacgcgtatcgcaaggcgttttcgaccgatacacagtcaccgtttggcggtatcatcgcttttaacgttccgctcgatatggagacagcacttgccgtcgatgagatttttaccgagattctgattgctccggcatacgaggatggggtgctggatatgctgatgaagaagaaaaaccgtcgtcttgttcttcagaaaaaggcgcttctccaggaggtcatggaatacaagtcgacacagttcggcatgctcgttcaggatcgcgacagcaagattgtttctcgtgaggacctgaaggttgtgacgaaacgccagccggacgagcaggaacttgatgatatgatgtttgcatggaagatcgccaagcatgtgaagtccaatacgattgtgtatgtgaaaaacggtcagacgattggtgtgggagcaggtcagatgtcgcgtatcgattcggcaaaaatcgctcgttccaaggctgccgaggccggtttggatatcaagggttctgcagttgcttcagatgcgtttttcccgtttgcagatggtttgcttgccgctgctgaagccggtgcgacatcggtcatacagcctggcggatcgatccgcgacgatgaggttattgccgctgcggacgagaacaaccttgcaatggtctttacgtcgatgcgccacttcaagcattga

SEQ ID NO: 92148 - protein, 525 aa, Prosthecochloris aestuarii DSM 271
MSDPVIKRALVSVSDKTGIVDFCRELGAMGVEIFSTGGTLRILQESGIEAASISTITGFPEIMDGRVKTLHPKIHGGLLAVRDNEDHVGQAKANGIEFIDMVVVNLYPFEATVAKPDVTFEEAIENIDIGGPSMLRSAAKNNESVTVVTDSADYATVLDEMRSNNGATRRETRLTLARKVFELTSRYDRAIADYLIGAEESGETEAPAAISVKLEKELDMRYGENPHQSAGFYRLVDGQGSRCFDDFFDKLHGKELSYNNMLDIAAATGLVEEFRGEDPAVVIIKHTNPCGVAQAGTLVDAYRKAFSTDTQSPFGGIIAFNVPLDMETALAVDEIFTEILIAPAYEDGVLDMLMKKKNRRLVLQKKALLQEVMEYKSTQFGMLVQDRDSKIVSREDLKVVTKRQPDEQELDDMMFAWKIAKHVKSNTIVYVKNGQTIGVGAGQMSRIDSAKIARSKAAEAGLDIKGSAVASDAFFPFADGLLAAAEAGATSVIQPGGSIRDDEVIAAADENNLAMVFTSMRHFKH

SEQ ID NO: 92149 - DNA, 1593 bp, Xylella fastidiosa Dixon; identical to SEQ ID NO: 56363
  CDS (1)..(1593): transl_table=11

SEQ ID NO: 92150 - protein, 530 aa, Xylella fastidiosa Dixon; identical to SEQ ID NO: 56364

SEQ ID NO: 92151 - DNA, 1587 bp, Sulfitobacter sp. EE-36; identical to SEQ ID NO: 56367
  CDS (1)..(1587): transl_table=11

SEQ ID NO: 92152 - protein, 528 aa, Sulfitobacter sp. EE-36; identical to SEQ ID NO: 56368

SEQ ID NO: 92153 - DNA, 1596 bp, Roseovarius nubinhibens ISM; identical to SEQ ID NO: 56369
  CDS (1)..(1596): transl_table=11

SEQ ID NO: 92154 - protein, 531 aa, Roseovarius nubinhibens ISM; identical to SEQ ID NO: 56370

SEQ ID NO: 92155 - DNA, 1623 bp, Erythrobacter sp. NAP1; identical to SEQ ID NO: 56375
  CDS (1)..(1623): transl_table=11

SEQ ID NO: 92156 - protein, 540 aa, Erythrobacter sp. NAP1; identical to SEQ ID NO: 56376

SEQ ID NO: 92157 - DNA, 1593 bp, Pseudoalteromonas tunicata D2; identical to SEQ ID NO: 56383
  CDS (1)..(1593): transl_table=11

SEQ ID NO: 92158 - protein, 530 aa, Pseudoalteromonas tunicata D2; identical to SEQ ID NO: 56384

SEQ ID NO: 92159 - DNA, 1593 bp, Photobacterium sp. SKA34; identical to SEQ ID NO: 56385
  CDS (1)..(1593): transl_table=11

SEQ ID NO: 92160 - protein, 530 aa, Photobacterium sp. SKA34; identical to SEQ ID NO: 56386

SEQ ID NO: 92161 - DNA, 1602 bp, Oceanobacter sp. RED65; identical to SEQ ID NO: 56391
  CDS (1)..(1602): transl_table=11

SEQ ID NO: 92162 - protein, 533 aa, Oceanobacter sp. RED65; identical to SEQ ID NO: 56392

SEQ ID NO: 92163 - DNA, 1587 bp, Alteromonadales bacterium TW-7; identical to SEQ ID NO: 56395
  CDS (1)..(1587): transl_table=11

SEQ ID NO: 92164 - protein, 528 aa, Alteromonadales bacterium TW-7; identical to SEQ ID NO: 56396

SEQ ID NO: 92165 - DNA, 1578 bp, marine gamma proteobacterium HTCC2143
  CDS (1)..(1578): transl_table=11
atgagcaatgatcaaaacttagtctctgttaaacgtgccctgattagcgtctccgacaaatcaggcatcgttgaattcgcccaatccctgcaatctcaaggtgttgaaatactttctaccggcggcacctataaattgctgcgcgctaataacatcgacgctgtagaggtttctgaatataccggattcccggagatgatggatggccgggtgaaaactctgcaccccaaaattcatggtggtattctcgcgcgacgtggccaggacgatacagtcatggccgagcatggcatcaatgcgatcgatatggtggtggtcaacttgtatcctttcgagcaaacagtagcaaaccctgactgcacattggcagacgccatagaaaatattgatattggcggaccaacaatggttcgggctgccgccaaaaacaatgcttttgttaatattgttgtcaacgcctcagactacgctttagttatcgaagagatgcagacaaacaatggcgcaacatcacaggcgactcgctttgaccttgctattaaagcttatgaacatactgccgcttatgacggcgctatcgccaattactttggccacaaagttcccggcggcaatgataattttccccgtacttttaatagccagttcactaaagctcaggacatgcgctatggtgaaaactctcaccaaaattctgcgttctataccgaaaaaaatccggctgccggttctatatcaacgtctcaacaattgcagggtaaagaactgtcatacaacaatatcgccgatacggatgccgctcttgaatgtgtcaagcaatttgcagaacccgcctgcgtcattgtgaagcacgctaatccttgtggtgtagccattgccgataatatcggtgacgcttacaacaaggcatttgcaacagacactgaatcagcatttggcggcattatcgccttcaatcgtgagctggacggggctactgctgccgctatttgtgagcgccaattcgtcgaagttatcattgcgccatcggtttcacgtgaagcaattgacgttgtgactgccaagaaaaatgttcgcttgttagaatgcggcccatgggaaaaatctgttgcggactacgatttaaaacgcgtaaatggcggtttacttattcaggatcgcgacctcggtgttatcaccgaagccgatttgaaaatcgttagtaagcggcagcctaccgaaacagaaattcgcgatctgttatttacttggaaagttgcaaaatttgttaaatctaatgccattgtctatggccacgatggccgcactgttggtgttggggcgggtcagatgagtcgcattaattcagcgcgaattgccggtattaaagcagaacatgcagggttgaaagtcgaaggatcagtgatggcttcggacgctttctttccattccgggacggaatcgataatgccgctcaagccggtatccactgcgtcattcagcccggcggttctatccgtgacgacgaagttattgctgcagccgatgaagccaatatggccatggtgtttaccagcatgcgccacttccgacactag

SEQ ID NO: 92166 - protein, 525 aa, marine gamma proteobacterium HTCC2143
MSNDQNLVSVKRALISVSDKSGIVEFAQSLQSQGVEILSTGGTYKLLRANNIDAVEVSEYTGFPEMMDGRVKTLHPKIHGGILARRGQDDTVMAEHGINAIDMVVVNLYPFEQTVANPDCTLADAIENIDIGGPTMVRAAAKNNAFVNIVVNASDYALVIEEMQTNNGATSQATRFDLAIKAYEHTAAYDGAIANYFGHKVPGGNDNFPRTFNSQFTKAQDMRYGENSHQNSAFYTEKNPAAGSISTSQQLQGKELSYNNIADTDAALECVKQFAEPACVIVKHANPCGVAIADNIGDAYNKAFATDTESAFGGIIAFNRELDGATAAAICERQFVEVIIAPSVSREAIDVVTAKKNVRLLECGPWEKSVADYDLKRVNGGLLIQDRDLGVITEADLKIVSKRQPTETEIRDLLFTWKVAKFVKSNAIVYGHDGRTVGVGAGQMSRINSARIAGIKAEHAGLKVEGSVMASDAFFPFRDGIDNAAQAGIHCVIQPGGSIRDDEVIAAADEANMAMVFTSMRHFRH

SEQ ID NO: 92167 - DNA, 1575 bp, marine gamma proteobacterium HTCC2080; identical to SEQ ID NO: 56397
  CDS (1)..(1575): transl_table=11

SEQ ID NO: 92168 - protein, 524 aa, marine gamma proteobacterium HTCC2080; identical to SEQ ID NO: 56398

SEQ ID NO: 92169 - DNA, 1941 bp, Aspergillus niger
  CDS (1)..(1941)
atgttcttgatgttgctcttgctcttgacctcttcactgtcagtatctcaggatgtctcaacaaaagtcagtggacttggtccgatacctgtccccacaatttggcatttctgttacttgcgagaattcagagtatctggggctaattgcattcttcatcatccgtctatagccatcctttccgtctacgacaagactggactgcttgacctggccaagggcctcgtcaagcacaatgtccggttgctcgcctctggtggtaccgcgagattgatccgggaggcgggattccccgttgaagatgtctccgccatcacccatgccccggagatgctcggtggccgtgtcaagactcttcaccccgctgtccacggtggtatccttgcccgtgatatcgagtctgacgagaaggatctggccgaccagaacattgccaaggtggacttcgtggtctgcaacctgtaccccttcaaggagaccgtcaacaaggtgaacgttaccattgaggaagctgttgaggagatcgacattggcggagtcaccctcctccgtgctgctgccaagaaccactcccgtgttaccatcctctcggacccccaggactaccctgaattcctcaaggagctggaagccggtgagatcaccgacgctagccgtaagtcctacgctcttaaggcctttgagcacaccgccgactacgacactgctatctccggtttcttccgcaagcagtatgcaggcaacggcgagcagtacatggctctccgctacggcacgaacccccaccagaagccggcttctgccttcatggcccaaggcaagcttcctttcaaggccctgaacggagcccctggctacgtgaacctgctcgatgctctcaacgcttgggctctcgttaaggaactcaagcaggcccttggcctgccggctgcggccagcttcaagcacgtgtccccggccggtgctgccgtcggcgtgcccttgaccgagaaggagcgtaaggtctacatggtcgatgacattgctggcatcgagtcttccggtctggctcaagcctacgctcgtgcccgtggtgccgaccgtatgtccagcttcggtgacattctcgccctcagcgacgttgttgacgttcccactgctaagatcgtctcccgcgaggtctccgacggtgtcatcgccgccggctacactcctgaggccctgcagatcctttctaagaagaagggtggcaagtaccttgtccttcagatggacgagaactatgtgcctgctgcggaggagacccgtactctgtacggtgttcagctcacccagcaccgcaacgacattgtgatcaccccccagaagaccttcaacaccgtcatcacccccaaggacctgaagagtcttcctgaaagtgctctgcgcgaccttaccgtggcaaccatcgccctcaagtacactcagtcgaactctgtgtgctacgctctgaatggccaggttatcggccttggtgctggtcagcagagccgtatccactgcacccgtctggctggtgacaaggcagacaactggtggatgcgcttccacgaccgtgtgctcaacatcaagtggaagcagggcaccaagcgccccgacaagagcaacgctatcgacctcctctgctccggacagacccctcgcaccgaggctgagaaggccgagtacgagcgtgtcttcgaggaagtccccgctcccttcacccaggaagagcgcgacgcttggctccagaacttgggcgaggttgctgtctcctcggatgctttcttccccttcattgacaacgtcttccgtgctgcccgctccggtgtcaagtacatcgccgcccccagcggtagccagaacgatagtgccgtcttcgagacttcggagaagcttggcattgtgttcgtcgagcagggcactcgcttgttccaccactaa

SEQ ID NO: 92170 - protein, 646 aa, Aspergillus niger
MFLMLLLLLTSSLSVSQDVSTKVSGLGPIPVPTIWHFCYLREFRVSGANCILHHPSIAILSVYDKTGLLDLAKGLVKHNVRLLASGGTARLIREAGFPVEDVSAITHAPEMLGGRVKTLHPAVHGGILARDIESDEKDLADQNIAKVDFVVCNLYPFKETVNKVNVTIEEAVEEIDIGGVTLLRAAAKNHSRVTILSDPQDYPEFLKELEAGEITDASRKSYALKAFEHTADYDTAISGFFRKQYAGNGEQYMALRYGTNPHQKPASAFMAQGKLPFKALNGAPGYVNLLDALNAWALVKELKQALGLPAAASFKHVSPAGAAVGVPLTEKERKVYMVDDIAGIESSGLAQAYARARGADRMSSFGDILALSDVVDVPTAKIVSREVSDGVIAAGYTPEALQILSKKKGGKYLVLQMDENYVPAAEETRTLYGVQLTQHRNDIVITPQKTFNTVITPKDLKSLPESALRDLTVATIALKYTQSNSVCYALNGQVIGLGAGQQSRIHCTRLAGDKADNWWMRFHDRVLNIKWKQGTKRPDKSNAIDLLCSGQTPRTEAEKAEYERVFEEVPAPFTQEERDAWLQNLGEVAVSSDAFFPFIDNVFRAARSGVKYIAAPSGSQNDSAVFETSEKLGIVFVEQGTRLFHH

SEQ ID NO: 92171 - DNA, 1788 bp, Aspergillus oryzae; identical to SEQ ID NO: 56415
  CDS (1)..(1788)

SEQ ID NO: 92172 - protein, 595 aa, Aspergillus oryzae; identical to SEQ ID NO: 56416

SEQ ID NO: 92173 - DNA, 1818 bp, Cryptococcus neoformans; identical to SEQ ID NO: 56229
  CDS (1)..(1818)

SEQ ID NO: 92174 - protein, 605 aa, Cryptococcus neoformans; identical to SEQ ID NO: 56230

SEQ ID NO: 92175 - DNA, 1785 bp, Leptinotarsa decemlineata
  CDS (1)..(1785)
atggctacaaatagtggtaaaattgcattactgtccgtgtcggacaaaatcggtttggttgatatcggaaaaaagttacacacccttggattcaccctcgtaggtagtggcggtactgcagctattctcagaggagcaggccttcctatcaaggatgtgtcggaaatatctggagcaccagaaattctcggaggaagagtaaaaactttacatccagctgtgcatggtggaattttggccaggttacagccatctgaccaagaagatttgaggaaacaaaatattgaaatgatcagaattgtcatctgcaacctgtaccctttcaaggagactgtctccaaagaagatgtcacattaagtgatgctgtcgaaaacattgatatcgggggagttacgcttcttagagcagccgctaaaaatcatgagcgagtaacagtggtggtagatcctgcagattataataaaatcctccaggaaatcagaagtagtccaaacaatgacacaaccatcgaaacaagacggacactagctctgaaagctttcacccacacctgccaatacgatctagcgatttcggattatttccgtaaagaattctcccagaaccaatcacaactctctcttcgttacggtatgaatcctcatcaaaaacctgctcagttatacaccaccctggagaaattacccctcaccgttgtcaacggatcccctgggttcatcaacttgtgcgatgcattgaatagctggcaattagttaaggagctaaaaacggttattgggcttcctgctgctaccagtttcaaacatgtctcgcctgcaggagctgctgttggtattccgctagatcacaatcaagctaaactttgcatggtggatgacattctcgaagagttgtctccgttggctattgcttacgccagggccagaggtgcggatagaatgtcatcttttggcgatttcgtcgctctttcagacatatgtgaccatccaactgctcgattgatatccagagaagtgtccgatggagtaattgctccaggttacactcctgaggcattggaactcttgagaaagaaggaaaacggtaattacagtgtacttcaaatcgatcccaactataacccgaatccaatagaaactaaggttattttcggccttacattagaacaacgtaggaacgatgctttaatagacaaatctcttttcaaaaatatagtaagcgacaacaaaaaccttccagaagatgctgtaagagacttgatagtggccacgatagccctgaaatatactcaaagtaactcagtttgctacgccaaggatggacaagttgtgggaattggagctggtcagcagtccagaatacactgcacaagattggcaggagataaggcagacaactggtggatgaggcaacacccaaaagttctcgggatgaaattcagaaagggagtaaaaagagctgaaatttccaacgcaatagacaatttcgtcaacggatcagtaggaaaagatatggacagatccatcttcgagtcaatgtatgacgttgtaccaatagaattcagtgaaactgaacgtcgtacttggttgagtcagctcaaaggcgtagcgctagcatcagatgcgtttttcccatttagagacaatgttgatagggcaagactaagcggtgtttcatatattggttgtccttcgggatctacgaatgacgaagaagttgtgagagcttgtaatgaacataaaattgtactggcgcacacgaatttacgattgttccatcactga

SEQ ID NO: 92176 - protein, 594 aa, Leptinotarsa decemlineata
MATNSGKIALLSVSDKIGLVDIGKKLHTLGFTLVGSGGTAAILRGAGLPIKDVSEISGAPEILGGRVKTLHPAVHGGILARLQPSDQEDLRKQNIEMIRIVICNLYPFKETVSKEDVTLSDAVENIDIGGVTLLRAAAKNHERVTVVVDPADYNKILQEIRSSPNNDTTIETRRTLALKAFTHTCQYDLAISDYFRKEFSQNQSQLSLRYGMNPHQKPAQLYTTLEKLPLTVVNGSPGFINLCDALNSWQLVKELKTVIGLPAATSFKHVSPAGAAVGIPLDHNQAKLCMVDDILEELSPLAIAYARARGADRMSSFGDFVALSDICDHPTARLISREVSDGVIAPGYTPEALELLRKKENGNYSVLQIDPNYNPNPIETKVIFGLTLEQRRNDALIDKSLFKNIVSDNKNLPEDAVRDLIVATIALKYTQSNSVCYAKDGQVVGIGAGQQSRIHCTRLAGDKADNWWMRQHPKVLGMKFRKGVKRAEISNAIDNFVNGSVGKDMDRSIFESMYDVVPIEFSETERRTWLSQLKGVALASDAFFPFRDNVDRARLSGVSYIGCPSGSTNDEEVVRACNEHKIVLAHTNLRLFHH

SEQ ID NO: 92177 - DNA, 1965 bp, Vigna unguiculata
  CDS (41)..(1879)
  misc_feature (815)..(815): k is g or t
ataactcattggttgtgtcactctttaacacactcagaggatgtttgtgttgggtgcttcctccgccgcagccaccaccgccgccactaccaccgcagccaccatcccctctcgcattctctgtggaactctccactctccttatcccctcacaaccccccataacttctcttcccatctcctatccaaaactttggtgcggtcatcttcactgcacttcaggggtgttcccatcaaagccatggcggagactgataccatagcagcctctaaaattgcttcttcttcctctgtccctgggaccaagcaagccttgatatcattgtcagataagaaggatcttgcatttgttggcaatgggctccaggaattaggatacactattgtttcaactggaggaacagcttctgctttggagaaggctggagtagctgttactaaagtagaacagcttactcagttccctgaaatgcttgatggtcgtgtcaaaactttgcaccctaacatacatgggggtatcctggctagaagggacctaaaacatcatattgaagctcttaatacacatggaattggtacttttgatgttgtggtagtgaacttgtacccattttacgataaagtcacagcagctggtggcattgagtttgaggatggaattgaaaatattgacattggtggtccagccatgattagagctgctgcaaagaatcacaaagatgttttagtcgtggttgatacagaagattaccctgcccttctggaatttcttaaagggaaccaggatgatgaaaaattcaggctaaaacttgcakggaaagcttttcaacatgttgcttcctatgactctgcagtatctgagtggttgtggaagcagagtgtgggagataaatttcctcctagcttaacagtgcctctttcactcaaaagttctctccgttatggtgaaaatccccatcaaaaggctgcattctatgtcgacaaaaaactttctgaggttaatgctggtggaattgctacggccatccaacaccatggaaaggagatgtcatataataactacttggatgctgatgcagcttggaactgtgtgtgtgagtttaagaaccccacctgtgtagtagtgaagcataccaatccttgtggagtagcatcacgtgatgatattcttgaagcctacagactagctgttaaagcagatcctgtgagtgcatttggtggaattgtagcgttcaacgtggaaattgatgaggcactagctaaagaaattcgagaattcagaagccccacagacggtgagacaaggatgttttatgaaatagtagttgcacccagctacacagagaaggggcttgagattctgcgtggaaagtccaaaactttaaggattcttgaagccaaaaagaatgaaccgggaaagctttcactcagacaggttggtggaggttggttggctcaggattcagatgacttaaccccacaagacatcaagttcaacgtggtctctgggaaggctccacaagatgatgaacttcgtgatgcagagtttgcatggttgtgtgtgaagcatgtcaaaagcaatgccattgtgatagctaagaacaattgtatgctaggtatgggaagtgggcaaccaaaccgtgtggagagtttgagaatagcaatgaggaaagctggagatgatgttaaaggagcagccttggccagtgatgccttcttcccatttgcttggaaagatgctgtggaagaagcatgtgaaagtggaatcggtgttatagcagaaccaggtgggagtatcagagaccaggatgccatagactgttgtaacaagtatggtgtttcactactctttaccaatgtgaggcactttaggcactgattcaattttgccttgctacttcaactttctgtttctgttatccaaccggtgttactcaaatttctgcttccattaaattgtttctg

SEQ ID NO: 92178 - protein, 612 aa, Vigna unguiculata; identical to SEQ ID NO: 56418
  misc_feature (259)..(259): The Xaa at location 259 stands for Gly, or Trp.

SEQ ID NO: 92179 - DNA, 1839 bp, Nicotiana tabacum; identical to SEQ ID NO: 56419
  CDS (1)..(1839)

SEQ ID NO: 92180 - protein, 612 aa, Nicotiana tabacum; identical to SEQ ID NO: 56420

SEQ ID NO: 92181 - DNA, 1776 bp, Saccharomyces cerevisiae
  CDS (1)..(1776)
atgggcaaatataccaagactgcgatcttgtcagtttatgataagacaggtttattagacttagccaagggattggtagagaacaatgttcgtatcctagcatccggtggtacggccaacatggtcagagaagctggttttccggtcgacgatgtttcttcaattacgcatgcaccagaaatgctagggggtagagtcaagactcttcaccctgctgtgcatgcaggtattcttgccagaaatttagagggcgatgaaaaagatttaaaagagcagcacattgataaggtggattttgttgtatgtaatctatatccgttcaaagaaactgtggctaaaattggtgttacagttcaagaagctgtagaggagatcgacattggcggtgtgactttgttgagagcagccgcaaagaaccattccagagtgactattctttcagaccctaatgactattctatctttctgcaagacctgtctaaggacggtgaaatttctcaggatttaagaaatagatttgcacttaaggcgtttgaacatacggccgattatgatgcggccatttctgactttttcaggaaacagtactccgaagggaaagcccaattaccgctaagatatggttgtaatccccaccaaagacctgcacaagcttatatcactcagcaggaggagttgcccttcaaagtgctctgcggtacaccaggatatataaatcttttggatgccttgaactcatggcccttagtgaaagagttatctgcatcattgaacttgcctgcggcagcatcgttcaagcacgtttctccagcaggtgctgctgtgggacttccattatccgatgtggaaagacaagtttattttgtgaatgatatggaggatttatcaccattggcatgcgcatacgctagggcccgtggtgcagataggatgtcatcctttggtgatttcattgcattgtccaatattgtagatgtcgccactgcaaaaatcatctctaaagaagtttccgatggtgttattgctccagggtatgaaccagaggcattgaatatactatctaagaagaaaaacggaaaatactgtattttacaaatcgatccaaactatgttcctggccaaatggaatcccgagaggtttttggcgtaacgttacaacaaaagagaaacgatgcgatcataaaccaatccactttcaaagaaattgtctccaaaaacaaagcacttaccgagcaagccgttatcgatctaactgttgctacgctggttttaaaatacacacaatcaaattctgtttgctacgcaaagaatggtatggttgtggggcttggggccggccaacaatcgcgtatacactgtaccagattagctggtgacaagacggacaactggtggttgagacaacatccaaaggttttgaacatgaagtgggccaagggaattaagagagcggacaagtcgaatgcgattgatctttttgttacagggcaaagaatagaaggcccggaaaaggtggattacgaaagcaaatttgaagaagtccctgaacctttcaccaaagaagaaagactagaatggttaagcaaattaaacaatgtatcgttatcatccgatgcgttctttcccttcccagacaacgtttatagagctgtgcagtctggtgtaaagttcatcacggctccttcggggtctgtcatggacaaagttgtcttccaagcggcggattcatttgatatcgtctacgtggagaacccaattcgtttattccaccactaa

SEQ ID NO: 92182 - protein, 591 aa, Saccharomyces cerevisiae [sequence omitted]

SEQ ID NO: 92183 - DNA, 1617 bp, Agrobacterium tumefaciens; identical to SEQ ID NO: 56425
  CDS (1)..(1617): transl_table=11

SEQ ID NO: 92184 - protein, 538 aa, Agrobacterium tumefaciens; identical to SEQ ID NO: 56426

SEQ ID NO: 92185 - DNA, 1521 bp, Aquifex aeolicus; identical to SEQ ID NO: 56429
  CDS (1)..(1521): transl_table=11

SEQ ID NO: 92186 - protein, 506 aa, Aquifex aeolicus; identical to SEQ ID NO: 56430

SEQ ID NO: 92187 - DNA, 1539 bp, Bacillus subtilis; identical to SEQ ID NO: 56431
  CDS (1)..(1539): transl_table=11

SEQ ID NO: 92188 - protein, 512 aa, Bacillus subtilis; identical to SEQ ID NO: 56432

SEQ ID NO: 92189 - DNA, 1593 bp, Bradyrhizobium japonicum; identical to SEQ ID NO: 56437
  CDS (1)..(1593): transl_table=11

SEQ ID NO: 92190 - protein, 530 aa, Bradyrhizobium japonicum; identical to SEQ ID NO: 56438

SEQ ID NO: 92191 - DNA, 1617 bp, Brucella melitensis; identical to SEQ ID NO: 56439
  CDS (1)..(1617): transl_table=11

SEQ ID NO: 92192 - protein, 538 aa, Brucella melitensis; identical to SEQ ID NO: 56440

SEQ ID NO: 92193 - DNA, 1578 bp, Buchnera aphidicola subsp; identical to SEQ ID NO: 56441
  CDS (1)..(1578): transl_table=11

SEQ ID NO: 92194 - protein, 525 aa, Buchnera aphidicola subsp; identical to SEQ ID NO: 56442

SEQ ID NO: 92195 - DNA, 1581 bp, Buchnera aphidicola subsp
  CDS (1)..(1581): transl_table=11
atgtcattaaataatattataaagaatgctttagttagtttgtcagataaaacagatcttttaaagatatcaaagatacttgcagaaaaaaaaattaatttattttgtacaggaggaacagctgacgttttaaaaaaaaataaaattcctgttcttgaaatatcagactacacaaattttcccgaaataatgaatggaagactcaaaacattacacccgaaaataataggtggtattttaggtcgaagggaaaaagatcaaaaaattatgaaattacataatttaatacctatagatatagtaattgtgaatttttatccatttgaaaaaatacaaaatcgaaaagaatttactatagaagaaataattgacaatattgatattggtggaccaacactcgtacgtgctgcggctaaaaattataaagatgttatagttatagtagatttatcagattttacatcatgtattcaattaataaatactaatactgtaagtttagaaacgagatttgatttagctactaaagcttttaagtacactgcactatatgaagaaataatttcaaaatattttttaaaaaaaaatccttatagaaaaaaacatcaaaaaaatatttttccaaatgaatttcaattaaatttcataaaaaaacaagatttaagatatggagaaaatcaacatcaaaaatcttcattttatatagaaaaagaaatattaaaatctggtacgatcagttcatcgaatcaaatacaaggtaaaaatctatcttataataatatatgtgatgctgatatagcattagaatgcgtaaaagaattttctaaaccaacatgtgttattgtaaaacatggaaatccttgcggagtttcagaaagtaattctttaatcaaagcttacttctctgcttataatgcagatccgatttcagctttcggaggaataattgcttttaattgtctcttagatttagacacagctcaagaaattgttaaaaaacagtttgtcgaagttattattgctcctgaaatagatgaaatggctgtaaaaatactaaaaagaaaaaaaaatatacgtttgcttatttgcggaaaaattgaaaaaaataaaaaaggtttagattttaaaagaattactaatggtttacttatacaagaatatgattgtgatgaaataaacgcaaaaaattttgattttgttacaaatcgtttacctactgaaaaagaattagaagatgctattttttcttggaaagtcgctaaatttgttaaatcaaacgctattgtatacagtttaaataaaactactattggaataggagcaggacaaacaagcagaattgatgcaactaaattagcaaacttaaaagtaaaagatcgaaatcacaataatactacaggagcaactatggcttctgatgcttttttcccttttcgagacgggatagataatgcagctctaatcggtattagttgtattatccaaccaggtggttctattcgagataaagaggtaattgagtctgccaatgagcataatataagtatgatttttactaaaaagcgtcattttaaacattaa

SEQ ID NO: 92196 - protein, 526 aa, Buchnera aphidicola subsp
MSLNNIIKNALVSLSDKTDLLKISKILAEKKINLFCTGGTADVLKKNKIPVLEISDYTNFPEIMNGRLKTLHPKIIGGILGRREKDQKIMKLHNLIPIDIVIVNFYPFEKIQNRKEFTIEEIIDNIDIGGPTLVRAAAKNYKDVIVIVDLSDFTSCIQLINTNTVSLETRFDLATKAFKYTALYEEIISKYFLKKNPYRKKHQKNIFPNEFQLNFIKKQDLRYGENQHQKSSFYIEKEILKSGTISSSNQIQGKNLSYNNICDADIALECVKEFSKPTCVIVKHGNPCGVSESNSLIKAYFSAYNADPISAFGGIIAFNCLLDLDTAQEIVKKQFVEVIIAPEIDEMAVKILKRKKNIRLLICGKIEKNKKGLDFKRITNGLLIQEYDCDEINAKNFDFVTNRLPTEKELEDAIFSWKVAKFVKSNAIVYSLNKTTIGIGAGQTSRIDATKLANLKVKDRNHNNTTGATMASDAFFPFRDGIDNAALIGISCIIQPGGSIRDKEVIESANEHNISMIFTKKRHFKH

SEQ ID NO: 92197 - DNA, 1572 bp, Chlorobium tepidum; identical to SEQ ID NO: 56445
  CDS (1)..(1572): transl_table=11

SEQ ID NO: 92198 - protein, 523 aa, Chlorobium tepidum; identical to SEQ ID NO: 56446

SEQ ID NO: 92199 - DNA, 1500 bp, Clostridium acetobutylicum; identical to SEQ ID NO: 56447
  CDS (1)..(1500): transl_table=11

SEQ ID NO: 92200 - protein, 499 aa, Clostridium acetobutylicum; identical to SEQ ID NO: 56448

SEQ ID NO: 92201 - DNA, 1500 bp, Clostridium tetani
  CDS (1)..(1500): transl_table=11
ttgattaagagagccttaataagcgtgtataataaagaaggtatattagagtttgccaagtttttagaaaaaaatcatgtagaaataatatccacagggggcacttataaacatttaaaagataattgtgtaagggtaaaagaagtatctcaaataactaattttgatgaaatattagatggaagggtaaaaacacttcatccagctgttcatggcggaatattagctataagagataataaagaacatatggatacaattaaagataaaaatatagaacctatagatatggttatagttaacttatatcctttctttgagaaaataggcaaaggtttatccctagaagaacaaatagagtttatagatataggtgggcctactatgataagagcagctgcaaaaaactttaaagatgtagtagtaattacagatcctaaagattataaaaggatagaagaaaagcttgaaaaagaagatgaaatagattttaacaatagaaagactctagcaggaaaagtatttaatttaatgtcagcctatgatggagccataagtaaatttttattagaagaggaatatccagaatatctttcattaagttataaaaaaggtaaggatttaagatatggagaaaatcctcatcagacagcagctttctatacatctcttacagaagatggagcttttaaggattttgaaaagttaaatggaaaagagctttcctataataatataaaagatatggacgttgcttggaagattgtaggggagtttgaggaaatagcatgctgtgcattaaagcataattcaccttgtggtgtggctataggagataccttgttagaatcatataaaaaagcctatgaatgtgatccaatatccatatttggaggaatagttgcctttaatagaaaagtaaataaagaaactgcaaaagaacttgttaaaatatttctagaggtaataatagctccagattatgatgaagatgctttaagaatattaaaaggaaagaaaaatttaagagttataaagtgtaatactaaaccattagataaaatggaaatttgtaaagtagatgtaggtatattagttcaaagcacagataatgctcttataaaagatatggatgtagtaacggcaaaaaaaccaacagaagaagaaatggaaaatatgatttttgctatgaaagttgttaagtatgtaaagtccaatgctatagtagtagttaaagataaaaaggcagtaggaattgcaggaggacaagtaaatagaatatgggcagcatgtcaggcactagaaagaggtaataactcagtagttttagcttcagatgccttttttccctttgatgatgtagttaaaaaagcttcagagtatggaataaaagctataatccaaccaggaggatctattagagataaagattccatagaggaatgtgatgaaaagggaatatctatggtgtttacaggaatcaggcactttaagcattaa

SEQ ID NO: 92202 - protein, 499 aa, Clostridium tetani
MIKRALISVYNKEGILEFAKFLEKNHVEIISTGGTYKHLKDNCVRVKEVSQITNFDEILDGRVKTLHPAVHGGILAIRDNKEHMDTIKDKNIEPIDMVIVNLYPFFEKIGKGLSLEEQIEFIDIGGPTMIRAAAKNFKDVVVITDPKDYKRIEEKLEKEDEIDFNNRKTLAGKVFNLMSAYDGAISKFLLEEEYPEYLSLSYKKGKDLRYGENPHQTAAFYTSLTEDGAFKDFEKLNGKELSYNNIKDMDVAWKIVGEFEEIACCALKHNSPCGVAIGDTLLESYKKAYECDPISIFGGIVAFNRKVNKETAKELVKIFLEVIIAPDYDEDALRILKGKKNLRVIKCNTKPLDKMEICKVDVGILVQSTDNALIKDMDVVTAKKPTEEEMENMIFAMKVVKYVKSNAIVVVKDKKAVGIAGGQVNRIWAACQALERGNNSVVLASDAFFPFDDVVKKASEYGIKAIIQPGGSIRDKDSIEECDEKGISMVFTGIRHFKH

SEQ ID NO: 92203 - DNA, 1566 bp, Corynebacterium efficiens
  CDS (1)..(1566): transl_table=11
atgagcgaagatcgtaaggcaattaagcgcgcactcatcagcgtgtatgacaagacaggcctggaggatctggcacaggcactgcaccgcgcaggtgtggagatcgtgtccaccggatccaccgcggcgaagattgccgatctcggtattcccgtaaccccggttgaggagctcaccggattccccgaatgtctggaggggcgtgtcaagaccctccacccgaaggtgcatgccggcatcctggccgacacccgcaaggatgatcacctccgccagctggatgaactcggggtcaccccgttccagctcgtcgtggtcaacctgtaccccttcgccgagaccgtcgcatcgggcgccgatttcgatgactgcgtcgagcagatcgacatcggaggcccctccatggtccgcgcggcggccaagaaccacccgtcggtggctgtggtcacctccccgggacagtacgaggatgttgtctccgtcctcaacaccggtggattctcccgggcggaacgcaccaagctcgccgccgaggctttccgccacaccgccacctacgatgtcaccgtggcaacctggatcagcgagcagctctccgctgcggacaccgagctggagttcccgggctggatcggttccaccagcaccctggcccgttccctccgttacggtgagaacccccaccagtccgccgccctctatgtcagccacggtgccagcggactcgcgcaggccacccagctccacggcaaggagatgtcctacaacaactacaccgactcggatgccgcctggcgtgcagcctgggaccatgagcgtccatgtgtggccatcatcaagcatgccaacccgtgtggcatcgccgtgtccgatgagtccatcgccgccgcccaccgtcaggcccacgcctgcgactccgtctccgccttcggtggcgtgatcgcctccaaccgtgaggtgtccgtggagatggccgagcaggtcgctgagatcttcaccgaggtcatcatcgccccgtcctatgaggagggtgcggttgaagtgctcagccagaagaagaacatccgtatcctccaggccgaggccccggtccgtgagggtttcgagacccgcgagatctccggtggcctgctggtgcaggaacgcgatctcatccacgccgagggcgacaaccccgcgaactggaccctggcggcgggtgaggctgtgtccgcggaggtgctcaaggacctggagttcgcctggaccgcggtgcgttccgtgaagtccaacgccatcctcctggccaaggacggcgccaccgtcggtgtgggcatgggacaggtcaatcgtgttgactccgcacgtctggccgtcgaccgtgccggcgaggagcgtgccaccggctccgtggccgcctccgatgcgttcttcccgttcgccgatggtttcgaggtgctcgcgcaggccggtatcaccgcggtggtccagccgggtggatccatccgcgatgatgaggtcatcgaggccgccaacaaggccggtgtgaccatgtacctcaccggtgcacgtcacttctcccactag

SEQ ID NO: 92204 - protein, 521 aa, Corynebacterium efficiens
MSEDRKAIKRALISVYDKTGLEDLAQALHRAGVEIVSTGSTAAKIADLGIPVTPVEELTGFPECLEGRVKTLHPKVHAGILADTRKDDHLRQLDELGVTPFQLVVVNLYPFAETVASGADFDDCVEQIDIGGPSMVRAAAKNHPSVAVVTSPGQYEDVVSVLNTGGFSRAERTKLAAEAFRHTATYDVTVATWISEQLSAADTELEFPGWIGSTSTLARSLRYGENPHQSAALYVSHGASGLAQATQLHGKEMSYNNYTDSDAAWRAAWDHERPCVAIIKHANPCGIAVSDESIAAAHRQAHACDSVSAFGGVIASNREVSVEMAEQVAEIFTEVIIAPSYEEGAVEVLSQKKNIRILQAEAPVREGFETREISGGLLVQERDLIHAEGDNPANWTLAAGEAVSAEVLKDLEFAWTAVRSVKSNAILLAKDGATVGVGMGQVNRVDSARLAVDRAGEERATGSVAASDAFFPFADGFEVLAQAGITAVVQPGGSIRDDEVIEAANKAGVTMYLTGARHFSH

SEQ ID NO: 92205 - DNA, 1590 bp, Escherichia coli O157; identical to SEQ ID NO: 56453
  CDS (1)..(1590): transl_table=11
  misc_feature (1275)..(1275): r is g or a

SEQ ID NO: 92206 - protein, 529 aa, Escherichia coli O157; identical to SEQ ID NO: 56454

SEQ ID NO: 92207 - DNA, 1590 bp, Escherichia coli O6
  CDS (1)..(1590): transl_table=11
atgcaacaacgtcgtccagtccgccgcgctctgctcagtgtttctgacaaagccggtatcgtcgaattcgcccaggcactttccgcacgcggtgtggagctgctgtctacagggggcacagcccgtctgttagcagaaaaaggtctgccggtaaccgaagtttccgattacaccggtttcccggagatgatggatggacgcgtgaagaccctgcatccgaaagtacatggtggcattctgggccgtcgcggcctggacgatgccattatggaagaacatcagatcctgcctatcgatatggtggttgttaacctgtatccgttcgcccagaccgttgctcgtgaaggctgctcgctggaagatgcggtagagaacatcgatatcggcggcccaacgatggtgcgctccgccgccaagaaccataaagatgtcgcaatcgtggtgaagagcagcgactacgacgccattattaaagagatggatgccaacgaaggatcgctgacgcttgcaacccgtttcgaccttgccatcaaagcctttgaacataccgccgcctacgacagcatgattgccaactacttcggcagcatggttccggcttaccacggtgaaagcaaagaagccgccggtcgcttcccacgcacgctgaacctgaacttcattaagaagcaggatatgcgttacggcgagaacagccaccagcaggctgccttctatatagaagagaatgtgaaagaagcctccgttgctaccgcaacccaggttcagggtaaagccctctcttataacaacatcgccgataccgatgcggcgctggagtgcgtgaaagagttcgccgagccggcatgtgtgattgtgaagcacgccaacccttgcggcgttgctatcggccattccattcttgatgcttacgatcgcgcgtacaaaaccgacccaacctccgcgttcggcggcattatcgcctttaaccgcgagctggatgcggaaaccgcacaggccatcatttctcgtcagtttgtcgaagtgattattgcgccgtccgccagcgaagaagctctgaaaatcaccgccgccaaacagaacgtacgcgttctgacctgcggtcagtggggcgagcgtgttccgggccttgatttcaaacgcgtgaacggcggcctcctggttcaggatcgcgacctgggcatggtcggtgcggaagaactgcgcgtcgtcaccaaacgccagccgagcgaacaggagctgcgtgatgcgctgttctgctggaaggtggcgaaattcgtgaaatccaacgccattgtctatgccaaaaacaatatgaccatcggcattggcgcgggccagatgagccgcgtgtactccgcaaaaatcgccggtattaaagctgccgatgaaggtctggaagtgaaaggttcgtcaatggcttctgacgcgttcttcccgttccgcgacggtattgatgccgccgccgctgcgggtgtgacctgtgtaatccagcctggcggttctatccgtgatgacgaagtgattgccgccgccgacgagcacggtattgcgatgctcttcaccgacatgcgccacttccgccattaa

SEQ ID NO: 92208 - protein, 529 aa, Escherichia coli O6
MQQRRPVRRALLSVSDKAGIVEFAQALSARGVELLSTGGTARLLAEKGLPVTEVSDYTGFPEMMDGRVKTLHPKVHGGILGRRGLDDAIMEEHQILPIDMVVVNLYPFAQTVAREGCSLEDAVENIDIGGPTMVRSAAKNHKDVAIVVKSSDYDAIIKEMDANEGSLTLATRFDLAIKAFEHTAAYDSMIANYFGSMVPAYHGESKEAAGRFPRTLNLNFIKKQDMRYGENSHQQAAFYIEENVKEASVATATQVQGKALSYNNIADTDAALECVKEFAEPACVIVKHANPCGVAIGHSILDAYDRAYKTDPTSAFGGIIAFNRELDAETAQAIISRQFVEVIIAPSASEEALKITAAKQNVRVLTCGQWGERVPGLDFKRVNGGLLVQDRDLGMVGAEELRVVTKRQPSEQELRDALFCWKVAKFVKSNAIVYAKNNMTIGIGAGQMSRVYSAKIAGIKAADEGLEVKGSSMASDAFFPFRDGIDAAAAAGVTCVIQPGGSIRDDEVIAAADEHGIAMLFTDMRHFRH

SEQ ID NO: 92209 - DNA, 1590 bp, Escherichia coli; identical to SEQ ID NO: 56455
  CDS (1)..(1590): transl_table=11

SEQ ID NO: 92210 - protein, 529 aa, Escherichia coli; identical to SEQ ID NO: 56456

SEQ ID NO: 92211 - DNA, 1557 bp, Lactococcus lactis subsp; identical to SEQ ID NO: 56457
  CDS (1)..(1557): transl_table=11

SEQ ID NO: 92212 - protein, 518 aa, Lactococcus lactis subsp; identical to SEQ ID NO: 56458

SEQ ID NO: 92213 - DNA, 1533 bp, Lactobacillus plantarum
  CDS (1)..(1533): transl_table=11
atgacaaaacgtgcgttgttaagtgtttctgataaacagggattaactgattttgcgaagggcctcgttgcccttgactatgaattgatttcaacgggtgggaccaaaaaggcactggaagcagctgatattccagtcatcggaatcgaagaagtgaccggttttcctgaaatgcttgacggtcgggtcaaaacgctccatcctaaggttcacgccggactattagcacgacgtgacctgccagcgcacatggcgcaactaaaagcagctggtattcaaccgattgacatggtcgtggttaacctgtacccattcaaagcgaccattcaacaaccagacgtcacacaagctgaagctattgaacaaatcgatattggtggtccgtcgatgctgcgttccgcagctaagaactttgccgcggtactgccaattgttgatcctgctgattatgagcagattctggctgatttgcagacggacgcggtcacaccggcactccgtcaacgattagcggccaaagtttttcaacatactgcggcctatgatgccttgattgcccaatatttaacgactgaagaatttccagaaaagttgacccttacttatgataagaagcaggccctgcgttatggtgaaaatagccatcaaaaggctgccttttacgaaaatgctttaccgacgcacttctcgattacgggtgccaagcaaattcatgggaaagagctttcttacaataacatcaaggatgcggatgctgccttgcggatggtcagtgaatatcaacagccggccgtagttgcaatgaagcacatgaatccgtgtggggttggcttgggtacgacgattgaggctgcttgggacaaagcctatgaagccgattcgatttcaatctttgggggaatcattgccttaaatcgaccagtcgatctcgcaacggctgagaagatgcacgcactcttcttggaaattattattgccccgagttttgatgacgatgcctttgctattttggccaagaagaagaatctgcgcttgatgacggttgactttgagcaaacgcacacggccgataagtttgaaacgatttcagtcggtgggggcttactacgtcaggaggtcgacgcggccttcgaaacgccagctgattttaccgtagttaccgtaacccaaccgacacctgcgcagctaaaagcactcgctttcggccaacaagttgtgaagcacgttaagagcaatgcggtcgttgtaactaccgcagatcggacattgggaatcggttctggtcagatgaatcgaatcgattcaactaagattgccattggtaaggcgatgaaacaagctggctacgaaaatgctatcctagcttcggatgcgttcttcccaatggatgattgcgtcgaatatgctgcgcagcacggcattcgtgcaatcgtgcaaccaggtggtagtattcgtgataaggattcgattgccatggccgaccgttatggtattgcgatggtcaccactggtgttcgacacttccggcattaa

SEQ ID NO: 92214 - protein, 510 aa, Lactobacillus plantarum
MTKRALLSVSDKQGLTDFAKGLVALDYELISTGGTKKALEAADIPVIGIEEVTGFPEMLDGRVKTLHPKVHAGLLARRDLPAHMAQLKAAGIQPIDMVVVNLYPFKATIQQPDVTQAEAIEQIDIGGPSMLRSAAKNFAAVLPIVDPADYEQILADLQTDAVTPALRQRLAAKVFQHTAAYDALIAQYLTTEEFPEKLTLTYDKKQALRYGENSHQKAAFYENALPTHFSITGAKQIHGKELSYNNIKDADAALRMVSEYQQPAVVAMKHMNPCGVGLGTTIEAAWDKAYEADSISIFGGIIALNRPVDLATAEKMHALFLEIIIAPSFDDDAFAILAKKKNLRLMTVDFEQTHTADKFETISVGGGLLRQEVDAAFETPADFTVVTVTQPTPAQLKALAFGQQVVKHVKSNAVVVTTADRTLGIGSGQMNRIDSTKIAIGKAMKQAGYENAILASDAFFPMDDCVEYAAQHGIRAIVQPGGSIRDKDSIAMADRYGIAMVTTGVRHFRH

SEQ ID NO: 92215 - DNA, 1536 bp, Leptospira interrogans serogroup Icterohaemorrhagiae serovar; identical to SEQ ID NO: 56459
  CDS (1)..(1536): transl_table=11

SEQ ID NO: 92216 - protein, 511 aa, Leptospira interrogans serogroup Icterohaemorrhagiae serovar; identical to SEQ ID NO: 56460

SEQ ID NO: 92217 - DNA, 1536 bp, Leptospira interrogans
  CDS (1)..(1536): transl_table=11
atgatacaaatcaaaagagctctcatctccgtcagcgataaatccggtttagtggaatttgcaaagtttctaaaccaaaacggagtggaaatcatttccacaggtggaactttaaaacttctaaaagataacggaattgcagccatagctatcgacgattacaccggttttccggaaattttagatggaagagtcaaaacccttcatcctaaagttcacggaggtctattaggtgtaatttccaatcctgctcacaaacaaaaaatggaagaattaaaaattcctaaaatagatttagtcgtagtcaacttatatccttttttaaagaccgtttctaaaccagaagttcaattagaagaagcaatcgaaaacatagatattggtgggccttctatgattcgaagcgccgctaaaaattataaacatactctagtgctcactgatccaaatgattacaagaaaattcaaaatttaatctcctccagtggaatttcggaagaaatttcagcgagttatatgagaaaagcattttctcacactgctatgtatgatgccgcgatttcttcctggttttacaaacaatcaggagaagtttttccagatgttctcaatctttcctttatcaaaaaacaaaaactgagatacggtgaaaatccgcaccaagccgcctcattttatgaaccactttttacaaagagcgatttttcacctttacaagggaaagagttgtcgtttaacaatatgttagattttgacgctgcctttcatatttctagccttcttcccgaaaatacagtatgtatcatcaaacatctcaatccttgtggaattgcttatgcagacaatccattagaagcatttcaacttgcaagaagaaccgatcctatttccgcatttggtggagtaataggaattaaaggacaagtaaacggagaattggcgacttcgatcactgaaaactttgtagaaggagtaatcgctcaaaaattcactcaagaagctctggaagtattttctaaaaaaccaaatattcgtttaatagaaatccaagatttcaaagaagcccttgatgagttggatttaagaccgatccatcacggtttgcttatacaagatagagattatacaacaatcactgaaaaagatctaaaagtagtcactaaaaaacaaccttctcccgatgatattcgtggtttgatgtttgcttggtcttgtgttcgttttatcaaatccaacgcaatcgtttatacggaagaaaatgcaactctaggaatcggagcgggacaaatgtccagagtcgactcagtccagttaggcgccaacaaagcgctgaacgtaggtctttctgtagtaggttcttatgttgcaagcgacgcattcttcccattccgagatggaatcgacgcacttgcaaaagcaggagcaaaagcgatcattcaaccaggtggttctgtccgagacgaggaagtaattcaagccgcagacgaacacgggctgattatggtttttactggaatgaggcattttagacactga

SEQ ID NO: 92218 - protein, 511 aa, Leptospira interrogans
MIQIKRALISVSDKSGLVEFAKFLNQNGVEIISTGGTLKLLKDNGIAAIAIDDYTGFPEILDGRVKTLHPKVHGGLLGVISNPAHKQKMEELKIPKIDLVVVNLYPFLKTVSKPEVQLEEAIENIDIGGPSMIRSAAKNYKHTLVLTDPNDYKKIQNLISSSGISEEISASYMRKAFSHTAMYDAAISSWFYKQSGEVFPDVLNLSFIKKQKLRYGENPHQAASFYEPLFTKSDFSPLQGKELSFNNMLDFDAAFHISSLLPENTVCIIKHLNPCGIAYADNPLEAFQLARRTDPISAFGGVIGIKGQVNGELATSITENFVEGVIAQKFTQEALEVFSKKPNIRLIEIQDFKEALDELDLRPIHHGLLIQDRDYTTITEKDLKVVTKKQPSPDDIRGLMFAWSCVRFIKSNAIVYTEENATLGIGAGQMSRVDSVQLGANKALNVGLSVVGSYVASDAFFPFRDGIDALAKAGAKAIIQPGGSVRDEEVIQAADEHGLIMVFTGMRHFRH

SEQ ID NO: 92219 - DNA, 1530 bp, Listeria innocua
  CDS (1)..(1530): transl_table=11
atgaaaagagcgcttataagtgtatcagataaaaacggcatcgtgccatttgcagaaaaattagtagaacttggtgtagaaattatttcaactggtgggacaaaagcagcatttgaacaagctggcgtaccggttacgggaattgaagcagttaccgaatttccagaaatgcttgatggccgagtaaaaacgcttcatccagctattcatggtggtttgcttgcaagacgtgatacggcggaacatatggaagcaattgctgcacatgatattaagccaattgatttagtcattgttaatttgtatcctttccaagaaacgattcaaaaacctggtgttactttagaagaagcgattgaaaacattgatattggcggaccttcgatgttacgttctgctgcgaaaaattatgcggcggtaactgttgtggttgatacagcggactacgatacagtacttacagaactacaagaacacggcgcaactacttttgaaacgcgccaacgccttgctgctaaagtatttcgacacacagcagcttatgatgctttaattgcagagtacttaacggatgttaccggtgaaactttcccagaaaaagtaacattaacttataatcgaaaacaagttttgcgttacggtgaaaatcctcaccaagatgcagctttttatacagaaccacgcgcgattgaaaactcgattagtgctgcgaaacagttgcacggtaaagagttatcttataacaacattcgcgatgcagatgcggcacttaaaattgctagtgaattcaaagaaccagtggcagttgcagtaaaacacatgaatccatgcggagttggcgttggtgaaacgattgaagaagcttatttaaaagcctacgaagcagatgaaatatctatttttggtggaattgttgctttaaataaagaagttgatgcgaaaacggcagaacatatgagtaaaattttcttagaaattatcattgcaccaagtttttccgaagcaggttttgcgattttagcgaaaaagaaaaatattcgtttgttaactgttccatttgcgggtaacgtggaaggttttgagaaaacttctgttaacggtggacttcttatccaagcgaatgacgctcttgtagaagatacaacaagttatgaagtagtgacagaaaaacaaccaaccaactcagaaatgaaagctttacttgctcagtggaaaattgtcaaacatgtcaaatcaaacgcgattgttgttggctcagataaacaaacgcttggaattggcgctggtcaaatgaatcgaatcggctcagcattgattgcgctagaacaagctggtgaaaaagcaaaaggcgctgtacttgcctccgatgcctttttcccgatggatgatacagttgaggctgcggcaaaagcaggtattacggcgattattcaacctggtggatcgatcaaagataaagaatcaattgcaatggctgataaatatggaatttccatggttctgactcatgtacgccatttcaaacattaa

SEQ ID NO: 92220 - protein, 509 aa, Listeria innocua
MKRALISVSDKNGIVPFAEKLVELGVEIISTGGTKAAFEQAGVPVTGIEAVTEFPEMLDGRVKTLHPAIHGGLLARRDTAEHMEAIAAHDIKPIDLVIVNLYPFQETIQKPGVTLEEAIENIDIGGPSMLRSAAKNYAAVTVVVDTADYDTVLTELQEHGATTFETRQRLAAKVFRHTAAYDALIAEYLTDVTGETFPEKVTLTYNRKQVLRYGENPHQDAAFYTEPRAIENSISAAKQLHGKELSYNNIRDADAALKIASEFKEPVAVAVKHMNPCGVGVGETIEEAYLKAYEADEISIFGGIVALNKEVDAKTAEHMSKIFLEIIIAPSFSEAGFAILAKKKNIRLLTVPFAGNVEGFEKTSVNGGLLIQANDALVEDTTSYEVVTEKQPTNSEMKALLAQWKIVKHVKSNAIVVGSDKQTLGIGAGQMNRIGSALIALEQAGEKAKGAVLASDAFFPMDDTVEAAAKAGITAIIQPGGSIKDKESIAMADKYGISMVLTHVRHFKH

SEQ ID NO: 92221 - DNA, 1530 bp, Listeria monocytogenes; identical to SEQ ID NO: 56461
  CDS (1)..(1530): transl_table=11

SEQ ID NO: 92222 - protein, 509 aa, Listeria monocytogenes; identical to SEQ ID NO: 56462

SEQ ID NO: 92223 - DNA, 1593 bp, Neisseria meningitidis serogroup A
  CDS (1)..(1593): transl_table=11
atgccttccatcaaacgcgccctgatcagcctgtccgacaagacgggcgcagtcgaatttgcccaaaccctgcacaagctcggtgtcgaaatcctctctaccggcggcacggcgaagctgcttgccgatgcgggcgttcccgtgattgaagttgccgactacaccggtttccccgaaatgctcgacggccgcgtgaaaacgctgcatccgaaaatccacggcggtattttgggccggcgcgatttgcctgaacacgtcgccaagatggaagaacacggcatcggcaacatcgacctcgtgtgcgtcaacctttaccccttcgccgccaccatcgccaaaccaaactgcacactggaagacgcgattgaaaacatcgacatcggcggcccgactatggtgcgctccgccgcgaaaaactggaaacacgtcgccatcgttaccgaccccgccgacttccccgccatcgccgccgaaatggaagccaacaacggcgcattgagcgacaaaacccgtttcaacctctcgcgcaaagcattcagccataccgcccaatacgacggtatgatttccaattacctgacctcgctttcagacgacgtcttgagcggcacgcccgaaatcggcgaatttccaagccagttcaatcaaagctggattaaagtgcaagacatgcgctacggcgaaaatccgcaccaacgcgccgcgttctaccgcgatgtataccccgccgcaggcagcctttccgcctacaaacaactgcaaggcaaagagttgtcgtacaacaacattgccgatgccgatgccgcttgggaagccgtcaaatcctttgacgcgcccgcctgcgtgattgtgaagcacgccaatccttgcggtgtcgccgttgcagccgataccttgaccgcctacaaactcgcctacgctaccgacactaccagcgcattcggcggcatcattgccttcaaccgcgaagtggacggcgaaaccgtcaaacaaattaccgacaaccagtttatggaagtcttgatggcgccgaagtttaccgccgaagccctcgaaatcgctgctgccaagaaaaacgtgcgcgtattgcaaatttctctaacaaccccgctcgaagcaggtgccaaccgcttcgaactcaaacgcgtcggcggcggactgttggtgcaaacccccgatatttaccgcctcaaccgcgccgatttgaaagtcgtttccaaacgccaactgaccgagcaagaatggaacgacctgatgtttgtttggaacgtcgcaaaatacgtcaaatccaacgccatcgtcttcggcaaaggcggccaaacctacggcatcggcgcaggccaaatgagccgcgtggacagcacccgcatcgccgcccgcaaagcgcaagatgccaatctcgacctcaacggcgcatgtgccgcttccgatgccttcttccccttccgcgacggcgtagatgtcattgccgagcagggcatcaaagccatcatccatccggcaggctccatgcgcgaccaagaagtctttgacgcggcggacgaacacggcattgcaatggtggtaacgggcgtgcgccatttccgtcattga

SEQ ID NO: 92224 - protein, 530 aa, Neisseria meningitidis serogroup A
MPSIKRALISLSDKTGAVEFAQTLHKLGVEILSTGGTAKLLADAGVPVIEVADYTGFPEMLDGRVKTLHPKIHGGILGRRDLPEHVAKMEEHGIGNIDLVCVNLYPFAATIAKPNCTLEDAIENIDIGGPTMVRSAAKNWKHVAIVTDPADFPAIAAEMEANNGALSDKTRFNLSRKAFSHTAQYDGMISNYLTSLSDDVLSGTPEIGEFPSQFNQSWIKVQDMRYGENPHQRAAFYRDVYPAAGSLSAYKQLQGKELSYNNIADADAAWEAVKSFDAPACVIVKHANPCGVAVAADTLTAYKLAYATDTTSAFGGIIAFNREVDGETVKQITDNQFMEVLMAPKFTAEALEIAAAKKNVRVLQISLTTPLEAGANRFELKRVGGGLLVQTPDIYRLNRADLKVVSKRQLTEQEWNDLMFVWNVAKYVKSNAIVFGKGGQTYGIGAGQMSRVDSTRIAARKAQDANLDLNGACAASDAFFPFRDGVDVIAEQGIKAIIHPAGSMRDQEVFDAADEHGIAMVVTGVRHFRH

SEQ ID NO: 92225 - DNA, 1533 bp, Oceanobacillus iheyensis; identical to SEQ ID NO: 56463
  CDS (1)..(1533): transl_table=11

SEQ ID NO: 92226 - protein, 510 aa, Oceanobacillus iheyensis; identical to SEQ ID NO: 56464

SEQ ID NO: 92227 - DNA, 1602 bp, Pasteurella multocida; identical to SEQ ID NO: 56465
  CDS (1)..(1602): transl_table=11

SEQ ID NO: 92228 - protein, 533 aa, Pasteurella multocida; identical to SEQ ID NO: 56466

SEQ ID NO: 92229 - DNA, 1608 bp, Pseudomonas putida; identical to SEQ ID NO: 56469
  CDS (1)..(1608): transl_table=11

SEQ ID NO: 92230 - protein, 535 aa, Pseudomonas putida; identical to SEQ ID NO: 56470

SEQ ID NO: 92231 - DNA, 1617 bp, Rhizobium loti; identical to SEQ ID NO: 56471
  CDS (1)..(1617): transl_table=11

SEQ ID NO: 92232 - protein, 538 aa, Rhizobium loti; identical to SEQ ID NO: 56472

SEQ ID NO: 92233 - DNA, 1611 bp, Rhizobium meliloti; identical to SEQ ID NO: 56473
  CDS (1)..(1611): transl_table=11

SEQ ID NO: 92234 - protein, 536 aa, Rhizobium meliloti; identical to SEQ ID NO: 56474

SEQ ID NO: 92235 - DNA, 1572 bp, Rhodopirellula baltica; identical to SEQ ID NO: 56475
  CDS (1)..(1572): transl_table=11

SEQ ID NO: 92236 - protein, 523 aa, Rhodopirellula baltica; identical to SEQ ID NO: 56476

SEQ ID NO: 92237 - DNA, 1590 bp, Salmonella typhimurium; identical to SEQ ID NO: 56477
  CDS (1)..(1590): transl_table=11

SEQ ID NO: 92238 - protein, 529 aa, Salmonella typhimurium; identical to SEQ ID NO: 56478

SEQ ID NO: 92239 - DNA, 1758 bp, Schizosaccharomyces pombe; identical to SEQ ID NO: 56479
  CDS (1)..(1758)

SEQ ID NO: 92240 - protein, 585 aa, Schizosaccharomyces pombe; identical to SEQ ID NO: 56480

SEQ ID NO: 92241 - DNA, 1632 bp, Shewanella oneidensis; identical to SEQ ID NO: 56481
  CDS (1)..(1632): transl_table=11

SEQ ID NO: 92242 - protein, 543 aa, Shewanella oneidensis; identical to SEQ ID NO: 56482

SEQ ID NO: 92243 - DNA, 1548 bp, Streptococcus pneumoniae
  CDS (1)..(1548): transl_table=11
atgactaaacgcgtcttaatcagcgtctcagacaaagcgggcattgttgaatttgcccaagaactcaaaaaacttggttgggagattatctcaacaggtggaactaaggttgcccttgataatgctggggtggataccattgctatcgatgatgtgactggtttcccagaaatgatggacggtcgtgtgaagaccctccacccaaatatccacggagggcttctcgctcgtcgtgacttggatagccacttggaagcggctaaggacaacaagattgagctcattgaccttgtggtggtcaacctttacccatttaaggaaactatccttaaaccagatgtgacttatgctgatgcagttgaaaatatcgatattggtgggccatctatgcttcgttcagcagcgaaaaatcatgccagtgttacagttgtggtagatcctgctgactacgctgtggttttggatgaattggcagcaaacggcgaaacctcttatgaaactcgccaacgtttagcagccaaagtatttcgtcacacagcggcttatgacgccttgattgcagaatacttcacagctcaagtgggtgaaagcaagcctgaaaaactcactttgacttatgacctcaagcaaccaatgcgttacggtgagaatcctcaacaagacgcggacttttaccagaaagctttgcctacagactactccattgcttcagccaaacagctcaacgggaaagaattgtcatttaataatatccgtgatgcagatgctgctatccgtatcatccgtgacttcaaagatagtccaaccgttgtggctctcaaacacatgaatccatgtggaattggtcaagctgatgacatcgagactgcttgggactacgcttatgagtctgacccagtgtctatctttggtgggattgtcgtcctcaaccgtgaggtggatgctgcgacagctgagaagatgcacggcgttttcctcgaaatcatcattgcaccaagctatacggatgaagcgctagccattttgatcaataaaaagaaaaacttgcgtatccttgccttgccatttaatgctcaagaggctagcgaagtggaagcagaatacacaggtgtagtcggtggacttctcgtgcaaaatcaagacgtggtcaaggaaagcccagctgactggcaagtggtgactaaacgtcagccaactgagacagaagcgactgctcttgagttcgcttggaaggctatcaagtacgtcaaatcaaatggtattatcgtgaccaacgaccacatgacacttggtgttggtccaggtcaaaccaaccgtgtggcttctgttcgccttgccattgaccaagccaaagatcgtctggacggggcggtccttgcttcagatgccttcttcccatttgcggataacgtggaagaaatcgccaaagcaggaattaaggccatcatccagcccggtggctctgtccgtgaccaagaatccatcgaagcagcggataaatacggcttgactatggtctttacaggtgtgagacattttagacattaa

SEQ ID NO: 92244 - protein, 515 aa, Streptococcus pneumoniae
MTKRVLISVSDKAGIVEFAQELKKLGWEIISTGGTKVALDNAGVDTIAIDDVTGFPEMMDGRVKTLHPNIHGGLLARRDLDSHLEAAKDNKIELIDLVVVNLYPFKETILKPDVTYADAVENIDIGGPSMLRSAAKNHASVTVVVDPADYAVVLDELAANGETSYETRQRLAAKVFRHTAAYDALIAEYFTAQVGESKPEKLTLTYDLKQPMRYGENPQQDADFYQKALPTDYSIASAKQLNGKELSFNNIRDADAAIRIIRDFKDSPTVVALKHMNPCGIGQADDIETAWDYAYESDPVSIFGGIVVLNREVDAATAEKMHGVFLEIIIAPSYTDEALAILINKKKNLRILALPFNAQEASEVEAEYTGVVGGLLVQNQDVVKESPADWQVVTKRQPTETEATALEFAWKAIKYVKSNGIIVTNDHMTLGVGPGQTNRVASVRLAIDQAKDRLDGAVLASDAFFPFADNVEEIAKAGIKAIIQPGGSVRDQESIEAADKYGLTMVFTGVRHFRH

SEQ ID NO: 92245 - DNA, 1557 bp, Synechococcus elongatus; identical to SEQ ID NO: 56489
  CDS (1)..(1557): transl_table=11

SEQ ID NO: 92246 - protein, 518 aa, Synechococcus elongatus; identical to SEQ ID NO: 56490

SEQ ID NO: 92247 - DNA, 1527 bp, Thermoanaerobacter tengcongensis; identical to SEQ ID NO: 56491
  CDS (1)..(1527): transl_table=11

SEQ ID NO: 92248 - protein, 508 aa, Thermoanaerobacter tengcongensis; identical to SEQ ID NO: 56492

SEQ ID NO: 92249 - DNA, 1593 bp, Vibrio parahaemolyticus
  CDS (1)..(1593): transl_table=11
atgaataacgctcgtcctattcgccgtgcgcttatcagcgtatcagacaaaacaggtattgttgagtttgcacaagctcttgctgagcgcggtgtcgatatcctatctactggtggtacagcacgcctacttgccgaacaaggcatcgcagtaacagaagtctctgactacacaggtttcccagaaatgatggacggccgcgttaaaacgcttcacccgaaagttcacggtggtgtgcttggtcgtcgtggtcaagatgacgacgtgatggcaaaacatggcatcaatccaatcgacatggtcgttgttaacctatacccattcgcagaaaccgttgcaaaagatggctgtactcttgctgacgcagtagagaacatcgatattggcggtcctaccatggttcgctcagcagcgaagaaccacaaagacgtaactatcgttgtaaacgcttcagactacgaccgcgtaatcgcagagatggacgccaacgacaagtccctaactctagagacgcgcttcgaccttgctattgcagcattcgaacatactgcggcttacgatggcatgattgcaaactacttcggcaccatggttccatcttacggtgagaacaaggaaggtgatgaagagagtaaattccctcgtacctttaaccaacaattcgagaagaaacaagacatgcgctacggtgagaacagccaccaagctgccgcgttctacgtcgaagcaaatccacaagaagcgtctgtttctactgctcgtcaaatccaaggtaaagccctttcttacaacaacatcgcagacacggacgccgcacttgaatgcgtgaaagagtttaatgagccagcatgtgtaatcgtaaaacacgccaacccatgtggcgtcgcgctaggtaaagacatcctagaagcgtacaaccgcgcttaccaaacagacccaacatcagcgttcggcggcatcatcgcattcaaccaagagctagatgcagaaacggctagcgctatcgttgaacgtcaattcgttgaagtaatcattgctccttctgtttctgctgaagcgatcgaagtcgttgcggcgaagaagaacgtacgtctacttgagtgtggtgaatggacaactaagaccacgggctttgacgtgaaacgcgtcaacggtggcctactggttcaagatcgcgaccaaggtatggtaagcctagacgaccttaaagtggtttctaagcgtcaaccgacagaagaagagctgaaagatgcgctgttctgctggaaagtagcgaaatacgtgaaatctaacgcaatcgtttacgcgaaaggcgacatgactatcggtgtgggcgcaggccaaatgagccgcgtttactcagcgaaaattgccggcatcaaagccgcagatgaaggcttagaagttgccggtagcgtaatggcatctgacgctttcttcccattccgcgacggtatcgatgccgcagcagaagcaggcattaagtgcgtaattcagccaggtggctctatgcgtgacgacgaagttatcgcagcagcagatgagcacggcatggcgatgatcttcacgggtatgcgccacttccgccactaa

SEQ ID NO: 92250 - protein, 530 aa, Vibrio parahaemolyticus
MNNARPIRRALISVSDKTGIVEFAQALAERGVDILSTGGTARLLAEQGIAVTEVSDYTGFPEMMDGRVKTLHPKVHGGVLGRRGQDDDVMAKHGINPIDMVVVNLYPFAETVAKDGCTLADAVENIDIGGPTMVRSAAKNHKDVTIVVNASDYDRVIAEMDANDKSLTLETRFDLAIAAFEHTAAYDGMIANYFGTMVPSYGENKEGDEESKFPRTFNQQFEKKQDMRYGENSHQAAAFYVEANPQEASVSTARQIQGKALSYNNIADTDAALECVKEFNEPACVIVKHANPCGVALGKDILEAYNRAYQTDPTSAFGGIIAFNQELDAETASAIVERQFVEVIIAPSVSAEAIEVVAAKKNVRLLECGEWTTKTTGFDVKRVNGGLLVQDRDQGMVSLDDLKVVSKRQPTEEELKDALFCWKVAKYVKSNAIVYAKGDMTIGVGAGQMSRVYSAKIAGIKAADEGLEVAGSVMASDAFFPFRDGIDAAAEAGIKCVIQPGGSMRDDEVIAAADEHGMAMIFTGMRHFRH

SEQ ID NO: 92251 - DNA, 1593 bp, Vibrio vulnificus
  CDS (1)..(1593): transl_table=11
atgaacaacgctcgtcctattcgccgtgcgcttatcagcgtatcagacaaaaccggtattgttgagtttgcgcaagctcttgctgagcgcggtgtcgatatcttatcgactggcggtactgctcgtttacttgcagagcaaggcatcgcagtcactgaagtctctgactacactggtttcccagaaatgatggacggtcgcgttaaaacgcttcacccgaaagttcacggtggtgtgctcggtcgtcgtggccaagacgatgaggtcatggcaaaacacggcattaacccgatcgacatggtggtggttaacctctacccattcgcagaaactgtcgctaaagaaggctgcacactggctgacgcggttgaaaacatcgacatcggtggcccaaccatggttcgctctgcggcgaaaaaccataaagacgtgactatcgttgtcaacgcttcagactaccatcgcgtcatcacagaaatggacgccaacgacacgtcgcttactctagaaacgcgtttcgacctcgctatcgcagcctttgaacacaccgctgcttacgacggcatgatcgcgaactacttcggcactatggttccttcatacggagagaacaaagaaggtgatgaagagagcaaattcccgcgcactttcaaccagcagttcatcaaaaaacaagacatgcgctacggtgagaacagccaccaagcagccgctttctatgttgaagccaacccacaagaagcatcggttgctaccgctcgccaaatccaaggcaaagccctttcttacaacaacatcgcagacacggacgcagcgcttgagtgtgtgaaagagtttaatgagccagcttgtgtcattgttaagcacgctaacccatgtggcgtagcgctaggtaaagacatcctagaggcgtacaaccgcgcttaccaaaccgatccgacatccgcatttggcggcatcatcgccttcaaccaagagctagacgcagaaacggccaccgctattgttgagcgccaatttgttgaagtcatcattgccccttcggtatcggctgaagcgatggaagtggtggcagcgaagaaaaacgttcgtctgcttgagtgtggcgagtggacaacgaagacaacgggctttgacgtgaaacgcgtgaacggcggcctactggttcaagatcgcgaccaaggcatggtcagcctagatgaccttaaagtcgtgtctaagcgccagccaacggaagaagaactcaaagacgcgttattctgctggaaagtggcgaagtacgtaaaatcgaacgcgattgtttactctaaaggcgatatgactattggtgtgggcgctggccaaatgagccgcgtctactcagcgaagattgctggcattaaagcggcagacgaaggcctacaagttgagggttgcgtcatggcctctgatgccttcttcccattccgtgacggtattgatgcagcagcagaagctggcattaaatgtgtaattcagcctggtggttcgatgcgtgatgacgaagtgattgccgccgcagatgaacacggtatggcgatgatttttacgggcatgcgccacttccgccactag

SEQ ID NO: 92252 - protein, 530 aa, Vibrio vulnificus
MNNARPIRRALISVSDKTGIVEFAQALAERGVDILSTGGTARLLAEQGIAVTEVSDYTGFPEMMDGRVKTLHPKVHGGVLGRRGQDDEVMAKHGINPIDMVVVNLYPFAETVAKEGCTLADAVENIDIGGPTMVRSAAKNHKDVTIVVNASDYHRVITEMDANDTSLTLETRFDLAIAAFEHTAAYDGMIANYFGTMVPSYGENKEGDEESKFPRTFNQQFIKKQDMRYGENSHQAAAFYVEANPQEASVATARQIQGKALSYNNIADTDAALECVKEFNEPACVIVKHANPCGVALGKDILEAYNRAYQTDPTSAFGGIIAFNQELDAETATAIVERQFVEVIIAPSVSAEAMEVVAAKKNVRLLECGEWTTKTTGFDVKRVNGGLLVQDRDQGMVSLDDLKVVSKRQPTEEELKDALFCWKVAKYVKSNAIVYSKGDMTIGVGAGQMSRVYSAKIAGIKAADEGLQVEGCVMASDAFFPFRDGIDAAAEAGIKCVIQPGGSMRDDEVIAAADEHGMAMIFTGMRHFRH

SEQ ID NO: 92253 - DNA, 1590 bp, Wigglesworthia glossinidia brevipalpis
  CDS (1)..(1590): transl_table=11
atggaacaatcatttcttcctattagatgcgctttaataagcgtttcagataaaacaggtatattttcgttagctaaaaatcttattaaacacaaagttaaattaattactacttctggaacttataaatatttattagaaaaaggtattttttctacatctgtatcagaatatattaatcatccagaaataataaatggaagagtaaaaacattacatcctaaaatacatgggggaatattaagtaataacaaaaatatcaatgaaaataaaaacttaaatattaaaaaaatagatatggtaataacaaatttttatccatttaaaaaaaaagttaaaaaagaaaatataaaaattgaaaatattatagataatattgatatcggaggagttgctttagctagatctgcggcaaaaaattataaatacgttacagtagtagttaatataaatcaatattctaaattatcttcagaaatggataaaaattctggatcagttagttttaaaactcgtttttatttttcaactttagcatttcaatactcatattcttatgataaagaaatattcaattactttaataaaatttattttaaagaaattgaattaaaaaaaaacttaaaaaataaaaaatttccagaattattttctatttctttttctaagaaagaagatgtattatacggagaaaactatcatcaaaaagcagcattttatacagatcctgtaatacatcctggaactgttcctttttctattcaaagacaaggtaaaaagttatcatataacaatatagttgattctgatatagcaattaactgtgtaatgaatttttcagaaatcgcttgtgttatagtaaaacattcaactccttgtggagtttcctcaggaaaaaatattattgatgcctatagatcggcttattattcagatccggattcagcttttggaggaataatttcctttaatagacctctaactatagaggctgctgaatttataattaataaacaatttgtagaaattattatcgctcctgtaatagaaaaagatgcattattaactctgaaatcaaaaagcaaaataatagttttagaatgtggttacctgagtaaaaattttttattaaattttaaaaaagtaaattgtggattattactgcaagatagcgataataaaatattaaaagaaaaagatattaaaatagtttcaaaaagacaaccttctaaactagaaattgaaagttctattttcatttggaaaataattaaatttattaaatctaatgccattatttatggaaaaaataagcgtactttaggaatcggatcaggtcaaactagcagaatattttctacaagaatagctgcatacaaagcaatagatcaagggtttagcctaaaaggatctgtaatggcttcagatgcgttttttccatttagagatagcattgactttgcgtctaaatttggagttagttgtattatacaaccaggaggttcaattaatgatgataaaattatttcagcagttgatgaaaataatatgtcaatgatatttactaatactagacaatttagtcattaa

SEQ ID NO: 92254 - protein, 529 aa, Wigglesworthia glossinidia brevipalpis
MEQSFLPIRCALISVSDKTGIFSLAKNLIKHKVKLITTSGTYKYLLEKGIFSTSVSEYINHPEIINGRVKTLHPKIHGGILSNNKNINENKNLNIKKIDMVITNFYPFKKKVKKENIKIENIIDNIDIGGVALARSAAKNYKYVTVVVNINQYSKLSSEMDKNSGSVSFKTRFYFSTLAFQYSYSYDKEIFNYFNKIYFKEIELKKNLKNKKFPELFSISFSKKEDVLYGENYHQKAAFYTDPVIHPGTVPFSIQRQGKKLSYNNIVDSDIAINCVMNFSEIACVIVKHSTPCGVSSGKNIIDAYRSAYYSDPDSAFGGIISFNRPLTIEAAEFIINKQFVEIIIAPVIEKDALLTLKSKSKIIVLECGYLSKNFLLNFKKVNCGLLLQDSDNKILKEKDIKIVSKRQPSKLEIESSIFIWKIIKFIKSNAIIYGKNKRTLGIGSGQTSRIFSTRIAAYKAIDQGFSLKGSVMASDAFFPFRDSIDFASKFGVSCIIQPGGSINDDKIISAVDENNMSMIFTNTRQFSH

SEQ ID NO: 92255 - DNA, 1584 bp, Xanthomonas campestris pv; identical to SEQ ID NO: 56495
  CDS (1)..(1584): transl_table=11

SEQ ID NO: 92256 - protein, 527 aa, Xanthomonas campestris pv; identical to SEQ ID NO: 56496

SEQ ID NO: 92257 - DNA, 1584 bp, Xylella fastidiosa
  CDS (1)..(1584): transl_table=11
atggcatccgattttctgcccgtacatcgggcactgttatctgtttccgacaaaacagggctggtcgagttggcgcgcgcgctgctggcctacaacattgaattactgtctaccggtgggaccgcgacaatcatccgcgaggctggtctcccagtgcaggatgtggccgacctgacaggcttcccagaaatgatggacggccgcgtaaaaacactgcaccccatggtacacggtggtttgctcggacgcgccggtatcgacgacgccgtgatggccaaacacggcatcgcaccgatcgacctgctgatactgaatctgtatcccttcgaacagatcactgccaaaaaagattgcacgctagccgatgcagtggacaccattgatattggtggcccggcgatgctgcgctcggcggcaaagaatttcgcgcgcgtggctgtggcaacgtcaccggatcagtatcctgatctgcttgctgaactgcaggcgcaccacggccagctttccgccgaaaagcgtttcgcattggccgtggcggcgttcaaccacgttgcccagtacgatgcggcaatcagcaattatctgtcgagcgtgtccgacatgcacacaacgttgccgttgcgccatgaattcccagctcagttaaacaataccttcgtaaagatgacagaactccgctacggggaaaatccacatcaaacaggtgcgttctaccgcgatgtacatccgcaacccgggacgctggccaccttccagcaactccaaggcaagacactcagctacaacaatctcgtcgatgccgatgccgcatgggaatgcgtacgtcaattcgaagcaccggcctgcgtcatcgtcaaacatgccaacccttgtggtgtcgcagtcgggaaggcgtgcagtgatgcttacgaagaagcgtatgccactgatccaacgagtgcgtttggcggcattattgcggtgaaccgtatgctggatgtggcgaccatgcagagcattctagatcgtcaatttgtcgaggtgttgatagcacccgattacgatgcagacgccctcgcctatgcgaccaagaaggccaatgtgcgcgtgctgcgtatccccagcactggcgtgatgaatcgctatgatttcaaacggatcggctctggactattggtgcaaagcaccgacagtctgaacatccattcggatgcactgaaggtggtcactcagcttgctcccaccgatgcacaacagcgtgatctgttgtttgcatggcatgtcgccaagtatgtcaagtcaaatgcgattgtttacgccaaggacaatcgcacgattggtattggcgccggacaaatgagtcgcgtgtattcagcgcgtatcgctggtatcaaggcggccgatgcacatttggctgtcacaggttcggtgatggcaagtgatgccttctttccattccgtgacagcattgatgccgctgctgccgctggcatcaaggcggtgattcagccgggcggttcgatgcgcgataacgaggtgatcgcggcggccgatgaacacggcattgccatggtcttcaccgggatacggcatttccggcattga

SEQ ID NO: 92258 - protein, 527 aa, Xylella fastidiosa
MASDFLPVHRALLSVSDKTGLVELARALLAYNIELLSTGGTATIIREAGLPVQDVADLTGFPEMMDGRVKTLHPMVHGGLLGRAGIDDAVMAKHGIAPIDLLILNLYPFEQITAKKDCTLADAVDTIDIGGPAMLRSAAKNFARVAVATSPDQYPDLLAELQAHHGQLSAEKRFALAVAAFNHVAQYDAAISNYLSSVSDMHTTLPLRHEFPAQLNNTFVKMTELRYGENPHQTGAFYRDVHPQPGTLATFQQLQGKTLSYNNLVDADAAWECVRQFEAPACVIVKHANPCGVAVGKACSDAYEEAYATDPTSAFGGIIAVNRMLDVATMQSILDRQFVEVLIAPDYDADALAYATKKANVRVLRIPSTGVMNRYDFKRIGSGLLVQSTDSLNIHSDALKVVTQLAPTDAQQRDLLFAWHVAKYVKSNAIVYAKDNRTIGIGAGQMSRVYSARIAGIKAADAHLAVTGSVMASDAFFPFRDSIDAAAAAGIKAVIQPGGSMRDNEVIAAADEHGIAMVFTGIRHFRH

SEQ ID NO: 92259 - DNA, 1584 bp, Xylella fastidiosa
  CDS (1)..(1584): transl_table=11
atggcatccgattttctgcccgtgcatcgtgcactgttatctgtttccgacaaaacagggttggtcgagttggcacgcgtgctgctggcctacaacattgaattactgtctaccggtgggaccgcgacaatcatccgcgaggctggtctcccagtgcaggatgtggccgacctgacagacttcccggaaatgatggacggccgcgtaaaaacactgcaccccgtggtacacggtggtttgctcggacgtgccggcatcgacgacgccgtgatggccaaacacggcatcgcaccaatcgacctgctgatagtgaatctgtatcccttcgaacagatcactgccaaaaaagattgcacgctggccgatgcagtggacaccattgatattggtggcccggcgatgctgcgctcggcggcaaagaatttcgcgcgtgtggctgtggcaacgtcaccggatcaatatcctgatctgcttgctgaactgcaggcgcaccacggccagctttccgccgaaaagcgtttcgcattggccgtggcggcgttcaaccacgttgcccagtacgatgcggccatcagcaactatctttcgagcgtgtccgacatgcacacaacgttgccgttgcgccatgaattcccaactcagttaaacaataccttcgtaaagatgacagatctccgttatggggaaaatccgcatcaaagcggtgcgttctaccgcgatgtacatccgcaacctgggacgctggccaccttcaagcaactccaaggcaagagactcagctacaacaatctggtcgatgccgacgccgcatgggaatgcgtacgtcaattcgaagcgccggcctgcgtcatcgtcaaacatgccaacccttgtggcgtcgcagtcgggacggcgtgcagtgatgcttatgaagcagcgtatgccactgatccgacgagtgcatttggcggcattattgcttttaaccgcacgttagatgcggtcactatgcaaagcattctagaccgtcaatttgtcgaggtattgattgcgccgtattacgatgcagacgccctcgcctatgcgaccaagaaggccaatgtgcgcgtgctgcgtatccccagcactggcgcgatgaatcgctatgatttcaaacggatcggctctggactattggtgcaaagcgccgacagtctgaacatccattcgggtgcactgaaggtggtcactcagcttgctcccacctatgcacaacaacgtgatctgttgtttgcatggcatgtcgccaagtatgtcaagtcaaatgccattgtttacgccaaggataatcgcacgattggtattggcgccggacaaatgagtcgcgtgtattcagcgcgtatcgctggtatcaaggcagccgatgcacatttggctgtcacaggctcagtgatggccagcgatgcgttctttccattccgcgatggcattgatgccgctgccgcgactggaatcaaggcagtgattcaaccgggcggttcgatgcgcgataacgaggtgatcgcggcggctgatgaacacggcattgccatggtcttcacagggatacggcatttccggcattga

SEQ ID NO: 92260 - protein, 527 aa, Xylella fastidiosa
MASDFLPVHRALLSVSDKTGLVELARVLLAYNIELLSTGGTATIIREAGLPVQDVADLTDFPEMMDGRVKTLHPVVHGGLLGRAGIDDAVMAKHGIAPIDLLIVNLYPFEQITAKKDCTLADAVDTIDIGGPAMLRSAAKNFARVAVATSPDQYPDLLAELQAHHGQLSAEKRFALAVAAFNHVAQYDAAISNYLSSVSDMHTTLPLRHEFPTQLNNTFVKMTDLRYGENPHQSGAFYRDVHPQPGTLATFKQLQGKRLSYNNLVDADAAWECVRQFEAPACVIVKHANPCGVAVGTACSDAYEAAYATDPTSAFGGIIAFNRTLDAVTMQSILDRQFVEVLIAPYYDADALAYATKKANVRVLRIPSTGAMNRYDFKRIGSGLLVQSADSLNIHSGALKVVTQLAPTYAQQRDLLFAWHVAKYVKSNAIVYAKDNRTIGIGAGQMSRVYSARIAGIKAADAHLAVTGSVMASDAFFPFRDGIDAAAATGIKAVIQPGGSMRDNEVIAAADEHGIAMVFTGIRHFRH

SEQ ID NO: 92261 - DNA, 1806 bp, Oryza sativa; identical to SEQ ID NO: 56497
  CDS (1)..(1806)

SEQ ID NO: 92262 - protein, 601 aa, Oryza sativa; identical to SEQ ID NO: 56498

SEQ ID NO: 92263 - DNA, 1818 bp, Glycine max; identical to SEQ ID NO: 56501
  CDS (1)..(1818)

SEQ ID NO: 92264 - protein, 605 aa, Glycine max; identical to SEQ ID NO: 56502

SEQ ID NO: 92265 - DNA, 25 bp, Artificial sequence
  primer
atggccaattacacaaaaaccgcaa

SEQ ID NO: 92266 - DNA, 24 bp, Artificial sequence
  primer
ctaatggtggaacaaacggattgg

SEQ ID NO: 92267 - protein, 685 aa, Artificial sequence
  consensus sequence
  Variant (3)..(3): Xaa in position 3 is any amino acid
  Variant (6)..(6): Xaa in position 6 is any amino acid
  Variant (9)..(9): Xaa in position 9 is any amino acid
  Variant (11)..(17): Xaa in position 11 to 17 is any amino acid
  Variant (19)..(28): Xaa in position 19 to 28 is any amino acid
  Variant (29)..(29): Xaa in position 29 is any or no amino acid
  Variant (32)..(32): Xaa in position 32 is any amino acid
  Variant (34)..(40): Xaa in position 34 to 40 is any amino acid
  Variant (42)..(43): Xaa in position 42 to 43 is any amino acid
  Variant (45)..(46): Xaa in position 45 to 46 is any amino acid
  Variant (47)..(51): Xaa in position 47 to 51 is any or no amino acid
  Variant (53)..(55): Xaa in position 53 to 55 is any amino acid
  Variant (57)..(58): Xaa in position 57 to 58 is any amino acid
  Variant (61)..(63): Xaa in position 61 to 63 is any amino acid
  Variant (72)..(73): Xaa in position 72 to 73 is any amino acid
  Variant (77)..(77): Xaa in position 77 is any amino acid
  Variant (79)..(91): Xaa in position 79 to 91 is any amino acid
  Variant (92)..(94): Xaa in position 92 to 94 is any or no amino acid
  Variant (96)..(97): Xaa in position 96 to 97 is any amino acid
  Variant (100)..(100): Xaa in position 100 is any amino acid
  Variant (102)..(103): Xaa in position 102 to 103 is any amino acid
  Variant (109)..(122): Xaa in position 109 to 122 is any amino acid
  Variant (123)..(124): Xaa in position 123 to 124 is any or no amino acid
  Variant (126)..(126): Xaa in position 126 is any amino acid
  Variant (133)..(135): Xaa in position 133 to 135 is any amino acid
  Variant (137)..(137): Xaa in position 137 is any amino acid
  Variant (142)..(144): Xaa in position 142 to 144 is any amino acid
  Variant (146)..(152): Xaa in position 146 to 152 is any amino acid
  Variant (155)..(169): Xaa in position 155 to 169 is any amino acid
  Variant (170)..(173): Xaa in position 170 to 173 is any or no amino acid
  Variant (175)..(176): Xaa in position 175 to 176 is any amino acid
  Variant (179)..(181): Xaa in position 179 to 181 is any amino acid
  Variant (183)..(184): Xaa in position 183 to 184 is any amino acid
  Variant (187)..(187): Xaa in position 187 is any amino acid
  Variant (190)..(191): Xaa in position 190 to 191 is any amino acid
  Variant (193)..(204): Xaa in position 193 to 204 is any amino acid
  Variant (205)..(247): Xaa in position 205 to 247 is any or no amino acid
  Variant (253)..(253): Xaa in position 253 is any amino acid
  Variant (256)..(259): Xaa in position 256 to 259 is any amino acid
  Variant (261)..(272): Xaa in position 261 to 272 is any amino acid
  Variant (273)..(280): Xaa in position 273 to 280 is any or no amino acid
  Variant (283)..(284): Xaa in position 283 to 284 is any amino acid
  Variant (289)..(290): Xaa in position 289 to 290 is any amino acid
  Variant (292)..(294): Xaa in position 292 to 294 is any amino acid
  Variant (296)..(298): Xaa in position 296 to 298 is any amino acid
  Variant (300)..(304): Xaa in position 300 to 304 is any amino acid
  Variant (305)..(314): Xaa in position 305 to 314 is any or no amino acid
  Variant (317)..(320): Xaa in position 317 to 320 is any amino acid
  Variant (323)..(323): Xaa in position 323 is any amino acid
  Variant (328)..(328): Xaa in position 328 is any amino acid
  Variant (330)..(336): Xaa in position 330 to 336 is any amino acid
  Variant (337)..(357): Xaa in position 337 to 357 is any or no amino acid
  Variant (360)..(361): Xaa in position 360 to 361 is any amino acid
  Variant (363)..(365): Xaa in position 363 to 365 is any amino acid
  Variant (367)..(368): Xaa in position 367 to 368 is any amino acid
  Variant (370)..(370): Xaa in position 370 is any amino acid
  Variant (375)..(375): Xaa in position 375 is any amino acid
  Variant (377)..(377): Xaa in position 377 is any amino acid
  Variant (379)..(381): Xaa in position 379 to 381 is any amino acid
  Variant (383)..(392): Xaa in position 383 to 392 is any amino acid
  Variant (393)..(402): Xaa in position 393 to 402 is any or no amino acid
  Variant (404)..(404): Xaa in position 404 is any amino acid
  Variant (406)..(408): Xaa in position 406 to 408 is any amino acid
  Variant (411)..(415): Xaa in position 411 to 415 is any amino acid
  Variant (417)..(422): Xaa in position 417 to 422 is any amino acid
  Variant (423)..(423): Xaa in position 423 is any or no amino acid
  Variant (425)..(426): Xaa in position 425 to 426 is any amino acid
  Variant (427)..(430): Xaa in position 427 to 430 is any or no amino acid
  Variant (432)..(432): Xaa in position 432 is any amino acid
  Variant (434)..(446): Xaa in position 434 to 446 is any amino acid
  Variant (447)..(458): Xaa in position 447 to 458 is any or no amino acid
  Variant (461)..(461): Xaa in position 461 is any amino acid
  Variant (463)..(463): Xaa in position 463 is any amino acid
  Variant (465)..(466): Xaa in position 465 to 466 is any amino acid
  Variant (468)..(476): Xaa in position 468 to 476 is any amino acid
  Variant (477)..(481): Xaa in position 477 to 481 is any or no amino acid
  Variant (483)..(493): Xaa in position 483 to 493 is any amino acid
  Variant (494)..(496): Xaa in position 494 to 496 is any or no amino acid
  Variant (498)..(505): Xaa in position 498 to 505 is any amino acid
  Variant (507)..(508): Xaa in position 507 to 508 is any amino acid
  Variant (512)..(512): Xaa in position 512 is any amino acid
  Variant (514)..(522): Xaa in position 514 to 522 is any amino acid
  Variant (523)..(531): Xaa in position 523 to 531 is any or no amino acid
  Variant (533)..(533): Xaa in position 533 is any amino acid
  Variant (538)..(539): Xaa in position 538 to 539 is any amino acid
  Variant (541)..(546): Xaa in position 541 to 546 is any amino acid
  Variant (548)..(549): Xaa in position 548 to 549 is any amino acid
  Variant (550)..(550): Xaa in position 550 is any or no amino acid
  Variant (552)..(557): Xaa in position 552 to 557 is any amino acid
  Variant (558)..(627): Xaa in position 558 to 627 is any or no amino acid
  Variant (636)..(636): Xaa in position 636 is any amino acid
  Variant (637)..(638): Xaa in position 637 to 638 is any or no amino acid
  Variant (640)..(643): Xaa in position 640 to 643 is any amino acid
  Variant (645)..(647): Xaa in position 645 to 647 is any amino acid
  Variant (649)..(654): Xaa in position 649 to 654 is any amino acid
  Variant (659)..(660): Xaa in position 659 to 660 is any amino acid
  Variant (662)..(664): Xaa in position 662 to 664 is any amino acid
  Variant (666)..(667): Xaa in position 666 to 667 is any amino acid
  Variant (669)..(677): Xaa in position 669 to 677 is any amino acid
  Variant (679)..(680): Xaa in position 679 to 680 is any amino acid
  Variant (684)..(684): Xaa in position 684 is any amino acid
ALXSVXDKXGXXXXXXXLXXXXXXXXXXXGGXTXXXXXXXGXXVXXXXXXXVXXXTXXPEXXXGRVKTLHPXXHGGXLXXXXXXXXXXXXXXXXIXXIDXVXXNLYPFXXXXXXXXXXXXXXXXEXIDIGGPXXXRXAAKNXXXVXXXXXXXDYXXXXXXXXXXXXXXXXXXXRXXLAXXXFXXTAXYDXXIXXXXXXXXXXXXXXXXXXXXXXXXXXXXXXXXXXXXXXXXXXXXXXXXXXXXXXXRYGENXHQXXXXYXXXXXXXXXXXXXXXXXXXXGKXXSYNNXXDXXXAXXXVXXXXXXXXXXXXXXXPAXXXXKHXNPCGXAXXXXXXXXXXXXXXXXXXXXXXXXXXXXAYXXAXXXDXXSXFGGIXAXNXXXDXXXXXXXXXXXXXXXXXXXXFXEXXXAPXXXXXAXXXXXXXKXXXXXXRXLXXXXXXXXXXXXXXXXXXXXXXXXXGGXLXQXXDXXXXXXXXXXXXXXVXXXXXXXXXXXXXXDXXXXXXXXKXXKSNXIXXXXXXXXXXXXXXXXXXGXGAGQXXRXXXXXXAXXXAXXXXXXXXXXXXXXXXXXXXXXXXXXXXXXXXXXXXXXXXXXXXXXXXXXXXXXXXXXXXXXXXXXXXXXXXXXXXASDAFFPFXXXDXXXXAXXXGXXXXXXPGGSXXDXXXIXXAXXXXXXXXXTXXRHFXH

SEQ ID NO: 92268 - protein, 28 aa, Artificial sequence
  protein pattern
  Variant (6)..(6): Xaa in position 6 is Pro or Val
  Variant (7)..(7): Xaa in position 7 is Ala, Ser or Thr
  Variant (8)..(8): Xaa in position 8 is Leu or Met
  Variant (9)..(9): Xaa in position 9 is Ile, Leu or Val
  Variant (11)..(11): Xaa in position 11 is any or no amino acid
  Variant (13)..(13): Xaa in position 13 is any or no amino acid
  Variant (17)..(19): Xaa in position 17 to 19 is any amino acid
  Variant (21)..(21): Xaa in position 21 is any amino acid
  Variant (22)..(22): Xaa in position 22 is Ile or Val
  Variant (23)..(23): Xaa in position 23 is any amino acid
  Variant (24)..(24): Xaa in position 24 is Cys, Ser, Thr or Val
  Variant (25)..(27): Xaa in position 25 to 27 is any amino acid
  Variant (28)..(28): Xaa in position 28 is Asp, Gln, Arg or Ser
IDIGGXXXXRXAXAKNXXXVXXXXXXXX

SEQ ID NO: 92269 - protein, 30 aa, Artificial sequence
  protein pattern
  Variant (2)..(3): Xaa in position 2 to 3 is any amino acid
  Variant (4)..(5): Xaa in position 4 to 5 is any or no amino acid
  Variant (7)..(8): Xaa in position 7 to 8 is any amino acid
  Variant (9)..(9): Xaa in position 9 is any or no amino acid
  Variant (11)..(11): Xaa in position 11 is Ala, Ile or Val
  Variant (12)..(13): Xaa in position 12 to 13 is any amino acid
  Variant (14)..(14): Xaa in position 14 is Ile or Val
  Variant (15)..(15): Xaa in position 15 is Ala, Gly, Ile or Val
  Variant (16)..(16): Xaa in position 16 is any amino acid
  Variant (18)..(18): Xaa in position 18 is Ala, Gly or Ser
  Variant (21)..(22): Xaa in position 21 to 22 is any amino acid
  Variant (24)..(26): Xaa in position 24 to 26 is any amino acid
  Variant (27)..(27): Xaa in position 27 is Phe, Ile or Val
  Variant (28)..(29): Xaa in position 28 to 29 is any amino acid
  Variant (30)..(30): Xaa in position 30 is Ala or Cys
DXXXXAXXXGXXXXXXPXGSXXDXXXXXXX

SEQ ID NO: 92270 - protein, 9 aa, Artificial sequence
  protein pattern
  Variant (2)..(2): Xaa in position 2 is any or no amino acid
  Variant (4)..(4): Xaa in position 4 is any or no amino acid
VXVXNLYPF

SEQ ID NO: 92271 - protein, 10 aa, Artificial sequence
  protein pattern
  Variant (2)..(2): Xaa in position 2 is Ile, Leu, Met or Val
  Variant (7)..(7): Xaa in position 7 is any amino acid
  Variant (8)..(8): Xaa in position 8 is Asn or Ser
  Variant (10)..(10): Xaa in position 10 is Ile, Leu or Val
GXGAGQXXRX

SEQ ID NO: 92272 - protein, 19 aa, Artificial sequence
  protein pattern
  Variant (3)..(4): Xaa in position 3 to 4 is any amino acid
  Variant (6)..(7): Xaa in position 6 to 7 is any amino acid
  Variant (8)..(8): Xaa in position 8 is Ala, Cys, Gly, Ser or Thr
  Variant (10)..(11): Xaa in position 10 to 11 is any amino acid
  Variant (13)..(13): Xaa in position 13 is any amino acid
  Variant (16)..(16): Xaa in position 16 is Asp or Gly
  Variant (17)..(17): Xaa in position 17 is any amino acid
  Variant (18)..(18): Xaa in position 18 is Ile, Leu or Val
  Variant (19)..(19): Xaa in position 19 is Ala, Gly, Ser or Val
AYXXAXXXDXXSXFGXXXX

SEQ ID NO: 92273 - protein, 18 aa, Artificial sequence
  protein pattern
  Variant (2)..(2): Xaa in position 2 is Ile or Leu
  Variant (3)..(3): Xaa in position 3 is Ile, Leu or Val
  Variant (6)..(6): Xaa in position 6 is any amino acid
  Variant (7)..(7): Xaa in position 7 is Asp or Asn
  Variant (9)..(9): Xaa in position 9 is any amino acid
  Variant (10)..(10): Xaa in position 10 is Gly or Asn
  Variant (11)..(11): Xaa in position 11 is Ile, Leu or Val
  Variant (12)..(13): Xaa in position 12 to 13 is any amino acid
  Variant (14)..(14): Xaa in position 14 is Phe, Ile or Leu
  Variant (15)..(15): Xaa in position 15 is Ala, Cys, Gly, Ser or Val
  Variant (16)..(17): Xaa in position 16 to 17 is any amino acid
  Variant (18)..(18): Xaa in position 18 is Ile or Leu
AXXSVXXKXXXXXXXXXX

SEQ ID NO: 92274 - DNA, 573 bp, Saccharomyces cerevisiae
  CDS (1)..(573)
atgacggttggtacacttcccatctggtcaaaaaccttttcttatgcaattaggtcattatgcttcttgcatataatacatatgtatgcatacgaatttactgagacgaggggagaatcaatgttgccaacactgtcagcgaccaatgattatgtgcatgtcttgaaaaatttccaaaatggtagaggcataaaaatgggtgactgcatagtagcactgaaacctactgaccctaatcataggatttgcaaaagggttacgggtatgcctggtgatctcgtgctcgtggatcccagtacgatagttaattatgtcggcgatgtgcttgttgatgaggagaggtttggtacctatattaaagtccctgaaggtcatgtttgggtaaccggagataatttgtcacattcattagattcaagaacatacaatgcattacccatggggctgatcatgggcaagattgtagctgctaacaattttgacaagcccttctgggacggttcgatacgcaatatttggggtttcaaatggatcaataatacatttctagatgtgcaggctaagagcaactga

SEQ ID NO: 92275 - protein, 190 aa, Saccharomyces cerevisiae
MTVGTLPIWSKTFSYAIRSLCFLHIIHMYAYEFTETRGESMLPTLSATNDYVHVLKNFQNGRGIKMGDCIVALKPTDPNHRICKRVTGMPGDLVLVDPSTIVNYVGDVLVDEERFGTYIKVPEGHVWVTGDNLSHSLDSRTYNALPMGLIMGKIVAANNFDKPFWDGSIRNIWGFKWINNTFLDVQAKSN

SEQ ID NO: 92276 - DNA, 525 bp, Oryza sativa (japonica cultivar-group)
  CDS (1)..(525)
atgtccgggttcgcgcggcgcctcggcgggatcccgtggagggagatcgccggggaagccttctcccgcgtcttcctcgtcgcgcaggccgtctgcgccgtccacgtcgtcaacgcccacgtctgctccttcgcgctggtgatgggcccgagcatgctgccggcgatgaacctggcgggggacgtggtggcggtggacctggtgagcgcgcggctcgggcgggtggcgagcggcgacgccgtgctcctcgtctcgccggagaacccgcgcaaggcggtcgtcaagcgcgtcgtcgggatggagggcgacgccgtcacgttcctcgtcgaccccggcaacagcgacgcctccaagaccgtcgtggtaccaaaaggccatgtctgggtgcagggtgataatatttatgcttctagagattcaagacagtttggacctgtcccttatggtctaattacagggaagatcttttgtcgggtttggccactgaaggattttggtccgatagatccaatgtcagctgagtag

SEQ ID NO: 92277 - protein, 174 aa, Oryza sativa (japonica cultivar-group)
MSGFARRLGGIPWREIAGEAFSRVFLVAQAVCAVHVVNAHVCSFALVMGPSMLPAMNLAGDVVAVDLVSARLGRVASGDAVLLVSPENPRKAVVKRVVGMEGDAVTFLVDPGNSDASKTVVVPKGHVWVQGDNIYASRDSRQFGPVPYGLITGKIFCRVWPLKDFGPIDPMSAE

SEQ ID NO: 92278 - DNA, 507 bp, Arabidopsis thaliana
  CDS (1)..(507)
atgagaatgacatttttgagttatctgaagcaatggcgtggaacagcgaaagaagcattcgagaatgtatcaatcgtcgccaagtttctctgtttgcttcatgtcaccgatcgatacataatctccacgacccacgttcacgggccgagcatgcttccgacgcttaatctaaccggcgatgtaatattggcggaacatttatcacaccggtttggtaagattggactcggtgacgttgtattggttcgatctcctagagacccaaaaaggatggtgacaaagcgaatcttgggtttagaaggcgatagactcactttttctgctgacccattggtcggtgatgcttcagtgagcgttttggttccgaaaggtcatgtttggattcagggagataacttgtatgcttcaactgattcacgtcattttgggcctgtaccttacagtctcattgaaggaaaagctcttctacgggtctggccaccagaatactttgggtcattgagatga

SEQ ID NO: 92279 - protein, 168 aa, Arabidopsis thaliana
MRMTFLSYLKQWRGTAKEAFENVSIVAKFLCLLHVTDRYIISTTHVHGPSMLPTLNLTGDVILAEHLSHRFGKIGLGDVVLVRSPRDPKRMVTKRILGLEGDRLTFSADPLVGDASVSVLVPKGHVWIQGDNLYASTDSRHFGPVPYSLIEGKALLRVWPPEYFGSLR

SEQ ID NO: 92280 - DNA, 474 bp, Schizosaccharomyces pombe 972h-
  CDS (1)..(474)
atggctggcatgttccgtattcctattgccgtcgttcagattgctgcatttgtgcatcaaattcatgagtatctttttcaagtgcaaatgacatcgggtccaagtatgatgccaacattaaattctggtggtgaattcgttttgttagataaattgcatggtaggtttgctcgttcatgttctgtaggagatgttgttgtttcggcaaaaccttccgattcaaagcaacacgtgtgcaaacgaatcattggaatgccaggagatacaatttatgtcgatcccacctcttcaaataaaaaaataactatacctttaggtcatgtttggcttgcaggagataacattgctcactcacttgatagtcgaaattacggacctgttccaatgggccttattaaggctaaagttatagctcgtgtatggccacatccccactggatgtctaacattttgaatgacatagatgtggaatag

SEQ ID NO: 92281 - protein, 157 aa, Schizosaccharomyces pombe 972h-
MAGMFRIPIAVVQIAAFVHQIHEYLFQVQMTSGPSMMPTLNSGGEFVLLDKLHGRFARSCSVGDVVVSAKPSDSKQHVCKRIIGMPGDTIYVDPTSSNKKITIPLGHVWLAGDNIAHSLDSRNYGPVPMGLIKAKVIARVWPHPHWMSNILNDIDVE

SEQ ID NO: 92282 - DNA, 552 bp, Bacillus cereus ATCC 14579
  CDS (1)..(552): transl_table=11
atgaaggaaaatacgaagaaagaattattctcttgggctaaaacgataggttttacccttgtattaattgctattattcgcggtgttttatttacaccttctttagtacaaggtgaatcaatgatgcccactttaaaaaataacgaaagagttctcgtgaataagattggttatagtataagtggattagatcgctttgatattatcgtcttccacgggaaagaaggatacgatttagtaaaacgagtaattggtttgccaggcgatacagttgagtataaaaatgatgttttatatgtaaacggaaaagcgatggaagaaccatatttaaaacagtttaaagaaaaagcagtaggccgtgtattaactccagactttacgctagaacaaatcactgggaaaacgaaagtgccagaaggccaagtatttgttttaggggataatcgtgaagtttctaaggatggtcgcatgtttggctttatttcagaagatgaaattgtcggaaaaggacaagctgttttctggccgttggaacaagtaagagcgttataa

SEQ ID NO: 92283 - protein, 183 aa, Bacillus cereus ATCC 14579
MKENTKKELFSWAKTIGFTLVLIAIIRGVLFTPSLVQGESMMPTLKNNERVLVNKIGYSISGLDRFDIIVFHGKEGYDLVKRVIGLPGDTVEYKNDVLYVNGKAMEEPYLKQFKEKAVGRVLTPDFTLEQITGKTKVPEGQVFVLGDNREVSKDGRMFGFISEDEIVGKGQAVFWPLEQVRAL

SEQ ID NO: 92284 - DNA, 570 bp, Magnaporthe grisea 70-15
  CDS (1)..(570)
atgacatcattctcatctagattcctcggacggctctccggcagctcgaccttcttccccatcaagccgaccatatgggtcctcaagacctttgccttgttccacgtcttcttttataacggctacagctactcggccacctggggaccctccatgctgccgacctttgaggttgtcggcgaggccgctgtcatcaaccgcacgtaccgccgtggcaggaacatcggggtcggtgacgtcgtggcctacgacatacccgtggagaagaaggacacgggcatgaagagggtcattggcatgcctggagattacgtcctcatcaactcgccagagagcgggagcagtgagatgattcagaactggggcaaaagattcctgactatcgagctgcttccaatccaggtccctccgggtcattgttggctcgtgggagacaacattcccgcctcaagagactcgcgtcactacggaccagtgcctcttgccttgatccatgggaaagtggttggcaaatggttcccatggaaaagattcaagaacggcctgcagaaagtctccgaatccgactag

SEQ ID NO: 92285 - protein, 189 aa, Magnaporthe grisea 70-15
MTSFSSRFLGRLSGSSTFFPIKPTIWVLKTFALFHVFFYNGYSYSATWGPSMLPTFEVVGEAAVINRTYRRGRNIGVGDVVAYDIPVEKKDTGMKRVIGMPGDYVLINSPESGSSEMIQNWGKRFLTIELLPIQVPPGHCWLVGDNIPASRDSRHYGPVPLALIHGKVVGKWFPWKRFKNGLQKVSESD

SEQ ID NO: 92286 - DNA, 570 bp, Candida glabrata CBS 138
  CDS (1)..(570)
atgctacgaataataaggccaggtacctatgtgatacagtcgctctgctttttacatgtattccacacatatttctatgaatttaccgaaactagaggtgaatcgatgctgcccacacttagcgctaccaaagactttgtccatgtagataagagatacagaaacggcaagaatgtacggctaggagattgcatagtggctgtaaagccaacagatcctacacatcgtgtatgcaagcgtattagcggcatgcctggtgacctaatactggttgatcccggcgtcaagaaggaccttgtcaactattctcggagtgaagaagcgatggatgataatgaggagtttcgaacatacatccgtgtaccgaaggggcatgtgtgggtcacaggagacaatctatcacactctttagattcaagaacatataacgcattaccaatgggtctcataaaaggtaagatagtagcggcaaatgatttcaacgaaccattttggaacccaaaaactaaaaagatatggggtttccgtaagatacccaacacatatgaggattttttgtctgttgattaa

SEQ ID NO: 92287 - protein, 189 aa, Candida glabrata CBS 138
MLRIIRPGTYVIQSLCFLHVFHTYFYEFTETRGESMLPTLSATKDFVHVDKRYRNGKNVRLGDCIVAVKPTDPTHRVCKRISGMPGDLILVDPGVKKDLVNYSRSEEAMDDNEEFRTYIRVPKGHVWVTGDNLSHSLDSRTYNALPMGLIKGKIVAANDFNEPFWNPKTKKIWGFRKIPNTYEDFLSVD

SEQ ID NO: 92288 - DNA, 504 bp, Kluyveromyces lactis NRRL Y-1140
  CDS (1)..(504)
atgagttggcttaatattggtagctatgtggtacgtacagtttgtttgatacatataactcatacacatttctatgagtttacagaaacgagaggtgaatcaatgttaccgaccttgaatagagtaaacgattacgtccatgttctgaaatggtataaggacggacgagacttaaagatgggagactgtatagttgctatgaagcccacagatccacaatctagagtttgcaaacgaataactggaatggagggtgatttgatattagttgatcccagtcaagaagatgatgaggaagcttacgaaacttttatcagggttccaaagggtcacgtatgggtgactggggacaatctttctcatagtttagactccaggacatataattcgatacccaagggtttaatcaaggggaagatcgtagcagcgaacgatttcagcaagcctctatcgactttttgggggtttagagaaatcactaacagctattttgatgagaaatga

SEQ ID NO: 92289 - protein, 167 aa, Kluyveromyces lactis NRRL Y-1140
MSWLNIGSYVVRTVCLIHITHTHFYEFTETRGESMLPTLNRVNDYVHVLKWYKDGRDLKMGDCIVAMKPTDPQSRVCKRITGMEGDLILVDPSQEDDEEAYETFIRVPKGHVWVTGDNLSHSLDSRTYNSIPKGLIKGKIVAANDFSKPLSTFWGFREITNSYFDEK

SEQ ID NO: 92290 - DNA, 573 bp, Debaryomyces hansenii CBS767
  CDS (1)..(573)
atgccattacccgagtcactcaagtttttaggctctactttatcgtggaccttgaaggcagggtgtatagctcacttgttacatgaatatgtatacgaatttacggaaaccagaggagagtcaatgctcccaactctacaagcacaccatgattatgttcatgccttgaagaagcatagattgggaagggatttagaaataggtgattgcatagttgcaataaagccaagtgatccagaacatcgtgtatgtaagagaataacaggaatgccaggagatatcatattggttgatccatcatcatcttcggaattgaccaatagtacggccgagtgcatttcccatgacggatttaacaaatatattaaagtacccgagggtcatgtttgggctacaggagataatttgtgccactcattggattcaaggtcatattcagcgttaccaatggcattaatcaaggggaaaataatagctgctaattcaatggatagagggcttaaaaacgaaaatgggaagttatggttttggaatttcaggtggataggcaattcctttgttacggagggatag

SEQ ID NO: 92291 - protein, 190 aa, Debaryomyces hansenii CBS767
MPLPESLKFLGSTLSWTLKAGCIAHLLHEYVYEFTETRGESMLPTLQAHHDYVHALKKHRLGRDLEIGDCIVAIKPSDPEHRVCKRITGMPGDIILVDPSSSSELTNSTAECISHDGFNKYIKVPEGHVWATGDNLCHSLDSRSYSALPMALIKGKIIAANSMDRGLKNENGKLWFWNFRWIGNSFVTEG

SEQ ID NO: 92292 - DNA, 570 bp, Yarrowia lipolytica CLIB122
  CDS (1)..(570)
atgtttggcatcttttcgcgcattcccgtggagctgcgcacggccgtgtcgattgcggttcgagcaggctgtgccatccatttctttcgcatgcacattttcgagtcttcactcacatacggcccatcaatgattccgactcttgatgagaagggcgactttgtcaatatcgacaagctgaagagcagagggcgaggcgtgcaagttggtgacgtggtcgtggcgataaagccgaccacttcagaccagcgggtctgcaagcgaatcagtggtatgcctggagacatcattcttatagatcatgaacggtctgataacgagttcattcaggtccccaagggtcactgctgggtcactggcgacaatctgagcatgagtctggactctcgaacatacagagccatgcctctagccctcgtcaagggtaaaatcatcgctgctcactcatttgcacggggattccgattcctaccaaacactctggaggacgctgcggaagatgaactaatcacaaatactgtgacattggtggaggacgagcctgttgaggtggccactacgagcagttag

SEQ ID NO: 92293 - protein, 189 aa, Yarrowia lipolytica CLIB122
MFGIFSRIPVELRTAVSIAVRAGCAIHFFRMHIFESSLTYGPSMIPTLDEKGDFVNIDKLKSRGRGVQVGDVVVAIKPTTSDQRVCKRISGMPGDIILIDHERSDNEFIQVPKGHCWVTGDNLSMSLDSRTYRAMPLALVKGKIIAAHSFARGFRFLPNTLEDAAEDELITNTVTLVEDEPVEVATTSS

SEQ ID NO: 92294 - DNA, 549 bp, Aspergillus nidulans FGSC A4
  CDS (1)..(549)
atgccgtcaaaagcagaatctctcttccgctccctcctccgacactcaacaccccgacacgttcttcgaagcctctacttcggaacaggcgcattctgcgccgccgccctattctgggagaatgtattgatgttccaactagcggaggggccgtccatgtatccgacattcaacccgcggggggactaccttcttgtttcgagactgcacaaacacgggcgcggaattgaggtaggcgatgtggtgcgtttctatcacccgagcttcttgggcatgcatggcgcaaagagggttatcggtttaccgggggattttgtttgtcgggatcacccgctcagtactgatgttggggggagtggagagatgatcagagtaccggaaggacatgtttacgtgtgcggagacaacctgccgtggtcgagggattcgaggacctttggcccattgccgatgggattgattaatgggaaggttattgcaaggatttggccgttgtccaaggtacagtgggtgacaaataccttgaagcctgttgaggctgcggaatga

SEQ ID NO: 92295 - protein, 182 aa, Aspergillus nidulans FGSC A4
MPSKAESLFRSLLRHSTPRHVLRSLYFGTGAFCAAALFWENVLMFQLAEGPSMYPTFNPRGDYLLVSRLHKHGRGIEVGDVVRFYHPSFLGMHGAKRVIGLPGDFVCRDHPLSTDVGGSGEMIRVPEGHVYVCGDNLPWSRDSRTFGPLPMGLINGKVIARIWPLSKVQWVTNTLKPVEAAE

SEQ ID NO: 92296 - DNA, 552 bp, Candida albicans SC5314
  CDS (1)..(552): transl_table=12
atgacattctttgaatcacttaagtttgtcggatcgacgttatcctggactttgagagcaggctgcatagcacacttgatacatgaaaatgtctatgaattcactgaaactcgaggcgaatcaatgttgccaacattacaaaaccaacacgactatgttcatgcgttgaaaaaatacaaatatggaagaaatttagtaatgggagattgcattgtcgcaatcaaacctagtgaccctagtcatagaatctgtaaacggattactgggatgccaggggatatgattttggtggacccatccagctcatctgaactaaccaatagcccaaatgaaataatacaacatgatggatataacaagtacattcgaataccagaaggtcatgtgtggtgtactggtgataatttatgtcattcattggactcacgttcctatggtgtggtgcctatggggctcattacagggaaaattgttgctgccaattctatgagtgagggaatctccacattatacaatttcagatggataacaaatacgctacaggatgagtga

SEQ ID NO: 92297 - protein, 183 aa, Candida albicans SC5314
MTFFESLKFVGSTLSWTLRAGCIAHLIHENVYEFTETRGESMLPTLQNQHDYVHALKKYKYGRNLVMGDCIVAIKPSDPSHRICKRITGMPGDMILVDPSSSSELTNSPNEIIQHDGYNKYIRIPEGHVWCTGDNLCHSLDSRSYGVVPMGLITGKIVAANSMSEGISTLYNFRWITNTLQDE

SEQ ID NO: 92298 - DNA, 552 bp, Bacillus thuringiensis serovar konkukian str. 97-27
  CDS (1)..(552): transl_table=11
atgaaggaaaatacgaagaaagaattattctcatgggcgaaaacgataggatttacccttgtattaatcgcaattattcgcggtgttttatttacaccgtcattagtacaaggcgaatcgatgatgccgactttagaaaataacgaacgagttctcgtcaataagattggttatagtataagtggattagaacgctttgatattatcgttttccatggaaaagaaggatatgatttagtaaaacgagtaattggtttaccaggcgatacagttgagtataaaaatgatgttttatatgtaaacggcaaagcgatggaagaaccatatttaaaagagtttaaagaaaaagcagcaggtcgtgtattaactccagactttacgttagaacaaattacaggaaaaacgaaagtgccagaaggccaagtgtttgtattaggtgataatcgtgaagtttctaaagacggtcgtatgtttggatttatttcagaagatgaaattgtcggaaaaggacaagctgttttctggccgttgaaacaagtaagagcgctataa

SEQ ID NO: 92299 - protein, 183 aa, Bacillus thuringiensis serovar konkukian str. 97-27
MKENTKKELFSWAKTIGFTLVLIAIIRGVLFTPSLVQGESMMPTLENNERVLVNKIGYSISGLERFDIIVFHGKEGYDLVKRVIGLPGDTVEYKNDVLYVNGKAMEEPYLKEFKEKAAGRVLTPDFTLEQITGKTKVPEGQVFVLGDNREVSKDGRMFGFISEDEIVGKGQAVFWPLKQVRAL

SEQ ID NO: 92300 - DNA, 540 bp, Aspergillus niger
  CDS (1)..(540)
atggaccgcttcctccgctacaccctaaaacgcagcaccccgggccatctattccgcttcggcctcaacagcctgggagtgttctgcgcatgcacactaatctgggaacacctgatcactgtccaactgagcgaaggtccatcaatgtacccgactttcagtccgcgaggcgactaccttctcatatcgcgagtgcacaagcacggccgggggattcaggtcggcgacgtggtgcggttctatcatccgacgtttttgggggtgaatggggcgaagagggtcattgggttgccgggggattttgtgtgtagggatttgccgtttagtagggaggttgctaatgtggtctgtgtttggttgcaggttcctgaagggcatgtctatcttgctggggataatttgccgtggtcgagggattccaggaattatggccctataccgatggcgcttataaatgggaagattatcgcgcgggtgtggccgttgcataagtttgagtgggtgaagaatacgttggagacggcggatttgtcggagtga

SEQ ID NO: 92301 - protein, 179 aa, Aspergillus niger
MDRFLRYTLKRSTPGHLFRFGLNSLGVFCACTLIWEHLITVQLSEGPSMYPTFSPRGDYLLISRVHKHGRGIQVGDVVRFYHPTFLGVNGAKRVIGLPGDFVCRDLPFSREVANVVCVWLQVPEGHVYLAGDNLPWSRDSRNYGPIPMALINGKIIARVWPLHKFEWVKNTLETADLSE

SEQ ID NO: 92302 - DNA, 501 bp, Medicago truncatula
  CDS (1)..(501)
atgatggggacaagaaatttagtttggaatgttactaaaaaattggccacaattggtctcattactttcactgtctctgatcgttatgcaactgttgttcctgttcgtggtgcttctatgtctcccactttcaatcccaaaactaattccttcacagatgattatgtctttgttgagaaactttgccttgataagttcaagttttcgcacggtgatatcgtcatcttcagttccccgtcgaattttaaggagacacacataaagagaataattgcattacctggtgagtggtttgttaatcgtcataaccaggacgtactgaaggttccagaagggcattgttgggttgagggagacaatgcagcttctagcacagattcaaaatcatatggacctgttccattgggtctagtacgaggaagggttactcatgttgtttggcctcctcaaagaataggagctgtcaagaatactacaccagaaagattaccttcttcatag

SEQ ID NO: 92303 - protein, 166 aa, Medicago truncatula
MMGTRNLVWNVTKKLATIGLITFTVSDRYATVVPVRGASMSPTFNPKTNSFTDDYVFVEKLCLDKFKFSHGDIVIFSSPSNFKETHIKRIIALPGEWFVNRHNQDVLKVPEGHCWVEGDNAASSTDSKSYGPVPLGLVRGRVTHVVWPPQRIGAVKNTTPERLPSS

SEQ ID NO: 92304 - DNA, 537 bp, Aspergillus oryzae
  CDS (1)..(537)
atgtcgcgcatactccgagaaacccttcgaagggccacacccggcggggtcttccgtcttacgctcgatggcgtgggactcttctgcgcctgtacgcttatctgggagcatctcatcacggtgcagctcagtgaagggccgtcaatgtacccgacgttcaatccgcgaggcgactacctgttgatatcgagggtgcataaacatggccgggggattgaggtgggggatgtggtgcggttctatcatcctacgtttttgggggtgaatggggcgaagagggttattgggatgccgggggattttgtctgtcgggatttgccgtttagtacggaggttgggaagagtcaggagatgattcaggtgcccgagggtcatgtgtacgtgggaggtgataaccttccctggtctagggactcgagaaactatggacccatacctatgggcttgatcaatggaaagatcattgcccgtgtttggccgctctccaaagcgcaatgggtccagaatacgatgcagccagctcagctcgacgactag

SEQ ID NO: 92305 - protein, 178 aa, Aspergillus oryzae
MSRILRETLRRATPGGVFRLTLDGVGLFCACTLIWEHLITVQLSEGPSMYPTFNPRGDYLLISRVHKHGRGIEVGDVVRFYHPTFLGVNGAKRVIGMPGDFVCRDLPFSTEVGKSQEMIQVPEGHVYVGGDNLPWSRDSRNYGPIPMGLINGKIIARVWPLSKAQWVQNTMQPAQLDD

SEQ ID NO: 92306 - DNA, 774 bp, Zea mays
  CDS (1)..(774)
atgccgggcttcgctcagcgtctcgcgggcatcccgtggcggagcatcgcgaggcaaggcctctcccgcgtgttcctggtggcgaaggcctactgcttgatccacgtcgtcaacgaccacctctgctcggtgaccttagtgcggggcgccagcatgctgccgtccctgaacctggcgggcgacgcggtggcggtggacagggtcagcgtgaggctcggccgggtcgcgccgggggacatcgtgctgatgatctcccccgaggacccgcgcaagtcggtcgtcaagcgcgtcgtcgggatgcagggggactccgtcacctaccttgtcgaccccggcaaaagcgactcctccagaaccgtcgtgatcctcaatgaattagaactatgtgctggtaaaaccttgcactatgctaccctcggtatatttaccccgccagaccagaaggtaccgcaagatcatgtctgggtgcagggtgacaatatctttgcttctaacgattcgaggcaatttggagctgtgccttatgggctgattacagggaagatcttttgccggcagaagcagcgacgacttgcactgcgcgcacatgcagatctgctgggtggtgcagaagccgccgacgtagcccttgtcctggcagcgggcgatgcagagcagtggcgcgtcgcggcactccgggacgatgctgcggaacagcgggcacatgcccttgccgtctgcttggtaattaatgtgaacccatccatccatccatcccagattaaattaaattaa

SEQ ID NO: 92307 - protein, 257 aa, Zea mays
MPGFAQRLAGIPWRSIARQGLSRVFLVAKAYCLIHVVNDHLCSVTLVRGASMLPSLNLAGDAVAVDRVSVRLGRVAPGDIVLMISPEDPRKSVVKRVVGMQGDSVTYLVDPGKSDSSRTVVILNELELCAGKTLHYATLGIFTPPDQKVPQDHVWVQGDNIFASNDSRQFGAVPYGLITGKIFCRQKQRRLALRAHADLLGGAEAADVALVLAAGDAEQWRVAALRDDAAEQRAHALAVCLVINVNPSIHPSQIKLN

SEQ ID NO: 92308 - DNA, 522 bp, Sorghum bicolor
  CDS (1)..(522)
atgtcgggcttcgttcggcgtctcgcgggcatcccgtggcggagcatcgcgggggacgccctctcgcgcgtgttcctggtggcgcaggcctactgcgccgtccacgtcgtggaccagcacctctgctcgctcgccttcgtgcggggccccagcatgctgccggccatgaacctggcgggcgatgtggtggcggtggacagggtcagcgcgacgctcggccgggtcgcgcccggggacgtcgtgctgatgatctcccccgaggacccgcgcaagtccgtcgccaagcgcgtcgtcgggatggaaggggactccgtcacctacctcgtcgaccccggcagcagcgacgcctccaaaaccgtcgtggtaccacaaggtcatgtttgggtgcagggtgataatccttatgcttctagggattcaaggcaatttggagccgtgccttatggtctcattacagggaagatcttttgtcggggggttgatgcaatctctggagccaatatttgctttatggctccataa

SEQ ID NO: 92309 - protein, 173 aa, Sorghum bicolor
MSGFVRRLAGIPWRSIAGDALSRVFLVAQAYCAVHVVDQHLCSLAFVRGPSMLPAMNLAGDVVAVDRVSATLGRVAPGDVVLMISPEDPRKSVAKRVVGMEGDSVTYLVDPGSSDASKTVVVPQGHVWVQGDNPYASRDSRQFGAVPYGLITGKIFCRGVDAISGANICFMAP

SEQ ID NO: 92310 - DNA, 579 bp, Oryza sativa
  CDS (1)..(579)
atgtccgggttcgcgcggcgcctcggcgggatcccgtggagggagatcgccggggaagccttctcccgcgtcttcctcgtcgcgcaggccgtctgcgccgtccacgtcgtcaacgcccacgtctgctccttcgcgctggtgatgggcccgagcatgctgccggcgatgaacctggcgggggacgtggtggcggtggacctggtgagcgcgcggctcgggcgggtggcgagcggcgacgccgtgctcctcgtctcgccggagaacccgcgcaaggcggtcgtcaagcgcgtcgtcgggatggagggcgacgccgtcacgttcctcgtcgaccccggcaacagcgacgcctccaagaccgtcgtggtaccaaaaggccatgtctgggtgcagggtgataatatttatgcttctagagattcaagacagtttggacctgtcccttatggtctaattacagggaagatcttttgtcggaatccaggcctctcgctctacctttatctctccgagccgacctttttttacccgtttgctccagaatttatcgaagacggcatgcatatcttgagatttttatga

SEQ ID NO: 92311 - protein, 192 aa, Oryza sativa
MSGFARRLGGIPWREIAGEAFSRVFLVAQAVCAVHVVNAHVCSFALVMGPSMLPAMNLAGDVVAVDLVSARLGRVASGDAVLLVSPENPRKAVVKRVVGMEGDAVTFLVDPGNSDASKTVVVPKGHVWVQGDNIYASRDSRQFGPVPYGLITGKIFCRNPGLSLYLYLSEPTFFYPFAPEFIEDGMHILRFL

SEQ ID NO: 92312 - DNA, 501 bp, Brassica napus
  CDS (1)..(501)
atgagatggctgagatatctaaaccaatggcgtggaacagcgaaggaagcgttggagcaagtatcaatcgtcgccaagtttctctgtttgatccacgtcaccgatcgttacataatctcatccactcacgttcaaggtcctagcatgcttccgacgcttaacctcaccggcgatgtcatcttagcggaacatttatcgcaccggttcggtaagatcggtctcggcgacattgtgttggttcggtctccgacagatccaacgaggatggtgacaaagcggatcttgggtttagaagggcatagactctctttctctgctgacccattggtcggtgatggctcaatcagcgttgtggttccaaaaggacatgtttggattcagggggataacttgtatgcttcaactgattcacgtaattttggacctgtaccttacagtctcatcgaaggaaaagctcttctacggctctggccaccacgattcttcgggtcattgacgtga

SEQ ID NO: 92313 - protein, 166 aa, Brassica napus
MRWLRYLNQWRGTAKEALEQVSIVAKFLCLIHVTDRYIISSTHVQGPSMLPTLNLTGDVILAEHLSHRFGKIGLGDIVLVRSPTDPTRMVTKRILGLEGHRLSFSADPLVGDGSISVVVPKGHVWIQGDNLYASTDSRNFGPVPYSLIEGKALLRLWPPRFFGSLT

SEQ ID NO: 92314 - DNA, 540 bp, Glycine max
  CDS (1)..(540)
atgatattgagaaacctggaggcatttgtgcctattattaaagcaggatggaggttttctaagatctactgttttatacacgttacccaaacctatttgatcgcccctgctgtgacctatggtcctagcatgcttcctactatcgatttgaaaacaggtgtgttcttaatggaaaagatctcaccccggtttggtaaagttacttgtggagatattgtagtcttgcgcaatcctcaacaccctaggcactttatgaccaaacgtgtggttggattggagggtgatagcgttacatacatttccaatcctgagacctatgaatatgagggtgatagttttacacacatttcctctcctgataacggtgataagtctaagacgattgtggtgccaaagggtgccgtttgggttgagggagataacaagtataacagcaatgattcaagaaaatttggtcctgttccttatgaccttattgatggcaagatgttctggaggataacgccacttaaaaaatttggacctttctggaataaatga

SEQ ID NO: 92315 - protein, 179 aa, Glycine max
MILRNLEAFVPIIKAGWRFSKIYCFIHVTQTYLIAPAVTYGPSMLPTIDLKTGVFLMEKISPRFGKVTCGDIVVLRNPQHPRHFMTKRVVGLEGDSVTYISNPETYEYEGDSFTHISSPDNGDKSKTIVVPKGAVWVEGDNKYNSNDSRKFGPVPYDLIDGKMFWRITPLKKFGPFWNK

SEQ ID NO: 92316 - DNA, 501 bp, Zea mays
  CDS (1)..(501)
atgagaacctatagccatctttggtcgacgaccaagaggagtgcaatggcgtttgtaattggcgtctccatttctgaccgttgggcgaatttcacttgggtgactggcgaatccatgtatcctacgtttacggccgccaatagcttctggggaggtgatttcgttttagcagaaaagaggtgccttgagcagtgcaagttctcacatggtgatgtgattttgttcaagtgccctagcaatcataaggagatgcttgtgaagaggttgattgggcttcctggtgagaagatacagctccctgggtcccttaaccctactaagatcccagaagggcattgctgggttgaaggtgataactctactcgtagctgggattctagggcattcggtccgattcccttaggtctagttcaagggcgggttacgcacataatctggcctccgtcgaggataggccggctggagagaaagatgcatgaagggagaatttcacctgattga

SEQ ID NO: 92317 - protein, 166 aa, Zea mays
MRTYSHLWSTTKRSAMAFVIGVSISDRWANFTWVTGESMYPTFTAANSFWGGDFVLAEKRCLEQCKFSHGDVILFKCPSNHKEMLVKRLIGLPGEKIQLPGSLNPTKIPEGHCWVEGDNSTRSWDSRAFGPIPLGLVQGRVTHIIWPPSRIGRLERKMHEGRISPD

SEQ ID NO: 92318 - DNA, 528 bp, Zea mays
  CDS (1)..(528)
atgccgggcttcgctcagcgtctcgcgggcatcccgtggcggagcatcgcgaggcaaggcctctcccgcgtgttcctggtggcgaaggcctactgcgtgatccacgtcgtcaacgaccacctctgctcggtgaccttagtgcggggcgccagcatgctgccgtccctgaacctggcgggcgacgcggtggcggtggacagggtcagcgtgaggctcggccgggtcgcgccgggggacatcgtgctgatgatctcccctgaggacccgcgcaaatcggtcgtcaagcgcgtcgtcgggatgcagggggactccgtcacctaccttgtcgaccccggcaaaagcgactcctccagaaccgtcgtggtaccgcaagatcatgtctgggtgcagggtgacaatatctttgcttctaacgattcgaggcaatttggagctgtgccttatgggctgattacagggaagatcttttgccgggtttggccgccagagagttttggcgcaattgatgacgcaacgaagcagtcttaa

SEQ ID NO: 92319 - protein, 175 aa, Zea mays
MPGFAQRLAGIPWRSIARQGLSRVFLVAKAYCVIHVVNDHLCSVTLVRGASMLPSLNLAGDAVAVDRVSVRLGRVAPGDIVLMISPEDPRKSVVKRVVGMQGDSVTYLVDPGKSDSSRTVVVPQDHVWVQGDNIFASNDSRQFGAVPYGLITGKIFCRVWPPESFGAIDDATKQS

SEQ ID NO: 92320 - DNA, 23 bp, Artificial sequence
  primer
atgacggttggtacacttcccat

SEQ ID NO: 92321 - DNA, 23 bp, Artificial sequence
  primer
tcagttgctcttagcctgcacat

SEQ ID NO: 92322 - protein, 140 aa, Artificial sequence
  consensus sequence
  Variant (2)..(2): Xaa in position 2 is any amino acid
  Variant (5)..(5): Xaa in position 5 is any amino acid
  Variant (7)..(28): Xaa in position 7 to 28 is any amino acid
  Variant (29)..(34): Xaa in position 29 to 34 is any or no amino acid
  Variant (37)..(42): Xaa in position 37 to 42 is any amino acid
  Variant (44)..(49): Xaa in position 44 to 49 is any amino acid
  Variant (50)..(51): Xaa in position 50 to 51 is any or no amino acid
  Variant (54)..(55): Xaa in position 54 to 55 is any amino acid
  Variant (57)..(58): Xaa in position 57 to 58 is any amino acid
  Variant (61)..(73): Xaa in position 61 to 73 is any amino acid
  Variant (74)..(108): Xaa in position 74 to 108 is any or no amino acid
  Variant (110)..(110): Xaa in position 110 is any amino acid
  Variant (114)..(116): Xaa in position 114 to 116 is any amino acid
  Variant (120)..(122): Xaa in position 120 to 122 is any amino acid
  Variant (124)..(124): Xaa in position 124 is any amino acid
  Variant (128)..(132): Xaa in position 128 to 132 is any amino acid
  Variant (134)..(135): Xaa in position 134 to 135 is any amino acid
  Variant (138)..(138): Xaa in position 138 is any amino acid
GXSMXPXXXXXXXXXXXXXXXXXXXXXXXXXXXXGDXXXXXXPXXXXXXXXKRXXGXXGDXXXXXXXXXXXXXXXXXXXXXXXXXXXXXXXXXXXXXXXXXXXXXXXXPXGHVXXXGDNXXXSXDSRXXXXXPXXLIXGK

SEQ ID NO: 92323 - protein, 34 aa, Artificial sequence
  protein pattern
  Variant (2)..(2): Xaa in position 2 is any amino acid
  Variant (3)..(3): Xaa in position 3 is Asp or Gly
  Variant (5)..(6): Xaa in position 5 to 6 is any or no amino acid
  Variant (8)..(8): Xaa in position 8 is any amino acid
  Variant (9)..(10): Xaa in position 9 to 10 is any or no amino acid
  Variant (14)..(16): Xaa in position 14 to 16 is any amino acid
  Variant (18)..(18): Xaa in position 18 is any amino acid
  Variant (21)..(21): Xaa in position 21 is Lys or Arg
  Variant (22)..(22): Xaa in position 22 is any amino acid
  Variant (23)..(23): Xaa in position 23 is Phe or Tyr
  Variant (24)..(25): Xaa in position 24 to 25 is any amino acid
  Variant (26)..(26): Xaa in position 26 is Ile, Leu, Met or Val
  Variant (28)..(28): Xaa in position 28 is any amino acid
  Variant (29)..(29): Xaa in position 29 is Ala, Gly or Ser
  Variant (31)..(31): Xaa in position 31 is Ile or Val
  Variant (32)..(32): Xaa in position 32 is any amino acid
  Variant (33)..(33): Xaa in position 33 is Ala or Gly
  Variant (34)..(34): Xaa in position 34 is Lys or Arg
PXXHXXVXXXGDNXXXSXDSXXXXXXPXXLXXXX

SEQ ID NO: 92324 - protein, 29 aa, Artificial sequence
  protein pattern
  Variant (3)..(3): Xaa in position 3 is any amino acid
  Variant (4)..(4): Xaa in position 4 is any or no amino acid
  Variant (6)..(8): Xaa in position 6 to 8 is any amino acid
  Variant (9)..(9): Xaa in position 9 is any or no amino acid
  Variant (11)..(18): Xaa in position 11 to 18 is any amino acid
  Variant (21)..(21): Xaa in position 21 is Ile or Val
  Variant (22)..(22): Xaa in position 22 is any amino acid
  Variant (24)..(24): Xaa in position 24 is Leu or Met
  Variant (25)..(25): Xaa in position 25 is Glu, Pro or Gln
  Variant (27)..(27): Xaa in position 27 is Asp or His
  Variant (28)..(28): Xaa in position 28 is any amino acid
  Variant (29)..(29): Xaa in position 29 is Ile, Leu or Val
GDXXVXXXXPXXXXXXXXKRXXGXXGXXX

SEQ ID NO: 92325 - DNA, 309 bp, Saccharomyces cerevisiae
  CDS (1)..(309)
atggcaggggatagtataagcgctgacggcactggcgtccatccagttgaactgtcggtgtattcagtattgtccaccgatttagacggactgtatcaatcgatcaatgaattacgcgagtcgcaagcactactcatccttatgcttcggaaggttcgcgataaacttcgaagagaaggtcaagtcctttatgacccagaaccattcaaaccaaccatggataaactggctgacttatctgcccgtgtgcgcattctctcacaaagatacgaggagcttcaggggaatgctagagccctcaacaactaa

SEQ ID NO: 92326 - protein, 102 aa, Saccharomyces cerevisiae
MAGDSISADGTGVHPVELSVYSVLSTDLDGLYQSINELRESQALLILMLRKVRDKLRREGQVLYDPEPFKPTMDKLADLSARVRILSQRYEELQGNARALNN

SEQ ID NO: 92327 - DNA, 306 bp, Candida glabrata CBS 138
  CDS (1)..(306)
atgtctgataacagtgaagtacaaggtatacatccagtcgagttaagtgtgtattcgttggtttcatcagacctggataatctataccaagcaatcaacgaactgcgagagtcccaagcactactgatcttaaagttgcggactgtaagagactcgttaaggctggagaacgagctcttgtttgactccaacgaatataaagcccaatttaaagaggtaaacaatctgcagaaacggttacaaaagataactttacgcttgaaagatcttgagagaagatccagtcaattaactaccagctcgtga

SEQ ID NO: 92328 - protein, 101 aa, Candida glabrata CBS 138
MSDNSEVQGIHPVELSVYSLVSSDLDNLYQAINELRESQALLILKLRTVRDSLRLENELLFDSNEYKAQFKEVNNLQKRLQKITLRLKDLERRSSQLTTSS

SEQ ID NO: 92329 - DNA, 300 bp, Kluyveromyces lactis NRRL Y-1140
  CDS (1)..(300)
atggatattgatgcagaagatgctacaaagtctggtttacacccgattgagctatgcgtttattctcttttgagtggcaatttagaaagcatataccaatcgattaatgaattaagggaatcacaagcagtgctgatactgcggcttaagcaattgagagaaacatgcaaagatgagcaagatcgtatcaataaatattgttcgttaaatgcagagattgagaggctggataaacttgaaaccaaagttgacgttgtcttaaagaggtacgagaaaatggtgggatccatatcggaataa

SEQ ID NO: 92330 - protein, 99 aa, Kluyveromyces lactis NRRL Y-1140
MDIDAEDATKSGLHPIELCVYSLLSGNLESIYQSINELRESQAVLILRLKQLRETCKDEQDRINKYCSLNAEIERLDKLETKVDVVLKRYEKMVGSISE

SEQ ID NO: 92331 - DNA, 402 bp, Debaryomyces hansenii CBS767
  CDS (1)..(402)
atgttcagcaatgatagatctgatagtaatgttgtacaacagcatagtgaagtattggaacatgaacatgaatcaggaattagcggacttcacccaatagaattaacagctcatagtattttgaatgcaccattggatcacctttatgaagacttcgaactgttaggtcaatcgcaatacattcttttgacaagactaagattgatcgaagacagattaaagagcttcaagaaagtggtgatagatgatggcaatatgacttcggaaaaggaaatctccgagacttttaataagatacgagaattgaagaagcggttaagtgtgacagtcaaatcgttggataaggtagaaactcgagtagagaaaatgaataaaaaattgaatatcgatgcaaatgagtga

SEQ ID NO: 92332 - protein, 133 aa, Debaryomyces hansenii CBS767
MFSNDRSDSNVVQQHSEVLEHEHESGISGLHPIELTAHSILNAPLDHLYEDFELLGQSQYILLTRLRLIEDRLKSFKKVVIDDGNMTSEKEISETFNKIRELKKRLSVTVKSLDKVETRVEKMNKKLNIDANE

SEQ ID NO: 92333 - DNA, 309 bp, Saccharomyces cerevisiae
  CDS (1)..(309)
atggcaggggatagtataagcgctgacggcactggcgtccatccagttgaactgtcggtgtattcagtattgtccaccgatttagacggactgtatcaatcgatcaatgaattacgcgagtcgcaagcactactcatccttatgcttcggaaggttcgcgataaacttcgaagagaaggtcaagtactttatgacccagaaccattcaaaccaaccatggataaactggccgacttatctgcccgtgtgcacattctctcacaaagatacgaggagcttcaggggaatgttagagccctcaacaactaa

SEQ ID NO: 92334 - protein, 102 aa, Saccharomyces cerevisiae
MAGDSISADGTGVHPVELSVYSVLSTDLDGLYQSINELRESQALLILMLRKVRDKLRREGQVLYDPEPFKPTMDKLADLSARVHILSQRYEELQGNVRALNN

SEQ ID NO: 92335 - DNA, 23 bp, Artificial sequence
  primer
atggcaggggatagtataagcgc

SEQ ID NO: 92336 - DNA, 24 bp, Artificial sequence
  primer
ttagttgttgagggctctagcatt

SEQ ID NO: 92337 - protein, 95 aa, Artificial sequence
  consensus sequence
  Variant (2)..(8): Xaa in position 2 to 8 is any amino acid
  Variant (9)..(11): Xaa in position 9 to 11 is any or no amino acid
  Variant (13)..(13): Xaa in position 13 is any amino acid
  Variant (16)..(16): Xaa in position 16 is any amino acid
  Variant (19)..(19): Xaa in position 19 is any amino acid
  Variant (23)..(23): Xaa in position 23 is any amino acid
  Variant (26)..(27): Xaa in position 26 to 27 is any amino acid
  Variant (30)..(30): Xaa in position 30 is any amino acid
  Variant (34)..(34): Xaa in position 34 is any amino acid
  Variant (44)..(44): Xaa in position 44 is any amino acid
  Variant (48)..(48): Xaa in position 48 is any amino acid
  Variant (51)..(52): Xaa in position 51 to 52 is any amino acid
  Variant (55)..(55): Xaa in position 55 is any amino acid
  Variant (57)..(58): Xaa in position 57 to 58 is any amino acid
  Variant (60)..(64): Xaa in position 60 to 64 is any amino acid
  Variant (66)..(78): Xaa in position 66 to 78 is any amino acid
  Variant (79)..(84): Xaa in position 79 to 84 is any or no amino acid
  Variant (86)..(87): Xaa in position 86 to 87 is any amino acid
  Variant (89)..(94): Xaa in position 89 to 94 is any amino acid
MXXXXXXXXXXGXHPXELXVYSXLSXXLDXLYQXINELRESQAXLILXLRXXRDXLXXEXXXXXDXXXXXXXXXXXXXXXXXXXLXXRXXXXXXR

SEQ ID NO: 92338 - protein, 61 aa, Artificial sequence
  protein pattern
  Variant (2)..(2): Xaa in position 2 is Ile, Leu or Val
  Variant (5)..(5): Xaa in position 5 is Ile or Val
  Variant (8)..(8): Xaa in position 8 is Cys or Ser
  Variant (12)..(12): Xaa in position 12 is any or no amino acid
  Variant (14)..(14): Xaa in position 14 is any or no amino acid
  Variant (16)..(16): Xaa in position 16 is Gly, Ser or Thr
  Variant (17)..(17): Xaa in position 17 is Asp or Asn
  Variant (19)..(19): Xaa in position 19 is Asp or Glu
  Variant (20)..(20): Xaa in position 20 is Gly, Asn or Ser
  Variant (21)..(21): Xaa in position 21 is Ile or Leu
  Variant (24)..(24): Xaa in position 24 is Ala or Ser
  Variant (34)..(34): Xaa in position 34 is any or no amino acid
  Variant (38)..(38): Xaa in position 38 is any amino acid
  Variant (40)..(40): Xaa in position 40 is Lys or Arg
  Variant (41)..(41): Xaa in position 41 is any amino acid
  Variant (42)..(42): Xaa in position 42 is Leu or Val
  Variant (44)..(44): Xaa in position 44 is Asp or Glu
  Variant (45)..(46): Xaa in position 45 to 46 is any amino acid
  Variant (47)..(47): Xaa in position 47 is Lys or Arg
  Variant (48)..(48): Xaa in position 48 is any amino acid
  Variant (50)..(50): Xaa in position 50 is Gly, Asn or Gln
  Variant (51)..(51): Xaa in position 51 is Asp, Glu or Gln
  Variant (52)..(52): Xaa in position 52 is any amino acid
  Variant (53)..(53): Xaa in position 53 is Ile or Leu
  Variant (54)..(54): Xaa in position 54 is any amino acid
  Variant (55)..(55): Xaa in position 55 is Asp or Lys
  Variant (56)..(57): Xaa in position 56 to 57 is any amino acid
  Variant (58)..(58): Xaa in position 58 is Glu, Pro or Ser
  Variant (59)..(60): Xaa in position 59 to 60 is any amino acid
  Variant (61)..(61): Xaa in position 61 is Ala or Pro
GXHPXELXVYSXLXSXXLXXXYQXINELRESQAXLILXLXXXRXXXXXEXXXXXXXXXXXX

SEQ ID NO: 92339 - DNA, 2142 bp, Saccharomyces cerevisiae
  CDS (1)..(2142)
atggtcactaacaatggagatggtgagcaccttgggatccgaagaaacggaaatttaaggcatccttccaataatatgaaaattcccagaagggctcaatcaacagttctcaattcaaacccattttatagtaggaagtattctatgtctaccttaacgccgagggatatatgtcgaagcgttgattctagagtatttgtggatatgtcttctcccaattttcagactctggaggatccccacagagatgagattataaacagtgtacggcttaactacttgaacagtagcaaaagaagttccgtctctcatggaaatgaagcaatccctagggttaatccgactaagaattcttcagcaagtaccatagctgcagcaaatgttgatagtgatgacgatgagactaacctgagtagcgctggaggcgacataacgcatgatatttacaagttggttaaagcagaggatcctaaacggctcagacgccctcggtccatggaaaatgtaacacctaaaattgagcaccatactaaattgtcatcagcaagtggtttaaatgtccccggtggcttcagaagggaatttattgtcaacaaaaaaaggcaagaacatcaattaaatgattccgctagctcagacttcacttcgcatgaaagcgattcgattaaccagtcatctccatcttctaaccaagatatcgataaggtcccctttttaacaagaaactttttggaatttctatacgtgtttggacattttgctggtgaatccttcgaggatgattttatccctgatagctcaaacatgatgatacgcggagaagatgaaaggagtgcattgctgtctcggcctgaccatatgaaagtattaccttcagccaaaggtacgacttcgacaaagaaggtttttttgatattgcttaaatctttcattggaactggcgttttatttttacctaatgcctttcataatggtggtttgtttttctcagtaagtatgctggccttttttggaatttattcatactggtgttactacatattggtgcaggccaaatcttcatgcggtgtatcctcctttggtgatattggtttaaaactgtatggaccttggatgagaataataattcttttctccctagtaataactcaagttggattctctggagcttatatgatatttactgcaaaaaatttacaagcttttcttgataacgtattccatgtgggcgtcctacctttatcttacctgatggtctttcaaacgatcatttttattccactttcgtttattagaaacatttcgaaattgtcactaccatctttactagcaaattttttcatcatggctggtttagtcattgtcattatttttacagccaaaaggttgttttttgacctgatggggaccccagcaatgggtgtcgtctatggcttaaatgcagaccgttggacgctgtttatcgggacggcaatatttgctttcgaaggaatcgggttaattattcctgttcaagactcaatgagaaatcctgaaaaatttcctttagtacttgctttggtgattctaacggcaaccatacttttcatttccatagctacattgggatatttggcatacggctcaaatgttcaaacggttatactgttgaacttacctcaaagtaacatttttgtaaacttaatccagctgttctattccatcgcaattatgttgtccacacctttgcagttgtttccagctattaaaattattgaaaataagttttttccaaagttcactaaaatatatgtcaagcacgatgatctaacaacaagagtcgaattacgtcctaattcaggaaagctgaactggaaaattaaatggctgaagaactttattcgttctataatcgtaatcattgttgtatcaattgcttactttgggtctgataatttagacaagttcgtttcagttataggatccctcgcctgtattcctttggtatatatatacccatcgatgctgcatttacggggcaatagccttccagagactaaaggggaattttggagattcaaaccaatgttagataccattttaattttcttcggtattgcaagcatgctttatacgtcttaccagagtatattcggtgtctag

SEQ ID NO: 92340 - protein, 713 aa, Saccharomyces cerevisiae
MVTNNGDGEHLGIRRNGNLRHPSNNMKIPRRAQSTVLNSNPFYSRKYSMSTLTPRDICRSVDSRVFVDMSSPNFQTLEDPHRDEIINSVRLNYLNSSKRSSVSHGNEAIPRVNPTKNSSASTIAAANVDSDDDETNLSSAGGDITHDIYKLVKAEDPKRLRRPRSMENVTPKIEHHTKLSSASGLNVPGGFRREFIVNKKRQEHQLNDSASSDFTSHESDSINQSSPSSNQDIDKVPFLTRNFLEFLYVFGHFAGESFEDDFIPDSSNMMIRGEDERSALLSRPDHMKVLPSAKGTTSTKKVFLILLKSFIGTGVLFLPNAFHNGGLFFSVSMLAFFGIYSYWCYYILVQAKSSCGVSSFGDIGLKLYGPWMRIIILFSLVITQVGFSGAYMIFTAKNLQAFLDNVFHVGVLPLSYLMVFQTIIFIPLSFIRNISKLSLPSLLANFFIMAGLVIVIIFTAKRLFFDLMGTPAMGVVYGLNADRWTLFIGTAIFAFEGIGLIIPVQDSMRNPEKFPLVLALVILTATILFISIATLGYLAYGSNVQTVILLNLPQSNIFVNLIQLFYSIAIMLSTPLQLFPAIKIIENKFFPKFTKIYVKHDDLTTRVELRPNSGKLNWKIKWLKNFIRSIIVIIVVSIAYFGSDNLDKFVSVIGSLACIPLVYIYPSMLHLRGNSLPETKGEFWRFKPMLDTILIFFGIASMLYTSYQSIFGV

SEQ ID NO: 92341 - DNA, 2307 bp, Magnaporthe grisea 70-15
  CDS (1)..(2307)
atgtcgcacacaggccgggagtcaccctcccagatgccaccgctgggctcgtcacccgtcggctcctttcgaggcagatcactcagcacctcggttccacgcgccgacgtcaccgctcgacttgcttcgccactaccgtcccagttcggttcgccctcggctgctctcctcgcgtcctcatcgccgagaccccatgcctatcgtcaagcatcggaatccggctcccttactcctcttgcgggcgccagcgccactgcccccggcccgggaattagcgctctcgctgccgcactttccaataccattggtacatcgcctccgcgcttcggcactcccccggtacgatcacaatccccggcggcttcctcggctgccgcgcctatgcttggctcgacaccgcccgccaactatggatcttttgatgcacgggctcgactccttcaatccgacagctcccaacgcgacgacgacgaggcggtggcggagattgtgaggaggcatctggtacagccgaccgacagttcggaaggacccgacgactcttccaagggcaagcaagttgttgacggttcggggccagggcttgatgatgatgaattctcgagtttgaaactacagggaggtgacatcactcggcccatttacaggtggacagaagatgccacgaatcgagagcgcattcagcggagcaagagctttagtatgcctcgccccgaccctgaacatgaagttctcgatataaacaacatcaaagtccctggcgggttccggcgcaacttccttcgtcgggcggctaggagtccctctgcgaaccccagctcgatggagggtggacgtacatcgcaggagcctcccttggtcacttccaacttcctcgaatttctctcgatatatggccactttgccggagaggaactcgaggaggatgacgaggtcctgggtcccggcgagtacttttctagcggagatgacgacgaggatctttacacagccggcgaagggtcagatgatgatcgcgacccgatggaagacagtgcgctgttgacccctggcaggcgtaagcgtaggagaaagcaccgtggcggcagcggcaaggccactccccttaacgcagcgatggtactccttaagtcatttgtgggcactggcgtgctgttcttgcccagggcgtacctgaatggtggcatgattttcagcaacttggtactacttttcgtggctgcccttagctactattgctttgtgctcctggtcaacactcgcctcaaggttgacggttcgtttggcgatatcggcggaattctatatggcaagtggatgaggttgctgatcctgacatccatcgtcatcagtcaggtcgggttcgttgctgcttacattgttttcacgtccgaaaacttgaaggccttcattcttgctgtcactgattgtcggacgtcaattgacgtcggatacctgattctcatgcagatggtcatattcctcccattttctctgttccgagacatcaataagctggcctttactgcgctcattgctgatgcttttatcgtcattggtctggcctacctcttctacttcgacgtacttacacttagcaccaacggattggccgatatcatttacttcaaccagaaagattggacgctgttcatcggcacagctatctttacttttgagggcattggtctgatcatcccgattcaggagtcgatgaaagaccctaaaaagttccccaaggttatggccgtgatcatggtgatcatcaccactctcttcactgtcatgggcgccgtctcatatgctgcctacggctccaagacggagacggttgttttactgaaccttccacaggatgataagatggtcaacgttgtccagttcctatactcgttggccattcttttgtcaacaccgttgcaaatattccccgctatcaggattaccgagaatggtttgttcactcgcagcggcaaatacaacccctacatcaagtggcagaagaacatctatcgattctgcgtggtcgctgggtgtgctgcgctcgcttggggcggtgccgacaaccttgacaaatttgttgctttggttggaaactttgcgtgcatcccgctcgtctacatctacccgcccctcttgcactaccgtgccgtggccaagagcaacctgaagagatggtctgacctgggactctgcgtgttcggcttcgttgccatggcatacacgacaagcctgacggtcatggcttgggcggacagttccagcgagcctaagcctccgtcctactgtgattccaagagacactag

SEQ ID NO: 92342 - protein, 768 aa, Magnaporthe grisea 70-15
MSHTGRESPSQMPPLGSSPVGSFRGRSLSTSVPRADVTARLASPLPSQFGSPSAALLASSSPRPHAYRQASESGSLTPLAGASATAPGPGISALAAALSNTIGTSPPRFGTPPVRSQSPAASSAAAPMLGSTPPANYGSFDARARLLQSDSSQRDDDEAVAEIVRRHLVQPTDSSEGPDDSSKGKQVVDGSGPGLDDDEFSSLKLQGGDITRPIYRWTEDATNRERIQRSKSFSMPRPDPEHEVLDINNIKVPGGFRRNFLRRAARSPSANPSSMEGGRTSQEPPLVTSNFLEFLSIYGHFAGEELEEDDEVLGPGEYFSSGDDDEDLYTAGEGSDDDRDPMEDSALLTPGRRKRRRKHRGGSGKATPLNAAMVLLKSFVGTGVLFLPRAYLNGGMIFSNLVLLFVAALSYYCFVLLVNTRLKVDGSFGDIGGILYGKWMRLLILTSIVISQVGFVAAYIVFTSENLKAFILAVTDCRTSIDVGYLILMQMVIFLPFSLFRDINKLAFTALIADAFIVIGLAYLFYFDVLTLSTNGLADIIYFNQKDWTLFIGTAIFTFEGIGLIIPIQESMKDPKKFPKVMAVIMVIITTLFTVMGAVSYAAYGSKTETVVLLNLPQDDKMVNVVQFLYSLAILLSTPLQIFPAIRITENGLFTRSGKYNPYIKWQKNIYRFCVVAGCAALAWGGADNLDKFVALVGNFACIPLVYIYPPLLHYRAVAKSNLKRWSDLGLCVFGFVAMAYTTSLTVMAWADSSSEPKPPSYCDSKRH

SEQ ID NO: 92343 - DNA, 1800 bp, Gibberella zeae PH-1
  CDS (1)..(1800)
atggccgactttgccaatttcgacggaactcccagtagcttgggcagcgatacgaaccatagaaaggctgctatacttgaaagacatcttccagatggatactcagccgagccggatgttgcctttgggcccgccaacccgtcaggttcagcctctgcttcggccgcaaacgccgacgatgactctcaagcagaaccggtagaatcttcgctccttctacaaggtggtgatatgcatcgcgacatgttcaagatcaaggctcgcgcaagttctctccgccgcgctgccaccttctcccatcatgcagttccccgtttggcgtccgaagacgaactgagccactccgagcagcgtgaaccaggaggcttccgacgatatcacatccagcgacgcgcccggcaaagacgcatgagtggttatacaatcgtggccaagaactttgttgacttcctcgacctgtatgggagctttgcaggcgaagatctcgaggacaacgacagcgaagacgaatctgccattgacgaccgagaggatggcgatgtcgagcagccgcccgagctgagaccactgcttgggcggagacgaagctccaagaggctgcgaaaaacgggcgatgcgacaaccacaaagacattcttcaccctcatcaaagcttttataggaaccggaatcatgttcctgcccaaagcctttcgcaacggtggaattctgttttcttcaatcaccctaattgtactttctttggtcaattgcggatgctttcggctccttcttgactgtcgtcaaatctatggcggtggttacggagaacttggtgaggctatcattggtccccggttcagaagtctggttcttgcttcaattgccatctcccagctcggattcgtctgcgccggtctcatcttcacagcagagaatctctatgcttttcttgacgctgtgaccgccaatcatcgcgaactgatgttcagtgtgcccactttgattgctcttcagttggtcgcccttgttccccttgcactaattcgaaacatctccaagcttggacctgctgcccttctcgctgatgtttttatcctaatcggcattgtctacatctggtattatgatattgccgcactctcccagcatggcatggactcgaccgtgaagctgtttaatcctagggattttaccttgaccatcggctccggtatcttcacatttgaaggtataggacttatcttacccattcaatcaagcatgaaaaggccagaacacttcccaggactcctctatttggtcatgttcatcatcaccatcatttttacatcagttggagcgctctgctacgccacgtttggtgaggataccaagatccaggtcatctccaactttccccaggactctcctctcgtcaatgctgtccagtttctttattctattgcggtccttgcgggagaccctgttcagctgttccctgctgctcgtatcattgagacatccatctttggagagcgggcaactggcaaaaagagtattgctatcaagtggaagaagaatgctctccgaacttttatcgcgggtgtgtgtgttggtgttagtatcctcggcgccagtgatttggacaagtttgtggcattgattggaagctttgcttgcgtccctctggtctacatctaccctgccctgttgcactacaagggagcagcccaaactactagagccaaagttatcgacgtcatcgtcatggttgttggcttcatcgcaatggtgtacactaccctggttactgtgtaccagtggattgacagcgtatga

SEQ ID NO: 92344 - protein, 599 aa, Gibberella zeae PH-1
MADFANFDGTPSSLGSDTNHRKAAILERHLPDGYSAEPDVAFGPANPSGSASASAANADDDSQAEPVESSLLLQGGDMHRDMFKIKARASSLRRAATFSHHAVPRLASEDELSHSEQREPGGFRRYHIQRRARQRRMSGYTIVAKNFVDFLDLYGSFAGEDLEDNDSEDESAIDDREDGDVEQPPELRPLLGRRRSSKRLRKTGDATTTKTFFTLIKAFIGTGIMFLPKAFRNGGILFSSITLIVLSLVNCGCFRLLLDCRQIYGGGYGELGEAIIGPRFRSLVLASIAISQLGFVCAGLIFTAENLYAFLDAVTANHRELMFSVPTLIALQLVALVPLALIRNISKLGPAALLADVFILIGIVYIWYYDIAALSQHGMDSTVKLFNPRDFTLTIGSGIFTFEGIGLILPIQSSMKRPEHFPGLLYLVMFIITIIFTSVGALCYATFGEDTKIQVISNFPQDSPLVNAVQFLYSIAVLAGDPVQLFPAARIIETSIFGERATGKKSIAIKWKKNALRTFIAGVCVGVSILGASDLDKFVALIGSFACVPLVYIYPALLHYKGAAQTTRAKVIDVIVMVVGFIAMVYTTLVTVYQWIDSV

SEQ ID NO: 92345 - DNA, 4260 bp, Gibberella zeae PH-1
  CDS (1)..(4260)
atggcctccccgtcgagaatcccttcggatcaaccccccaggtcctcgtcgccttccagcttccgaccccgatcgatttccgcttcggtacctcgagcagatttgacggcgcgtctggcttctcccattcctagccagtttggaactacgcctcctgtgggaggtactcctcgacctgatgccgcctcgcgttccgataacctcgatgacctgagccagctgcccgggacaggaaccagtatgcaaggccctggccaatctcctccacgacacggcactcctgctgctcgtgttagcactcctcctattcgctcgcaatctcctcttctgggcgctcggaattcggggacgccaacaaattatggctctttcaattcacgctctcagaatgcgctgggtactagtgcgccttatgaggatcctgagattgtgaagcgccacctggttcagccttcagacgagaacccgacttcagaagagtcctcgatccaaggtaacacgaagggcaagcagccagccgatattggtggcgccggcctgaatgaagacgaattctccagtttgcgcttacaaggaggtgatgtcacccgaggcatctacaagtggactgagcaggcagaggcacgggcgaaatacaaccgcagcaagagtttcgatctcggacgacctgagccagaagccgaagtactcgacatcaactcgataaaggtcccgggtggtttccgtcgaaaccatcttcgtcggtctgtccaaagccctggcccccacggccatctcgaggatggccacaactccccagcacctggccagcaaagattgttcacatcgagtttcctcgagttcctttccatctatggacactttgctggtgaagagttggaggaggatgacgaaaacctcggaccaaacgagtacttctcatctggagaagactccgacgaatacaattccgacgacgagcgagagccaatggaagatagtgccttgttgacaccgtcacgacgccgacgtaagcgcaaggttcgtggcggtagtggtaacaacagtcctatgaacgctgctttgctgcttctcaagtcgtttgttggcactggtgttctcttcctgcctcgcgcctacctcaatggaggcatgctctttagcaacctgatcctttttggagtcgctgccctcagttactactgtttcgtgcttctcgtcaagacacaactcaagattggcggttcttttggtgacttgggcggtgcactgtacggcaagaaaatgcgtacactcatcctaagctccattgtcatcagtcaaattggattcgtagcggcttatactgtctttacggctgccaacttgcaagcttttgtgcgggctgtttccgattgcaaatcttccatcagcatccagtggctcatcctcatccaaatgatcatcttcctgccttttgctcttttgcgagacattggaaagctggcgtttactgctctggtcgcagacgccttcattctgattggtttggcttatcttctgtactacgatatcttgaccctcaaccaaaacggtattgccgacatcatcatgttcaacaagaaggactggactctgtttatcggaaccgccatcttcactttcgaaggaatcggtctcatcattcctgtccaggagtcaatgagacatccggaaaagttccctcgcgttcttctcattgtcatgatcatcatcacagttctcttcatcggcatgggtgccatctcatatgccgcatatggatctcacactgagactgtcgtactgctcaacttgcctcaggacaacaagatggtcaacggcgttcagttcttgtactctgttgccattcttctgtctacaccactgcaaatcttccctgctatccgtattgccgagacagagcttttcactcgcagtggcaagtacaacccttgggtcaagtggcagaagaacgtgttccgtttctttgttgtgatgctgtgcgcatccattgcttggcttggagccgaccatctggacaagttcgttgcgcttgttggtaactttgcctgtatccctcttgtctttatctatcctcctatgcttcactacaaggccattgcccgtacgaagttttggagagtggccgatatcgcgctttgcatctttggattcgttgcgatggcatatgcaacaactctcactgcgatgagctgggccaccgctgatcctaagcatccgggatactgcgaccagaaggtacatggtgtggagtatggcccgagagggccaagagattgtacgcagcatttggaatggcaaacacgacctccgcctccgccgccattcaacactgttccaacatgtccagagccaacatgtggctgtgctgagcctcccaaaatgcctgatgatctgcctcttgatcgtgaggggcctctcaaaggtgcaattgctgggtatgccgaacatgtgctcccgtttcataatgtttctgttctcaactcttcgtttcctagctctacatcaccacgtcctcaactccagacaacgtctgcttatctactacccagcttcaaatacattccgttcctcccacgggtgtcgtttgacagtgtagaagctctagtcaagggttttttactccctgagaagctccaccgcatgcatgacggtctgtcgcctatacatcgagaccgtttgacccgcaaagagggttatcagggacttcttcctggagttcaagatgtccgcgatattttggtgctgatttgtggacacactggacgtgatgcgcgatgcggcatcatggcgcctatcctagcgactgagtttgaggagaagttggagaaagagggatttgatgttcagcatgggcctgtgcagattaatcttaatgaaatgcagagaatacagggcgaagctggtgaggaaaagacgtcggccaggattggtatgatcagccatattggagggcacaagtttgcaggcaatgttatcatctatctacctcctgacctaaagatgggcagcgagccgcatccattggccggacatgggatatgtcagctatctgcttcaaaagccagaactctcaaaacatcaccaaacccatccatcacaccaacccaacgatacgcctctcacaaaccgaactttcccgctcctcttcaagcacgaatattcccttcattaatattagtcggaatagttctcgttagcggcggctgttacctcctcacgccaccctctcgaccaaacaccctcaatgacataacattcgtcccctacgccatcacagcccgcgaggccatctcaccaacctcattcgtcataacggccgtgccacggacaccaaatccttccttaccttatctcaatccttcggatagtcaatggaagaaccctctctggtctgttgagttcaagcagcccgaggtgcagatctcgcggcactatacgcctctcccgccgctatccagcgaggatccaacagatggtacgctgcgcttttatatccgcgctgttggcgatggagaaatgtcgaattatctaggccggagacgggttggcgatgatgtcttcctgcgcggccctcacgtgggttttgagcttgctgagcggttgggagagcactctcgccttgtctttcttgctggtggaacgggtgttgttcctggcattcaggctgcaaaggccgtgttagaagcgaatgagaagtcaagtgttgacttgctctgggccgtgaggaagcgagaggaagtacaaaacagtgcttttccaagttcatcatcatggaagttctggcagggaaaaaggccaacagcattgggtctcgaggttgagagtcccagtcctgtgaccaagcgtctacaagatcttaagaagacgtatggcgatcgtctgagaatacaagtcgttgttgacgaggagggaacacgcttccaagataaggacatcaacagtactattacggcttctcctggaactgtagcttccttcaacgcgggctgtcgattccacgaccaggcgatgcatgtccacgcctctgaattcgcactatcggagggacctggctgtgtctgcgaaccgcctgcgggaaccacgcccggaaagaacttattcatcgtctctggtccagatggcttcatcgagcattatgctggacccaagatttggctaggcggacaccaaacacaaggaccaatcgcgggagtagctgggcacttgcaaaggcaaaaccctgctttggcaagggactggttagtcctcaagatgtaa

SEQ ID NO: 92346 - protein, 1419 aa, Gibberella zeae PH-1
MASPSRIPSDQPPRSSSPSSFRPRSISASVPRADLTARLASPIPSQFGTTPPVGGTPRPDAASRSDNLDDLSQLPGTGTSMQGPGQSPPRHGTPAARVSTPPIRSQSPLLGARNSGTPTNYGSFNSRSQNALGTSAPYEDPEIVKRHLVQPSDENPTSEESSIQGNTKGKQPADIGGAGLNEDEFSSLRLQGGDVTRGIYKWTEQAEARAKYNRSKSFDLGRPEPEAEVLDINSIKVPGGFRRNHLRRSVQSPGPHGHLEDGHNSPAPGQQRLFTSSFLEFLSIYGHFAGEELEEDDENLGPNEYFSSGEDSDEYNSDDEREPMEDSALLTPSRRRRKRKVRGGSGNNSPMNAALLLLKSFVGTGVLFLPRAYLNGGMLFSNLILFGVAALSYYCFVLLVKTQLKIGGSFGDLGGALYGKKMRTLILSSIVISQIGFVAAYTVFTAANLQAFVRAVSDCKSSISIQWLILIQMIIFLPFALLRDIGKLAFTALVADAFILIGLAYLLYYDILTLNQNGIADIIMFNKKDWTLFIGTAIFTFEGIGLIIPVQESMRHPEKFPRVLLIVMIIITVLFIGMGAISYAAYGSHTETVVLLNLPQDNKMVNGVQFLYSVAILLSTPLQIFPAIRIAETELFTRSGKYNPWVKWQKNVFRFFVVMLCASIAWLGADHLDKFVALVGNFACIPLVFIYPPMLHYKAIARTKFWRVADIALCIFGFVAMAYATTLTAMSWATADPKHPGYCDQKVHGVEYGPRGPRDCTQHLEWQTRPPPPPPFNTVPTCPEPTCGCAEPPKMPDDLPLDREGPLKGAIAGYAEHVLPFHNVSVLNSSFPSSTSPRPQLQTTSAYLLPSFKYIPFLPRVSFDSVEALVKGFLLPEKLHRMHDGLSPIHRDRLTRKEGYQGLLPGVQDVRDILVLICGHTGRDARCGIMAPILATEFEEKLEKEGFDVQHGPVQINLNEMQRIQGEAGEEKTSARIGMISHIGGHKFAGNVIIYLPPDLKMGSEPHPLAGHGICQLSASKARTLKTSPNPSITPTQRYASHKPNFPAPLQARIFPSLILVGIVLVSGGCYLLTPPSRPNTLNDITFVPYAITAREAISPTSFVITAVPRTPNPSLPYLNPSDSQWKNPLWSVEFKQPEVQISRHYTPLPPLSSEDPTDGTLRFYIRAVGDGEMSNYLGRRRVGDDVFLRGPHVGFELAERLGEHSRLVFLAGGTGVVPGIQAAKAVLEANEKSSVDLLWAVRKREEVQNSAFPSSSSWKFWQGKRPTALGLEVESPSPVTKRLQDLKKTYGDRLRIQVVVDEEGTRFQDKDINSTITASPGTVASFNAGCRFHDQAMHVHASEFALSEGPGCVCEPPAGTTPGKNLFIVSGPDGFIEHYAGPKIWLGGHQTQGPIAGVAGHLQRQNPALARDWLVLKM

SEQ ID NO: 92347 - DNA, 2046 bp, Candida glabrata CBS 138
  CDS (1)..(2046)
atgacaagttcaaacgaatgtgggtctaatagtcctactagaactgctgatataaataagagaataataaggaagcactcagggagtcagaaaaagtcacctagcatagaagcatctttctcgagagatgattttgctagccggagatcgagtactactgctgcccttttgaaagatccctcagaaaactatggtaccaagggtataccacctgtaagcatagacattgacataagaaatcctgcaccaaaagttattgatgctgtgactaggcacttatcaagcactccgaatcatttacaaatgcaaggtgctgatatgactagagatctttacaaatgggccaaagagcacccgtcttctcctccaccagcttcttcggaaaacatgctagcttccagtggaaaccagtttacaaatatttcaactccaaatgagtttaccaaccccaatgcattcaaaagaaagagatcgatgagtttttctgctgtatctgctcattcctccgccatgaacagtatatctaattataatacgaataacgatttccgtcaagtacgaaatgaactgcctgaaataatgatgtcccatgaagatattagagcgccaggaggatttagaaggtcgtacttgatccaaaaacatatagaggagaacggagaggaaccaccaaataattttatcactagaaattttattgagtttctaactctttatggccactttgcaggcgaagatttatcagaatctgaagaggaaagcgacattgaaggtgaatatgatgaagaagctcttgaaacagaatccacacgccttctatctactcacagatcgcgaaaacatcgtccagctgttcatggtcataaatcatcaactaccaaagcggtgcttcttttattgaaatcctttgtcggcactggtgttcttttccttcctcgtgctttccataatggaggttgggggtttagttcatccgtattgttaatatgtgcattaatatcgtactggtgctttgtccttctgatagacacgaaaaatcacgttggtttggatggttatggtgatatgggtaaccacctttatggttcatcaatgaaattagcgatcttatggtcaattgctctttctcagatagggttttcatcagcctatactgtcttcactgctaccaacttacaagtattcacgaacaatgtgttcaagcaagaatatggaataactatctttatcataatccaggtattgttttttttgccattggcgcttacaagaaatattgccaaattaagtggcactgccttgattgcagatcttttcattttgctaggattagtttatgtgtattggttttcgattagtcatgtttcaacccatggtgttgcttctgaaacaatgctaatgtttaataaggctgattggtctttgttcatcggaactgctatttttactttcgaaggtattggactattaataccgatacaagaatcaatgaagaagcctgaacattttcatgcttcactttcaggtgtcatgtgcgttgtaactgttgtttttatctcatgtgggcttatctgctactgtgcttttggtgcggatgtagaaactgtcgtgctactaaattttccacaggaaagtatctatacaagagccgtacaactattatatgcactagcgatattgttatcaactcccctccaattattcccagcaataaagatattagagaactggacattttctcctcattcatcaggaaagcacaatcctaaggtaaagtggttgaaaaattactttagagcagcaattgtctgtttctctgcccttattgcttgggctggcgctaatgatcttgataagtttgtttcattggtaggttcatttgcatgtatccctcttatttacatatatccaccaatgttacatttcaaagcttttaagaaggataaatcgaagttgtttatggcctcagatatttttctcctttttttcggtattatagtaatgatctacacatctcttcaaaccattggaatgtggctcaattaa

SEQ ID NO: 92348 - protein, 681 aa, Candida glabrata CBS 138
MTSSNECGSNSPTRTADINKRIIRKHSGSQKKSPSIEASFSRDDFASRRSSTTAALLKDPSENYGTKGIPPVSIDIDIRNPAPKVIDAVTRHLSSTPNHLQMQGADMTRDLYKWAKEHPSSPPPASSENMLASSGNQFTNISTPNEFTNPNAFKRKRSMSFSAVSAHSSAMNSISNYNTNNDFRQVRNELPEIMMSHEDIRAPGGFRRSYLIQKHIEENGEEPPNNFITRNFIEFLTLYGHFAGEDLSESEEESDIEGEYDEEALETESTRLLSTHRSRKHRPAVHGHKSSTTKAVLLLLKSFVGTGVLFLPRAFHNGGWGFSSSVLLICALISYWCFVLLIDTKNHVGLDGYGDMGNHLYGSSMKLAILWSIALSQIGFSSAYTVFTATNLQVFTNNVFKQEYGITIFIIIQVLFFLPLALTRNIAKLSGTALIADLFILLGLVYVYWFSISHVSTHGVASETMLMFNKADWSLFIGTAIFTFEGIGLLIPIQESMKKPEHFHASLSGVMCVVTVVFISCGLICYCAFGADVETVVLLNFPQESIYTRAVQLLYALAILLSTPLQLFPAIKILENWTFSPHSSGKHNPKVKWLKNYFRAAIVCFSALIAWAGANDLDKFVSLVGSFACIPLIYIYPPMLHFKAFKKDKSKLFMASDIFLLFFGIIVMIYTSLQTIGMWLN

SEQ ID NO: 92349 - DNA, 2202 bp, Candida glabrata CBS 138
  CDS (1)..(2202)
atgggctcaagtgaagaacacaagggcttattacatcccgaatacacgacggtggggcctagggagataaggcagtcccaaagacgcgataatgattctacgagcaactattctgggtcctttaggcgtgggtcgatgtctatggcgctgacaccaacggcagccaagaatatcaacatacccgtgtcgtcgtccatggataacaggcatgtcatggttgatattggctcgccagatttcaagactttgcatccacagaaggaaaaacagattgtgaactcgttgagaaagaactatctgaacacttacatgaccggtagcattagcagcagttacactgagaggagaagaccatcgtcggtgagccaagcggggaggcttggaaacgtgaacactggcccatcagtaagacccaaggatgacagcgaactcaggactggaacgccagatttgagctacgatccaaatctcagtactgcgggtggtgatattacgagagatatctataaggtagcaaccaaggctatgccgacgcccgtaaaacgcatgcaatcgacagatgatgtaatgtcagtggcatcaagtcaacggagacagtctactgcaagctcgttaaatgtccctggtgggtttagaagagagtttattgtgactaagaagaggaaagaaaaactattaaataagagcaacgataatgtagattcatcaaccacacccaataactcttctccatccattaatgaagcgcttacagatgacgaagaagatgataaaatgccttttttgaccaaaaactttcttgagtttctatacatgtatgggcattttgctggtgagtcatttgaagatgatttttactctgttgatggcatgccatatgcattagatgagagctcacatttgctttcacagactacgaaagcaaaaggacctcccaagggtactacatcgacaaggaaagtattctttttactactaaaatcttttattggcactggtgttttgtttctacctaatgctttcaacaatggaggtctttttttctcaatattcatgcttgcctttttcggtttgtactcctacttgtgctattatcttctaatttcatctaaaattgctgcccaagtcagatcatttggtgggattggattaaagttatatggtcccactatgaaatatttaatcctattttctttggtcataacacagcttggattctcaagtgtttatgttatttttacagccagaaatttaaaggccattggtgaacatgtcttcaaattgcctaatgtgtcgattacatttttgatgataagtcagttactgctttttattccattatcatttgttagaaaaatatcaaaattatcgttaccttccctatttgccaatgtttttatattagttggccttgtaattgttgtctttttctccatgaaacatttattttatgatctttctggtagtcctgctgatggtgtcatctttggaattaacaatagcagatggacacttttcattggtactgccatcttctcatttgaaggtatagggctagtcattcctgttcaagattctatgagaaagcccgaaaagtttccactagttttaggactggtgataatttgtactactgtcgtttttataattgtggctacaattggctatttagcttatggttctgaggttgataccgtaattctactaaatttaccacagaaaaatattcttgttagtctcatccaattactatattcgatagctatcatgctttcgacgcctctacaaatgttcccagctattagaattattgaaagtgggttattcaaacaatatgacagatgggtaaatagatcagatcgagagggacatgctactgaacacaacacgagctcgggtaagtcatcatggaaagtcaaatggatgaagaacgctgtgcgttcttcaattgtaatactggttgttgcaattgcttgtgtgggtgctgataatttggacaagtttttatctataatcggttcgtttgcatgtataccgctagtatacatgtatcctcctatgctccatttgaaaagtactagcttaccaagatcaaatggtaaaatcatgtcacggagggtaattatagatatcgtactcataatattcggtggtattagcatggtttacacttcctaccagagcatatttgtcaccgattaa

SEQ ID NO: 92350 - protein, 733 aa, Candida glabrata CBS 138
MGSSEEHKGLLHPEYTTVGPREIRQSQRRDNDSTSNYSGSFRRGSMSMALTPTAAKNINIPVSSSMDNRHVMVDIGSPDFKTLHPQKEKQIVNSLRKNYLNTYMTGSISSSYTERRRPSSVSQAGRLGNVNTGPSVRPKDDSELRTGTPDLSYDPNLSTAGGDITRDIYKVATKAMPTPVKRMQSTDDVMSVASSQRRQSTASSLNVPGGFRREFIVTKKRKEKLLNKSNDNVDSSTTPNNSSPSINEALTDDEEDDKMPFLTKNFLEFLYMYGHFAGESFEDDFYSVDGMPYALDESSHLLSQTTKAKGPPKGTTSTRKVFFLLLKSFIGTGVLFLPNAFNNGGLFFSIFMLAFFGLYSYLCYYLLISSKIAAQVRSFGGIGLKLYGPTMKYLILFSLVITQLGFSSVYVIFTARNLKAIGEHVFKLPNVSITFLMISQLLLFIPLSFVRKISKLSLPSLFANVFILVGLVIVVFFSMKHLFYDLSGSPADGVIFGINNSRWTLFIGTAIFSFEGIGLVIPVQDSMRKPEKFPLVLGLVIICTTVVFIIVATIGYLAYGSEVDTVILLNLPQKNILVSLIQLLYSIAIMLSTPLQMFPAIRIIESGLFKQYDRWVNRSDREGHATEHNTSSGKSSWKVKWMKNAVRSSIVILVVAIACVGADNLDKFLSIIGSFACIPLVYMYPPMLHLKSTSLPRSNGKIMSRRVIIDIVLIIFGGISMVYTSYQSIFVTD

SEQ ID NO: 92351 - DNA, 2166 bp, Kluyveromyces lactis NRRL Y-1140
  CDS (1)..(2166)
atggcaggtgaattagatgctgatagtaatagtagagcgtcaggtatcaccatccccgctaacggtcagagacgaagacaatcaataatgatgctgtcagaaagtgtgaaaagtcggaggtctttgaagagtcattcgagggtgatacctgctgctgccacaccacctctgggaaagagtattgaatctaatgcattgattgatgtcggatcacccagtttcaaatctccaaatttggagcatgaagctgaaataattcaatctttgaaacagaattatttgagagataacattaacaagtcaagctcattctcacaactaagcaaaaaatcacattcatcaaccttacaagacagcgatgctccgagtgagactgcaataagcattccagagcatgactctaatcttaatacagaaggcggtgatatattaagagatttgtataagttatcttcaaatcttgacaataatgtgaaaaaaaatagaaacaaatcagcagacgatttgtcaatatctggcgctcataggcggaaaggatccactgcaagtgcgttaaatgtaccaggtgggttcagaagagaatatatagtgcaaaaaatacggaatgagttgcctcggcaaaattgcactacagactctgaatcacatcacaccactccatcctatggttcagtaacatcatctaacttagaagatcaaaccaatgttgcagataaggtaccattcctaacaaggaactttttggaattcttatatgtttatgggcattttgcaggtgaaactttcaacgatgatttcgcagtagatgaagatgatgaatttaatgaatctgaagtgcctctcctgaatgccagcgacagagagcgcctaggtcataataagcgagtgattgcaagaccgtctcaagtgaaaacttctactttcaaggcctttttgttgatgctcaaatcgttcattggtacaggtgttctatttttaccaagcgcctttgctaatggtgggttgatattttcagttttaatgctttcattttttggtatgtactcatactggtgttactacattcttatcagatctaaagttgcaactggtgtttcctcattcggtgatatagggatcaaactatatggtccgtggatgagatatgctattctagcttctttaattttaacacagttgggcttttctgccgcatatgttgtgttcacatgtaagaatttgttggcatttttccagaatgttttccatcttcattctttgcgtattgaacatctattaattctacaaacaatcatattcattccgttagcgtttatcagaaatgtttctaaactttccttgacatcattgttggccaattttttcactatggcaggcctaattataattgtcttcttcgttgtaaaacatttggttattgatttggacttaaaacctgaagctggaattatttatgggttcaactcatcaaaatggtctttgttcattggtactgcgatttttgcattcgagggtattggtctaatcattcctgtccaagattcaatgaggaaaccagagaagttccctcttgtgttgggtctggtcatcttaactgcaactgtgttgttcatttctattgcagcattgggttatctagcattcggaaggtatattgaaacagtgattttactgaacttgcctcaagacaatattttcgtgaatttggtgcaatttttctattctcttgcgatcttgttatccactccattgcagctattcccagccattgggataatcgaaagtaagctcgttccaaaattcaggaaaacagtttctcctactaataagaacgacgtccaattgagcccaaactctggaaagctagactggaaagttaaatggacaaagaactttttgagatccatcattgtgatttttgttatttgtcttgcttacttcggtagcagtaagttggatgtgtttgtctcctttatcggatgtttcgcgtgcataccattagtatacatgtatcctccactgcttcacttgaagagttgcagtcaaccagcatataagcaaaaccaaacattgaaaaacagacttatgataactatggattatggtcttgttatctttggtggagtaagcatgttgtacacttcctatcaatgtattatgggctag

SEQ ID NO: 92352 - protein, 721 aa, Kluyveromyces lactis NRRL Y-1140
MAGELDADSNSRASGITIPANGQRRRQSIMMLSESVKSRRSLKSHSRVIPAAATPPLGKSIESNALIDVGSPSFKSPNLEHEAEIIQSLKQNYLRDNINKSSSFSQLSKKSHSSTLQDSDAPSETAISIPEHDSNLNTEGGDILRDLYKLSSNLDNNVKKNRNKSADDLSISGAHRRKGSTASALNVPGGFRREYIVQKIRNELPRQNCTTDSESHHTTPSYGSVTSSNLEDQTNVADKVPFLTRNFLEFLYVYGHFAGETFNDDFAVDEDDEFNESEVPLLNASDRERLGHNKRVIARPSQVKTSTFKAFLLMLKSFIGTGVLFLPSAFANGGLIFSVLMLSFFGMYSYWCYYILIRSKVATGVSSFGDIGIKLYGPWMRYAILASLILTQLGFSAAYVVFTCKNLLAFFQNVFHLHSLRIEHLLILQTIIFIPLAFIRNVSKLSLTSLLANFFTMAGLIIIVFFVVKHLVIDLDLKPEAGIIYGFNSSKWSLFIGTAIFAFEGIGLIIPVQDSMRKPEKFPLVLGLVILTATVLFISIAALGYLAFGRYIETVILLNLPQDNIFVNLVQFFYSLAILLSTPLQLFPAIGIIESKLVPKFRKTVSPTNKNDVQLSPNSGKLDWKVKWTKNFLRSIIVIFVICLAYFGSSKLDVFVSFIGCFACIPLVYMYPPLLHLKSCSQPAYKQNQTLKNRLMITMDYGLVIFGGVSMLYTSYQCIMG

SEQ ID NO: 92353 - DNA, 1869 bp, Debaryomyces hansenii CBS767
  CDS (1)..(1869)
atgagcaaaaaaggaagtatcgagtcatcgaatacacagacaatggatgctacagagccaggaacattaacacacagtgcgtccgaaaattcgtatcattcgaactcttcaaacgatagaagttatcaggagcaaatctcgaatatcaattcccagaatgctaatttgaaaaccataaataagcatttagtgaaccaagaagacactttaaaattacaaggaggagatgtagctcgacatctatacctgcagctagaaaatgttagcagcaaggagttgacgaacctgaagaggagaacgagatcatcttcgttttcgaacttcttaagtcagtctagaagacaatccaccgccagtgacataaatattccagggggattcagaagagagtttttgataaacaagtcgttgcaggaaaatacggagccccccaatttcttgactcgaaattttgttgagtttttgagcatatatggtcgttttgcgggggagaattttgatgatgatgataatgaagaacaatacgaggaaacgtttgatgaagagtctttattactacccaatgaacgtaggactcctcctactcgtagacctagaccagaaaagaagggtgcagccaatgttcccaaaacgtttttcttagtttttaaggcgttagtgggttcgggcatattgtttttacctaaagctttctctaatggaggtcttttgttttctgctataatgttgttatgctttggtatattgacatttctttgttatattattttaattcgttctaaaagaatattaaacaaatcgtcattcggtgaattagggtttaagactcatggaaaaccattaagaatttgtattctaatatctatattgatttcccaaataggatttgtggctacatatatcttatttacagcagaaaatttgatttcttttatcgaaaactacttacacttttctgccaactatgtgagtacacggaatattgtcatagtccaatgtattttattaatacctttggtactcattaggaatctagccaagttatctataatttctttgatatcgtcggtttttattgttattgggttaataattatattctatttttcaattatgaagatttctgttgaaggtgtgggtgataatatagtctattttaattctagtaactggtcaatgttaatcggggttgccgttacttcatttgaaggtattggattgattttaccgattgaatcttcgatggctcaaccagagaaattccctatggttttatcgatcagtatgtgcgttataacgacattattcatgtcaattggtgttcttggatattcgacttttggtgatcaagtaaagtcaatcattattttgaatttaccacagggtaagttatcagtccaattcatatcattactttactcgttagcggtattcttaacagctcccctccagttgtttccagtaactaagattttagaatccttaattttcaattcgtacttattcaatgataatactacaactgcccgtaagaaggatgatgaaggtaaattatatcacttttcaggcaaatatagtacgtcaattaagtggtccaagaatttaattagagcaatattaattagctcgatatgcataattgcatatttgaatgcaaatgatattgataaattcatttccttcaacgggtgttttgcatgtattccactcgtatatatctacccacccttaattcatttgaaaacttataaatttgatagacaaaatgattggaaaggtaaattttttaaaatatttgattatattttaataattgttgggatagttgcagtaatttatacaacttatcaaattttattcttaatttag

SEQ ID NO: 92354 - protein, 622 aa, Debaryomyces hansenii CBS767
MSKKGSIESSNTQTMDATEPGTLTHSASENSYHSNSSNDRSYQEQISNINSQNANLKTINKHLVNQEDTLKLQGGDVARHLYLQLENVSSKELTNLKRRTRSSSFSNFLSQSRRQSTASDINIPGGFRREFLINKSLQENTEPPNFLTRNFVEFLSIYGRFAGENFDDDDNEEQYEETFDEESLLLPNERRTPPTRRPRPEKKGAANVPKTFFLVFKALVGSGILFLPKAFSNGGLLFSAIMLLCFGILTFLCYIILIRSKRILNKSSFGELGFKTHGKPLRICILISILISQIGFVATYILFTAENLISFIENYLHFSANYVSTRNIVIVQCILLIPLVLIRNLAKLSIISLISSVFIVIGLIIIFYFSIMKISVEGVGDNIVYFNSSNWSMLIGVAVTSFEGIGLILPIESSMAQPEKFPMVLSISMCVITTLFMSIGVLGYSTFGDQVKSIIILNLPQGKLSVQFISLLYSLAVFLTAPLQLFPVTKILESLIFNSYLFNDNTTTARKKDDEGKLYHFSGKYSTSIKWSKNLIRAILISSICIIAYLNANDIDKFISFNGCFACIPLVYIYPPLIHLKTYKFDRQNDWKGKFFKIFDYILIIVGIVAVIYTTYQILFLI

SEQ ID NO: 92355 - DNA, 1989 bp, Debaryomyces hansenii CBS767
  CDS (1)..(1989)
atgtcggggcctagaaaaattcaagaactgacaggctcatcatctaggcgactctcaatagctaaactagctagatcacctatttcggaatcaccaattacttcgccgtcaattagaaatggaatacactctcattcgtttactgctaattctccgtttttgaaagaagattcttcaagaaattataatgaatgtatagaatcttcatcgtctaagtcatcgagtaaatataatggtagtgaagtgttccatagtggaaatgaggttgctgatattccaaccctgaatggagtggaaacagatttctctacagggatggatgatcctaagattatgaagcaagtccataagcatttaagagatcaagaagtgaatgcgttgcaaatggagggaggtgatattactagagatttatataaaatagcggatcaggaatataggcccaaagctccaaaacgttctcgtagtttgtcatcatccgaaatggaaacccgaagaagagggtcgactgctagctcgcttaatgttcctggtggttttagaagacaatttattatgaacaatacccttagaaccaggaatccaaattttttaaccaaaaatttcgttgaattcttgagtatttatggacattttgcgggtgaagatttagaggatcaaaatgatttaatagcatgtcattataaggcacatatacccaattttgatgacagtattgatgaagaatcattattgttgcctaatcaagaatctgtaaagattaatgcaaagggtactgctactgataagaaggcttatttcctattattgaaggcattcattggcactggtgtgttatttttacctaaagcattttcaaacggtggtttaatgttctcatcacttgttttagcgttctttggattattatccttttggtgttatttgattttgattcacgctaaattagccactaaagtatcaagttttggtgatattgggctaaaattgtatggcaaatggttgcagcaattgattttaacttcaattatcatctctcagattggatttgttgctgcttatattgttttcacttcagagaatttaaaagcttttgttggaagtgtgactagtattaacactagcgatatccatatcatgtactttattttaattcaattgatcatttttttgccgctttcgttgattagagatataactaaattatcattactggcattgttggcaaacatatttattcttattggattggtgactatattgtactacagcttttatgagctattgtttttaaaccacggggcatttggtaaggacattgaattctttttcaataaagaaagcttttctttattcataggtgtctctatatttgcgtttgaaggtataggcttaattattcccattcaagaatcaatgatctacccgaataactttccaagggtattgtttctggtgattgcaactatctcgacaatcttcattgggattggttctttgggttatctcacctttggtaagtatgtgaagacagtgatcatattaaatttaccgcaagattctccattcgttattatggttcaattgttatatgcatttgctattttactttcgacgccattgcaattgttcccagcaatcagattagtagaactgaaattgttcacaaaaactgggaaatattcattaagagtaaaatggctaaagaatttctttagatttggttttgtcttactcacagctgtagtggctttggtgggtggtcaaaacttagatagatttgtttcttttgtaggatgttttgcatgtatcccacttgtttatatgtacccccctattttacatttgaagagttgttgcaaatacagcgatacttttaatcaagctgaaaatagaaagaggttttggttggggtgcttggattgtattctagttgtgattggtggtgttgcaatgatatatactacatatcagattgtggtaggttga

SEQ ID NO: 92356 - protein, 662 aa, Debaryomyces hansenii CBS767
MSGPRKIQELTGSSSRRLSIAKLARSPISESPITSPSIRNGIHSHSFTANSPFLKEDSSRNYNECIESSSSKSSSKYNGSEVFHSGNEVADIPTLNGVETDFSTGMDDPKIMKQVHKHLRDQEVNALQMEGGDITRDLYKIADQEYRPKAPKRSRSLSSSEMETRRRGSTASSLNVPGGFRRQFIMNNTLRTRNPNFLTKNFVEFLSIYGHFAGEDLEDQNDLIACHYKAHIPNFDDSIDEESLLLPNQESVKINAKGTATDKKAYFLLLKAFIGTGVLFLPKAFSNGGLMFSSLVLAFFGLLSFWCYLILIHAKLATKVSSFGDIGLKLYGKWLQQLILTSIIISQIGFVAAYIVFTSENLKAFVGSVTSINTSDIHIMYFILIQLIIFLPLSLIRDITKLSLLALLANIFILIGLVTILYYSFYELLFLNHGAFGKDIEFFFNKESFSLFIGVSIFAFEGIGLIIPIQESMIYPNNFPRVLFLVIATISTIFIGIGSLGYLTFGKYVKTVIILNLPQDSPFVIMVQLLYAFAILLSTPLQLFPAIRLVELKLFTKTGKYSLRVKWLKNFFRFGFVLLTAVVALVGGQNLDRFVSFVGCFACIPLVYMYPPILHLKSCCKYSDTFNQAENRKRFWLGCLDCILVVIGGVAMIYTTYQIVVG

SEQ ID NO: 92357 - DNA, 2217 bp, Yarrowia lipolytica CLIB122
  CDS (1)..(2217)
atgtcatatcccgatcgaagagcttcgttcggctcgtcaccgcggcagtctgccatccagcggctcggaacccccgtccaggtcggttcgcccaactccaacccaggctcggtgacgggctccttcaaggactcgatgcgagagtccatgaagcggttcgaggagcaggccgacgccaacaaaaacgtggaggaggtgactttcaacaagcgaacgcccgaggagcagcacaagaacggcagcgactcttccaagggaggtctcaagggcctcatggacaagggcaaggaaaaggacgatgccagcaacaagacagactcaaatacgaacacaaccaccaagaccaccccgtctaacagcagcaaaaacaacagcaacaccaaaaccaataacaacagcaacagcaattcgtccaacgacaccaaaaaggatcaatctgcttctcctgcaaacccccccaaccccgcagacgcagacacccagtcgatccactctgtggacattgacaaccccaatcccgaggtggtcaaggctgtcggccgacatctcgtgtctgacgacaagaccagaaactacggagccacggaaagcgaaaatttcgactccctcaaactgcagggaggagacatcacccgccagctgtacaagtggcagaaggagcacgaggagggcggactcaagcgatccaagtcgttcgatgccggcgagggagcctcctcctctgcgacccaggaactcggacaggatatcaactctatcaaggcccccggaggattccgacgaaacttcattgctcaaaaggtgcagcaagaaaacggccaggacaaaccccccaccttcctcactcggaacttcattgagttcctgtctatctacggtcattttgccggcgaggagctcgaggaggacgacgatgacgacgatgatgatgactacgacggagacgatgaggttgacgagaacgactacgacgaagaaacccctctgcgtcgaagagcccgaaagcagcgaggtgccaagcccggccatcctccccagggtaatgcatctgctaccaaggctgtcatgttgctgctcaagtcctttgtgggaaccggtgtgctcttcctgcccaaggccttcttcaacggaggtcttctcttctcagcctgcgtgctcaccatggtggctgctctctcttactggtgtttcctgctgctgatccaatgccgaatgaagactggcgtgtcgtcctttggtgacattggtggcgccctctacggccccaagatgcggtctctgattctcttctccattgttatttcccagattggttttgctgccgcctacattgtgtttacgtccgaaaacttgcaggccttcattctatctgtgaccaagggagagacctttgtcaagatcgagactctcattttcctgcagctcattattttcctgcctctgtccatgattcgagacattgccaagctgtccggaactgctctgatagctgatctcttcattctgctgggtctcgtgtacctgtactactggtctggaatgattgttgccacagagggtgtcgctgatgtcaagatgttcaaccccaactcctggtcgctgttcctcggtaccgctatcttcacctttgaaggaattggtctgattatccccatccaggagtctatgaagaagcccgagcagttcacccccgtccttgctggagtgatggttggcatcactgccctgtttgtgtccatgggagctatctgttacatggcctttggctctgaggttaagactgtcgtcatttccaacctgccccaggactccaagtttgtcaatggtgtgcagattctgtactctgctgccattctgctgtccactcctctgcagctcttccctgccatccgaatcatcgagaatggtctcttcacccgatcaggcaagtacaactctaccatcaagtggcagaagaacattttccggttcttccttgtgtttgtcaccgcctttgttgcatggggaggtgccgacgatctcgatcggttcgtcgctctcaccggatcgtttgcatgtgtgcctctggtgtacatttaccctcctcttttgcattacaagggtgttgctcgaggcaccacggctcgaaccgccgatgtctgtattttcatctttggtctgtgtgccatgggctacaccactgccaacacagttggttcttggattggcggaaactag

SEQ ID NO: 92358 - protein, 738 aa, Yarrowia lipolytica CLIB122
MSYPDRRASFGSSPRQSAIQRLGTPVQVGSPNSNPGSVTGSFKDSMRESMKRFEEQADANKNVEEVTFNKRTPEEQHKNGSDSSKGGLKGLMDKGKEKDDASNKTDSNTNTTTKTTPSNSSKNNSNTKTNNNSNSNSSNDTKKDQSASPANPPNPADADTQSIHSVDIDNPNPEVVKAVGRHLVSDDKTRNYGATESENFDSLKLQGGDITRQLYKWQKEHEEGGLKRSKSFDAGEGASSSATQELGQDINSIKAPGGFRRNFIAQKVQQENGQDKPPTFLTRNFIEFLSIYGHFAGEELEEDDDDDDDDDYDGDDEVDENDYDEETPLRRRARKQRGAKPGHPPQGNASATKAVMLLLKSFVGTGVLFLPKAFFNGGLLFSACVLTMVAALSYWCFLLLIQCRMKTGVSSFGDIGGALYGPKMRSLILFSIVISQIGFAAAYIVFTSENLQAFILSVTKGETFVKIETLIFLQLIIFLPLSMIRDIAKLSGTALIADLFILLGLVYLYYWSGMIVATEGVADVKMFNPNSWSLFLGTAIFTFEGIGLIIPIQESMKKPEQFTPVLAGVMVGITALFVSMGAICYMAFGSEVKTVVISNLPQDSKFVNGVQILYSAAILLSTPLQLFPAIRIIENGLFTRSGKYNSTIKWQKNIFRFFLVFVTAFVAWGGADDLDRFVALTGSFACVPLVYIYPPLLHYKGVARGTTARTADVCIFIFGLCAMGYTTANTVGSWIGGN

SEQ ID NO: 92359 - DNA, 2220 bp, Aspergillus nidulans FGSC A4
  CDS (1)..(2220)
atggcgtctcccggaaggtacgacaacggggagggttcgtcaactcccaagcttgggtcatctccgatagcaacctccgcacaccgttcacggtctccagctcccgactccgtaaggcatgcctcaatagcccggctagcttctccggtgccttcgatatccaactccgtttcctcgagacaaataccggttccggtttcagtaggcgaatcacaggatctcagcagagtagataacctctcgtctctcccaggtcctgggcagtccatgatcgcctctgctcttcaagatagcctcggccgatcgcctccgagatttgggaccccaccgagacgtaccgagtcccctgtttccaaccagaacccgcaaatcaggtcgaattatggctcctttgatcaaaaaccttggagggaagggtcggaatactctgcggccccatatgaagacccggagatcgtcaaaaggcacttggtgcagccactggaaagtcgagacactcagtcttccggatacggtacggataacgcagacgatgagttctccagcttgcgacttcaaggcggcgacatcaccagacaagtgtacagatgggctgaggatgcggaagaaggcggatccgtcaggaagcctcagcgcagcagaagcttccacttgaataggcctactcccgaagaagataccatgaatattaacagcattcgtgtgccaggcgggtttcgaagagactacttgcgcagggctgtagggagcccgcgtccgggacaatctgatgcaggggacggagcatcccctgctccgcgccagcttccaacgagtagctttctagaatttctgacgctttacggccactttgcgggtgaggagttggaagaagacgacgaggtacttggtccccacgagtacttttcctcggacacctgggacgaagcggaagaacgtgagccgggtgaggactctgctcttcttcatcctgaagcccccggcaagagaagacgcaaacctcgtggaggaacaggaacgaacacgagaaccggagcggcgcttcttctcctcaaatcattcgtgggcactggggttcttttcctgccaagagcgttcctcaacgggggtatgctgtttagcagtctagtactcctcgccgtctcgctactaagcttttactgcttcgttcttctcgtgaacgcccggctaaagatcgagggttcttttggtgacattggaggcgcgctctatgggaagaacatgcgccgcattatccttggttcgatcgttcttagccagttgggatttgtctctgcgtacattgtcttcacggccgaaaatcttcaagcatttgtccttgctgtgagcaattgcaagtctttcatcgacatcaaattcatggtgttgatgcaactgatcattttcctgcccctctcgctgattcgcgacataagcaagcttggtttcactgcgctcatcgctgatctgtttatcttgcttggtctggtatacctcttctactacgacttcctcacaatatccacgcagggtgtggctgaaatcgcttcattcaatccgtctacatggacactattcatcggaaccgctattttcacttacgagggcgttggcctcattattccaattcaggagtcaatgaagcacccgaagcagttcacaggcgtgctggctggcgtaatggttattatcacgatcattttcctggcagcaggcgctgtcagctatgccgcttacggacatgcaaccaaaaccgtcattctgctcaaccttcctcaggacgacaagctcgtgaatgctgtccagttcctctactctctagctatacttctaagcactccgcttcagctcttccctgccattcgaatcatggagaacgagctcttcacccgtagcggaaaatataaccccggcatcaagtggaagaagaacggctttcggttcttcctcgttatgatctgcgcgtttgttgcatggggcggtgccgatgatcttgacaagttcgtttctcttgtcggtagcttcgcctgcgttcctctcatttatgtttatccgcccctccttcatctcaaggcctgcgcggagaccaagcgccagaaactcgcagacatagcgctcactgtcctcggagttgtcagctgcatctacactaccgctctgacgctcaataactgggttaacggcaataattcgaaagctccgggatactgtgactcttaa

SEQ ID NO: 92360 - protein, 739 aa, Aspergillus nidulans FGSC A4
MASPGRYDNGEGSSTPKLGSSPIATSAHRSRSPAPDSVRHASIARLASPVPSISNSVSSRQIPVPVSVGESQDLSRVDNLSSLPGPGQSMIASALQDSLGRSPPRFGTPPRRTESPVSNQNPQIRSNYGSFDQKPWREGSEYSAAPYEDPEIVKRHLVQPLESRDTQSSGYGTDNADDEFSSLRLQGGDITRQVYRWAEDAEEGGSVRKPQRSRSFHLNRPTPEEDTMNINSIRVPGGFRRDYLRRAVGSPRPGQSDAGDGASPAPRQLPTSSFLEFLTLYGHFAGEELEEDDEVLGPHEYFSSDTWDEAEEREPGEDSALLHPEAPGKRRRKPRGGTGTNTRTGAALLLLKSFVGTGVLFLPRAFLNGGMLFSSLVLLAVSLLSFYCFVLLVNARLKIEGSFGDIGGALYGKNMRRIILGSIVLSQLGFVSAYIVFTAENLQAFVLAVSNCKSFIDIKFMVLMQLIIFLPLSLIRDISKLGFTALIADLFILLGLVYLFYYDFLTISTQGVAEIASFNPSTWTLFIGTAIFTYEGVGLIIPIQESMKHPKQFTGVLAGVMVIITIIFLAAGAVSYAAYGHATKTVILLNLPQDDKLVNAVQFLYSLAILLSTPLQLFPAIRIMENELFTRSGKYNPGIKWKKNGFRFFLVMICAFVAWGGADDLDKFVSLVGSFACVPLIYVYPPLLHLKACAETKRQKLADIALTVLGVVSCIYTTALTLNNWVNGNNSKAPGYCDS

SEQ ID NO: 92361 - DNA, 1743 bp, Aspergillus nidulans FGSC A4
  CDS (1)..(1743)
atgccagaaccgtcgttaagctcctcccaccacggctcccaccacggctcccaacgggacgaggcgatcctctcccagcacctcgatccccaatacaccgctgctctccacgaggaggctatcctccctgataacggcgatggcactgcatcgaatgctaccgatgtctcggagccccagtcgtcgctccttctccaggggggcgatatgcaccgcgatctctaccgtctcgatgccaaaacaaaaagagctaggatggacaagcgagcggcgacgttttctgcggcgcctcgtggaagcgatctctttgaggaggcagtagcgccgctcgaaccgggcagctttcgccggaactttatccgtcagcagggccaggatcatccggctcttcaccgctcgttcctcgaatacctcgacctctacggcaattttgcaggcgaggatctggaggaatccgaggaagaaaccgaacaaggagaagaggagacgcagcaagaagcggagcgaaggccgttacttgggacacagaggcacagacggtcgcgttcgtaccggcctggtgatgcctcgaatgtgaagacgttcttcaccctgctcaaggcgttcattgggactgggatcatattcctgccaaaagctttccgcaatggagggatcctgttctcgtcggtcgctctggtgacggtcgctttgatctcgactctgtgctttcacctgcttctcgagtgccggagacggtatggcggagggtatggcgatcttggcgagcagattgccggatccaaactccggtcattgatcttgagctcagtagccatctctcagattgggtttgtttgtgcctgcattatcttcacggccgagaatttgagggcgttcttcgtggctatcatgcccgagacagtccactcgctgtcgacgctccggttgatcgtgctccagctggttgtgctcattcctttgaccatgatccggaacatctccaaactgggcccgatcgcgctccttgctgacgcgtttatcctgttcgggctcgggtacatctactgctacgacattgccagtttagcgagccgagggctggcgccgcgtgtagacttgtttaattctgactctttcaccttgactatcggatcgtgcattttcacctttgagggtattggtctgattctgcctatccagtcgtccatgaagaaaccgcagtgctttgataatctgctctacacagtcatgtttatcatcaccgtcctttttacgggagtcggagctctctcgtacgccacgtttggcgccgacaccaagacagagatcatcagcaatcttccccagaacagccgactggtcaacacagtccagttcctgtattccatcgccatcctagtggggactccaatccaactcttcccgcctgtccgcatcatagaagggaatcttttcgggtcagcgtccggtaagcgcgatccaggcatcaaatggaaaaagaatagtttccggacagtggccgttttggcgtgcggcgttattgcggctctgggcgctggtgatctggacaaatttgtctcactgattggatcgtttgcgtgtgtacctctggtgtacatctacccggcgtatctgcattggaagggagtggctgagtctccatgggcgcaacgcggggatatagccatgatggtgttgggatttggtttcatggtctatactaccgctgcaacggtatcagtctgggttgctgattcgtga

SEQ ID NO: 92362 - protein, 580 aa, Aspergillus nidulans FGSC A4
MPEPSLSSSHHGSHHGSQRDEAILSQHLDPQYTAALHEEAILPDNGDGTASNATDVSEPQSSLLLQGGDMHRDLYRLDAKTKRARMDKRAATFSAAPRGSDLFEEAVAPLEPGSFRRNFIRQQGQDHPALHRSFLEYLDLYGNFAGEDLEESEEETEQGEEETQQEAERRPLLGTQRHRRSRSYRPGDASNVKTFFTLLKAFIGTGIIFLPKAFRNGGILFSSVALVTVALISTLCFHLLLECRRRYGGGYGDLGEQIAGSKLRSLILSSVAISQIGFVCACIIFTAENLRAFFVAIMPETVHSLSTLRLIVLQLVVLIPLTMIRNISKLGPIALLADAFILFGLGYIYCYDIASLASRGLAPRVDLFNSDSFTLTIGSCIFTFEGIGLILPIQSSMKKPQCFDNLLYTVMFIITVLFTGVGALSYATFGADTKTEIISNLPQNSRLVNTVQFLYSIAILVGTPIQLFPPVRIIEGNLFGSASGKRDPGIKWKKNSFRTVAVLACGVIAALGAGDLDKFVSLIGSFACVPLVYIYPAYLHWKGVAESPWAQRGDIAMMVLGFGFMVYTTAATVSVWVADS

SEQ ID NO: 92363 - DNA, 1920 bp, Candida albicans SC5314
  CDS (1)..(1920): transl_table=12
atgtccaacccccaatcaataaagaaaacagaaagaagacgatcaatagcattattgacgaaatctccattatctcaatctccatatattagtccatcaccaagaggttcagcgcctagttcttatgttgccaactctcagtttatgcgaggtgacactgaatccgtagcgatggaatcaacatcagagaattcttccgagaatcaacattcaccagaaaatgacccggaagttgacaacgatattgatttagctagtggtatagatgatcctgaattgattagaaaagtgtctaagcatttacctagtgatttcgattcattaaaacaagaaggtgctgatatcactcgagatttatataggatcaaagaagatgcccaacgtccattattgaaaaaatcacgaagttgtgattctataggaggcaatctgataaaatcaacggcatcgtcatttaatgttcctggtgggtttcgtcgtgagtttttattgaatcaacaacaacatcgtgacgaacgattagaatctttacgtacaacaactcctaatttcttaacaaagaatttcattgaatttttaagtatttatggtcatttcgccggtgaagaattagaagatgatgaaaatatagctaatcattacaaatatttactaccccacgaacaagcaccattacttcaagatgataatttcaatccacgaggaactgccactgatagaaaggcatattttttgttattgaaagcatttgttggaactggtgttcttttcctccctaaagcattttataacggtggattatcattttctattattgtattgtcattatttgctttattgtcttggtggtgttatttgattttggtatttacaaaagttgcaaccaaagtgtctggatttgctgaaattgggttgaaattatatggaccatggtttcaaagattgattctttcttcgattgttatttctcaaattggatttgctgctgcttatattgtgtttaccctggaaaaccttcgagcattcactgctaatgttagtctgtatgatgtgactgatatcaacattgtctggtttatattattgcaagttgtgattattgttccattatctttgattcgtgatatcacaaaattatcattactggcagtatttgctaatgttttcatcttgacagggttggtcactatagtttatttcatgttgtatcaatggttgggagttaatcacggttattttgggaaaaacattgaatatttttttaacgaatctgaattctctttattcattggtacggctatatttgcctttgaaggtattggattaattattcctattcaggaatcaatgattcatccaaacaatttccctcgggttttgggccaagtcattctcaccattgctgtgattatgataatggttggtagtttgggatatttgacttttggtgataaaattaaaactgttgtattattgaatttaccacaagattcaccaatggttattatcacacaattattatattcattagccatattattatcgacaccattacaattgtttcctgccattagattattggaatcgaaaatgatttttggtagtggtaaaagttcaccaagtgttaaatggttgaaaaacttatttagaactttatttgttgtgttcattgcatatattgcatatattggtggtcaaaatttagataagtttgtttcatttgttgggtgttttgcttgtattcccttggtttatatgtatccgccaattttacatcttaaaagctgttgcaagattcattctgggttactggaaaaggaacagaataatcgtttttggttaagtcttgccaattatgtgttacttgtcattggagcgatctcatttgtttacacaacctatgaaatattgttcacttaa

SEQ ID NO: 92364 - protein, 639 aa, Candida albicans SC5314
MSNPQSIKKTERRRSIALLTKSPLSQSPYISPSPRGSAPSSYVANSQFMRGDTESVAMESTSENSSENQHSPENDPEVDNDIDLASGIDDPELIRKVSKHLPSDFDSLKQEGADITRDLYRIKEDAQRPLLKKSRSCDSIGGNSIKSTASSFNVPGGFRREFLLNQQQHRDERLESLRTTTPNFLTKNFIEFLSIYGHFAGEELEDDENIANHYKYLLPHEQAPLLQDDNFNPRGTATDRKAYFLLLKAFVGTGVLFLPKAFYNGGLSFSIIVLSLFALLSWWCYLILVFTKVATKVSGFAEIGLKLYGPWFQRLILSSIVISQIGFAAAYIVFTSENLRAFTANVSSYDVTDINIVWFILLQVVIIVPLSLIRDITKLSLSAVFANVFILTGLVTIVYFMLYQWLGVNHGYFGKNIEYFFNESEFSLFIGTAIFAFEGIGLIIPIQESMIHPNNFPRVLGQVILTIAVIMIMVGSLGYLTFGDKIKTVVLLNLPQDSPMVIITQLLYSLAILLSTPLQLFPAIRLLESKMIFGSGKSSPSVKWLKNLFRTLFVVFIAYIAYIGGQNLDKFVSFVGCFACIPLVYMYPPILHLKSCCKIHSGLSEKEQNNRFWLSLANYVLLVIGAISFVYTTYEILFT

SEQ ID NO: 92365 - DNA, 2289 bp, Candida albicans SC5314
  CDS (1)..(2289): transl_table=12
atggcgtcacattcaaattcaaattcaaattctttatttcaaaatgataagaataacaacagtaatagagatatagctatacctacaccaagtaattcatcatcatttcgtaatactaataccaacccaacaccttccattagactgccatcaccttctataaatagttacaacaacaacaacaacaacaatagtgccattcctacaacaaccactagtagatcaataactgggatgtctaacgcttccattaatgattcaggtgattctaacccacaaagttatgatgaacaaatttctcaattaaataatttaaacaataaaaaatcttttgatttgaaaactattagtaaacatttaattaatcaagaagatagtttaaagactcaaggtggtgatatcactagaagattatatcatcagatggaaaacataaccggtaacaataatcataataataataataataacactgatactactggtaatgatttggatgataatgttagtattggaggtaatagtactttccgtgatggaccaccaccaagattaagaactagaagtgcgtcattttcaagttatttagaagaaactagacgaggttcaatggctagtgatatcaatataccgggtggattcagacgagaatttttaattaataaagctatacaaaagaatcaacaaccacctaatttccttactcaaaattttatggaatttttaagtatttatggtcattttgctggtgaagattttagtgatgaagaagaagaaggtgatgaaggtgatgaagagtatgataatgggcatgatggtgatgaagttttcgatgaagaatcaagtttattgggtaatgaacgaagaggaggtggaagcggcggcggacaaccatttagacaattaccaaagaaacctcattctcatcctcaaaaacaaccaccaaaaggtactgcatcggttttcaaaacctttttattattatttaaagcattagttggttcaggagtgttatttttaccaagagcattttataatggaggaatgttattttctatgattactttgagtttatttggcttattaacttttttttgttatattggattaattgaatctaaaactatattgaggttgtcttcatttggtgaattaggttataaaacttatgggaaacctttgaaatattgtattttggtgtcaattcttttaagtcaaattggatttgtcactacttatattttatttacagcagaaaacatgattgcatttttatctcaatatgtatctaccaaaaacaatttgttgtcacaggaggttcttccaaattggttaaatcgtggtaatttgattttgattcaatgtattctattaatccctttggtattaattcgaaatttggctaaattatcaatggtttcattaatttcatcagtatttattgttattggattattaattatattttggtattcaggagtaaatttaattaataatggtgttggccccaatattacaaattttaattctaatagttggacaatgttaattggggttgctgttacttcatttgaaggaattggtttaattttacccattcaatcatcaatgagtcaaccagaaaaattccctcttgttttgtctattagtatggctattattaccagtatttttgttggtattggaactattggatatttttcatttggtgataaaattaaatcaatcattattttgaatttacctcaagatcaatttgctgtacaatctattttagtattgtattctattgcggtatttttatcaggaccattacaattgttcccagctatcaaaattggtgaatcattaattttccgtcattcaaagaaaaaatcaaaacgccaacaacatcaacatggtagtactgacgaaagtaatactaataatactgatgataacgatggtaaattatatcatcaatcaggtaaatataatccacaagtgaaatggttgaaaaatggatttagagcaatttcagtgatatttatttgttcacttgcttatttaaatgctgataatattgataaatttgtttcatttaatggttgttttgcttgtatccccttggtatacatttatcccccattaattcatttgaaatcaattcaatcaaaacaacaacaacaacaacaacaaacaggtagatcaaaatcagatcaattatttatttggttagattatttgttgattgtagtaggaattgccacagtgatttattcaagttatcaaattatattcttaaactaa

SEQ ID NO: 92366 - protein, 762 aa, Candida albicans SC5314
MASHSNSNSNSLFQNDKNNNSNRDIAIPTPSNSSSFRNTNTNPTPSIRSPSPSINSYNNNNNNNSAIPTTTTSRSITGMSNASINDSGDSNPQSYDEQISQLNNLNNKKSFDLKTISKHLINQEDSLKTQGGDITRRLYHQMENITGNNNHNNNNNNTDTTGNDLDDNVSIGGNSTFRDGPPPRLRTRSASFSSYLEETRRGSMASDINIPGGFRREFLINKAIQKNQQPPNFLTQNFMEFLSIYGHFAGEDFSDEEEEGDEGDEEYDNGHDGDEVFDEESSLLGNERRGGGSGGGQPFRQLPKKPHSHPQKQPPKGTASVFKTFLLLFKALVGSGVLFLPRAFYNGGMLFSMITLSLFGLLTFFCYIGLIESKTILRLSSFGELGYKTYGKPLKYCILVSILLSQIGFVTTYILFTAENMIAFLSQYVSTKNNLLSQEVLPNWLNRGNLILIQCILLIPLVLIRNLAKLSMVSLISSVFIVIGLLIIFWYSGVNLINNGVGPNITNFNSNSWTMLIGVAVTSFEGIGLILPIQSSMSQPEKFPLVLSISMAIITSIFVGIGTIGYFSFGDKIKSIIILNLPQDQFAVQSILVLYSIAVFLSGPLQLFPAIKIGESLIFRHSKKKSKRQQHQHGSTDESNTNNTDDNDGKLYHQSGKYNPQVKWLKNGFRAISVIFICSLAYLNADNIDKFVSFNGCFACIPLVYIYPPLIHLKSIQSKQQQQQQQTGRSKSDQLFIWLDYLLIVVGIATVIYSSYQIIFLN

SEQ ID NO: 92367 - DNA, 2703 bp, Ustilago maydis 521
  CDS (1)..(2703)
atgacacgtgaacatctcactgcaaacctcaagcctggcccggccacatttcacgattttgctgttttagttttcggatgtgtcgggggtggaaacgcacactcgcaactacgctcactcagtgctggtgcccggtgcagctctgatttcagtcacgagtcggcctacttcgtgccagaatgcatacacgacactcttgagtgccgtattgccagccttgcccttggcccagctcttcatttgtcaccactcctcctccccccatcatcccatcctatcggagcaaccgactacgccatactacgccataaagctgagctcgaggttctgatcatcacgcttgtccgtcatcggaacccaccaagctctacgcttaaacgcacacttgccagattcgatcttgtcacgcagcaagccaagatcatgtcgacgccaaacaaccccaaccccaaccccaacggcaacggcaaggccagggctatcccttctcccagtcttgcatccgcagacactttggcttccacccccatccgatccccttcgcgcgcctttggcgaaggttggggccacgcctctccctcgctgcccaacatccctccgcgcgtaggctctccatccgccgaaccgctcaacctctactcttcatcgcagcagcagcgtcaagactcgtccaactttcctaggtctttctcgatcgagcctccctctcgcgacagcccttcactggctcctcccgccgtcgactctggtctctcaacacccagcaatctcgacaatctcgattctcttcccttttcagacgagcgcaaggcacgcatcatcgagaggcatctcgctcgtcctgatggtaaccgcgattcgatctcggccacttcaattccatcgtctgaacacaccgacgattttgatgacagccaagatgcccacggttcgtccacacccaatcccgctgcatctggagatggtgccaacgagtcgccgtccgagatcgcgtttgaggacgtagacgaaagctacattggtccgcaccagatgcaaggcggagccatcaccgacgacgtctaccgatgggctcacaagaatcgcagagtatccgcaagacgtacccgcagcgagagtcttcacatgcctcgtaccgccaccatcgaccctgagctcgatgtgcagggcatcaaggaacccggaggcttccgacgcttctttgttatcaaccaggcccaagagcagggccgcgcccctcccagagcgcttcgcagctttatcgacttcctcagcctgtacggtcactttgccggagaattcctggaagaagaagacgatgacgatgatgacgatgagtacgaagacgacgccgacgagcgtgctattcctggtaccagccgtggagctggcactggcgacatggaaacctcgggtcttctgcgtcgtcgcaaaggtctgcaacgaagcgacacccaagctcgtatgcgcaaggctaacaaggaacgccgtcgcggtgaggcttcggtgctcgatgccgtcatgatgctgttgaaatcttttgtcggtaccggtgtgcttttcctcggcaaggcattccacaacggcggtctgctcttctccaccgtgaccctgtgcgcggtcgctatcatttcgctcgtatcgttcctgctgctcgtcaaaaccaatctcaactgtccaggctcgttcggtgacatgggtggcatcctctacggtcctcgtatgagacttgccatcttggcttcaattgtactctcgcagctcggcttcgtcgctgcttacacggtatttgtggcgcagaacatgcaggcattcgttctcgccgtcacgcactgcaagacgctcgtgcctatctgggcgctcatcctgggtcagatggctgtgttcttgccactctcgctcattcgaagaatcgccaagctctccaccacggcgctgattgccgatgtcttcatcctctttggtatcgtctatctgttctggtacgagatcggcaaggtcgccaaggatggacttgccgacgtggtcatgttcaacagcaaagagtttccgctattcattggtacggctgtctttacgtttgaaggcatcggcctggtaattccgatcaccgagtcgatgaaggagcctgaaaagttcccacgcgcacttaccggggtgatggcaggagtgatggtgctctttgcttcggcaggtgcgctatcgtacatggcgttcggatctgaaatccagacggtggtgattaccaaccttccgcaaacctctcgattcgtgcaagcgatgcagttcctctacagtatcgctattctgctctccacgcctctgcagctgttcccagcgctggctgtgctcgagaagggaatcttcaccaagagcggtaaatacaactggaaggtcaagaccgagaagaacctcttccgtttcctcgtagttgtcgtctgctgtttggcagcctgggcaggtgccaacgatctggacaagttcgtttccctcatcgggtcagtggcatgtgtgccgctttgctttatctacccgcctttgctgcatctgaaggcgaatgcgactcggagcgcgaccaaagtattgaattacgccatgttggtgttcggcgtcgtttgcgttgcctttgccggtagtcagaccatcaaggcgatgttggagagttcgcaaccagctcgtccacccagatgttctccgaggtag

SEQ ID NO: 92368 - protein, 900 aa, Ustilago maydis 521
MTREHLTANLKPGPATFHDFAVLVFGCVGGGNAHSQLRSLSAGARCSSDFSHESAYFVPECIHDTLECRIASLALGPALHLSPLLLPPSSHPIGATDYAILRHKAELEVLIITLVRHRNPPSSTLKRTLARFDLVTQQAKIMSTPNNPNPNPNGNGKARAIPSPSLASADTLASTPIRSPSRAFGEGWGHASPSLPNIPPRVGSPSAEPLNLYSSSQQQRQDSSNFPRSFSIEPPSRDSPSLAPPAVDSGLSTPSNLDNLDSLPFSDERKARIIERHLARPDGNRDSISATSIPSSEHTDDFDDSQDAHGSSTPNPAASGDGANESPSEIAFEDVDESYIGPHQMQGGAITDDVYRWAHKNRRVSARRTRSESLHMPRTATIDPELDVQGIKEPGGFRRFFVINQAQEQGRAPPRALRSFIDFLSLYGHFAGEFLEEEDDDDDDDEYEDDADERAIPGTSRGAGTGDMETSGLLRRRKGLQRSDTQARMRKANKERRRGEASVLDAVMMLLKSFVGTGVLFLGKAFHNGGLLFSTVTLCAVAIISLVSFLLLVKTNLNCPGSFGDMGGILYGPRMRLAILASIVLSQLGFVAAYTVFVAQNMQAFVLAVTHCKTLVPIWALILGQMAVFLPLSLIRRIAKLSTTALIADVFILFGIVYLFWYEIGKVAKDGLADVVMFNSKEFPLFIGTAVFTFEGIGLVIPITESMKEPEKFPRALTGVMAGVMVLFASAGALSYMAFGSEIQTVVITNLPQTSRFVQAMQFLYSIAILLSTPLQLFPALAVLEKGIFTKSGKYNWKVKTEKNLFRFLVVVVCCLAAWAGANDLDKFVSLIGSVACVPLCFIYPPLLHLKANATRSATKVLNYAMLVFGVVCVAFAGSQTIKAMLESSQPARPPRCSPR

SEQ ID NO: 92369 - DNA, 2253 bp, Aspergillus niger
  CDS (1)..(2253)
atgtcatcctccaggatgtccgacaacggtgagggctcatcctctcagcgtaaccgttcatcgtcgccgatctccacgtccgcgatgcgctcgggatcgcctgcaggagatgtttcttcttcttataggcatgcttcgatagcccggttagcatcaccaattccttctccctcgaactcctattcgtcaagacaggtaccgctgccgattcaaccaaccgcggcaaccaaccaagaccttcggagagtcgacaatccatcatccttacccggccccggacaatccatgattgcatctgcgctccaggattacctcggccgatctcctcctccgagagcaggtacccctccgaggcggactgcttcgcctgccctcctgaaccagcctgtcaggtcgaattacggttcctttgataataaggctgggagagagggttcaatatactcagcaggtccatacgaggatcccgaagttgtcaagaggcatttggtgcaaccccagaatgtggtcgagaatcgggatatccactcgtctggcggcgcccaaagtaacgccgaggatgagttctctagtctgcaactccagggtggtgatatcacgagacaggtatacagatgggctgaggatgcagaagctggaagctctttgcggaaaccgaaccggagcaggagcttcagtcatgctcgacctgcacctgaggatgaaacaacgaacatcaacagtatccgtgtcccaggaggtttcagaagggactatctaagacgggcagtaggccctaaccttcctggagatctggatggctcgggtgcgcaggcttctgctgcccagccacagcttccaacaagcagctttttggaattcctgactctatacggtcactttgctggtgaagagctcgaagaggatgacgaggtcctgggccccgatgagtatttctcatcggatacttatgacgaagcagaaggcagagaaccaggtgaagattcagccctcctcaggccagacacagctggccggaggaagcgcaagccacgcggtgggacgggaaccaacacgaggaccggagcagcattacttctactcaagtctttcgttggcacaggagttttgttcttgccaagagctttcttgaatggtggcatgctgttcagtagtatggtacttcttggcgtatcactactcagcttttactgcttcatccttctggttaatacgcggctgaagatcgatggttcctttggtgacattggtggtgcgctctatggaaagcatatgaggcgcatcatccttggatccattgtgttgagtcaattgggtttcgtgtcggcatatattgttttcacggccgagaatttacaagccttcgttctggctgtcagcaaatgcaaatctttcattgacatcaagttcatggtgttgctgcagctggtcatcttcctccctctctcattgatccgcgatatcagcaagctcgggttcactgctctcattgcagatctgtttatcatgctggggctggtttacctcttctattatgatttcttgactatctcgaaccaaggaggtgtttcggatatcatctccttcaacccatccacctggacacttttcatcggcacggctattttcacgtatgagggaattggtttgatcatcccaatccaggaatcaatgaagcacccgcaaaagtttcccggtgttctggcaatggtgatggtcataatcacggtcatcttcctcagcgctggtgcatttagctatgcggcatatggatccgcaacgaagacggtagtcatcctcaacatgcctcaggatgacaagtttgtaaatgccgtgcagttcttgtactctctcgcgattcttctcagtaccccactgcagcttttcccggccattcgaattttggagaatgagcttttcactcgcagcggaaagtacaatcccagtatcaagtggaagaagaattgcttccgtttcttccttgtcatgatctgtgcattcattgcctggggcggagcagaagacttggacaagtttgtttcgcttgtcggaagtttcgcctgtgtccccttgatttatgtatatccgcctttgctgcatcttaaggcctgtgcccaatcgagacgacagcagattgccgatatcgcactctccgttttcggtgtccttagctgtttgtatacgaccgccctgacactcaacaactggatcaatggatcggacgtcaaagctcccgggtactgtgactcatag

SEQ ID NO: 92370 - protein, 750 aa, Aspergillus niger
MSSSRMSDNGEGSSSQRNRSSSPISTSAMRSGSPAGDVSSSYRHASIARLASPIPSPSNSYSSRQVPLPIQPTAATNQDLRRVDNPSSLPGPGQSMIASALQDYLGRSPPPRAGTPPRRTASPALLNQPVRSNYGSFDNKAGREGSIYSAGPYEDPEVVKRHLVQPQNVVENRDIHSSGGAQSNAEDEFSSLQLQGGDITRQVYRWAEDAEAGSSLRKPNRSRSFSHARPAPEDETTNINSIRVPGGFRRDYLRRAVGPNLPGDLDGSGAQASAAQPQLPTSSFLEFLTLYGHFAGEELEEDDEVLGPDEYFSSDTYDEAEGREPGEDSALLRPDTAGRRKRKPRGGTGTNTRTGAALLLLKSFVGTGVLFLPRAFLNGGMLFSSMVLLGVSLLSFYCFILLVNTRLKIDGSFGDIGGALYGKHMRRIILGSIVLSQLGFVSAYIVFTAENLQAFVLAVSKCKSFIDIKFMVLLQLVIFLPLSLIRDISKLGFTALIADLFIMLGLVYLFYYDFLTISNQGGVSDIISFNPSTWTLFIGTAIFTYEGIGLIIPIQESMKHPQKFPGVLAMVMVIITVIFLSAGAFSYAAYGSATKTVVILNMPQDDKFVNAVQFLYSLAILLSTPLQLFPAIRILENELFTRSGKYNPSIKWKKNCFRFFLVMICAFIAWGGAEDLDKFVSLVGSFACVPLIYVYPPLLHLKACAQSRRQQIADIALSVFGVLSCLYTTALTLNNWINGSDVKAPGYCDS

SEQ ID NO: 92371 - DNA, 1968 bp, Aspergillus niger
  CDS (1)..(1968)
atggccgttgttgtcgcccgggtgctgactcagacaccagccaatcagacagcgcagaaagagcacggagcgaagacatcggcttcctcttttgtatcctcctctcctcctcgcccccctcctcctgtccctgtttcaactgaccccatcctctcccaaccagaaattcgcctccgccctccgtccccgacacccccgtttccaatggcagatctctccacatcccccggtcgggatcccgactccgactcgagagaagcaaacaacgtcctgtcccagcatctacatcctcagttcactgcctcccttcaggatgagctaactgcacccccggccgagcccccagctgagcaaagtagcggtgatgctccctccgaaccccagtcctcactgagactgcaaggcggcgatatccatcgagacttgtaccgtatcgacgccaaatcaaagatagctcgcctggacaaacgggcagcgactttctctttccttccgagacgcacagatgatgtagtcgaagaaggcgtggccgccatggagccggggagcttccgccgtcacttcgttcagaacaagtacggtcggctcgaccagccgggcgtgacctcgtcctttctcgattttcttgatatttatggcaactttgcgggtgaggatttggcggacacagaggaggaatccgccatcgtcgaagaagaagaggaagaagaggaagagacgagaccgtccgaacgcactgctctcttgcggcgacggcggagctcacgagccagccgcccaggcgatgcttccaacgtcaagaccttctttaccctcctgaaggcatttgtggggacgggcattattttcttacccaaggccttccgcaacggcgggatcctgttctcctccatcacccttgtaacagtgtcgttgatcagtaccttgtgtttccacctgttgctggaatgtcggagacactatggcggtggctatggcgaaattggtgagcggatcggtggtcctcgactgcggacgttgattctcgcatccatcgtaatctctcaactgggcttcgtgtgtgcttgcatcatcttcaccgcagagaacgtccacgccgtcctggaagctgtgacaacagacctgggcacggccttgtcgaccggtaaattgatcgccgtacaactgctggtgctcatcccactgtcattgatccgaaacatctccaagctgggacccatcgcgttgctggcggatgtcttcatcctcgtaggcttggcgtacatctacttctatgacattgccagtctcgcgtcccgtggtctggcctcgtcggtcgaacttttcaatcgccagtcattcaccctgaccatcggctcgtgtatttttacctttgagggcattgggttgatcctgcccatccagtcgtccatgaagcggccagaacatttcgacaaacttctctatactgtcatgatcatcatcaccgtattgttcacggcggttggcgcgctctcgtatgccacctttggcgccgagaccaaaacggagatcatcagcaacctgccccgcacggaccgctttgtcaatgtgctccagttcgtctattcgctcgccatcctggtcagtacgccgatccagctgttccccgctgtccgtatccttgagggcaggctcttcggccagaactcaggcaagcgcgaccccatgatcaagtggaagaagaatgtgttccggaccggtgccgtgatgacctgcggcctgatcggagctgtgggggccggggatctcgataagttcgtgtcgttgatcgggtcttttgcatgtgtgcccctggtgtatatctacccggcgtatctgcactggaagggcgtagccgagtccccgtgggtcaaacggggcgacatcgcgatgatggtactgggtgtggtgttcatggtgtacacgacaagcgccacagtctccgtctggctagaaggatccgcctag

SEQ ID NO: 92372 - protein, 655 aa, Aspergillus niger
MAVVVARVLTQTPANQTAQKEHGAKTSASSFVSSSPPRPPPPVPVSTDPILSQPEIRLRPPSPTPPFPMADLSTSPGRDPDSDSREANNVLSQHLHPQFTASLQDELTAPPAEPPAEQSSGDAPSEPQSSLRLQGGDIHRDLYRIDAKSKIARLDKRAATFSFLPRRTDDVVEEGVAAMEPGSFRRHFVQNKYGRLDQPGVTSSFLDFLDIYGNFAGEDLADTEEESAIVEEEEEEEEETRPSERTALLRRRRSSRASRPGDASNVKTFFTLLKAFVGTGIIFLPKAFRNGGILFSSITLVTVSLISTLCFHLLLECRRHYGGGYGEIGERIGGPRLRTLILASIVISQLGFVCACIIFTAENVHAVLEAVTTDLGTALSTGKLIAVQLLVLIPLSLIRNISKLGPIALLADVFILVGLAYIYFYDIASLASRGLASSVELFNRQSFTLTIGSCIFTFEGIGLILPIQSSMKRPEHFDKLLYTVMIIITVLFTAVGALSYATFGAETKTEIISNLPRTDRFVNVLQFVYSLAILVSTPIQLFPAVRILEGRLFGQNSGKRDPMIKWKKNVFRTGAVMTCGLIGAVGAGDLDKFVSLIGSFACVPLVYIYPAYLHWKGVAESPWVKRGDIAMMVLGVVFMVYTTSATVSVWLEGSA

SEQ ID NO: 92373 - DNA, 1740 bp, Aspergillus oryzae
  CDS (1)..(1740)
atgtccgaccagtaccttagctccacgcctcgagaccaggactccgaggcccgcgaggctatcctggcccagcacctcaaccctcagttcacagcctcgctgcaggatgagacctttgccccctcagaaacgacccacgaaggtgcggaggacagcccggaaccgcagtcctctctcctacttcaaggtggcgacatacaccgtgacctttaccggattgaagccaagtctaagcaggcgaagatagataaacgggccgcaagcttttccgttcccccaagagaggcggaagatgcaatagaagagggtgtcgcagctatggagcccggcagcttccgtcgccatttcgtgcaacagcacaagaatggcaatttcgattctccgggggtgacgacgtccttcctcgatttcctcgatctatatggtaattttgccggcgaggatctagcagagacggaggaagattcggtggtcagcgaagaccgggaaactaggacattgccatgggagcaaacccccttgatccagagggcccggcggcgttcacgagtcggccgtccgggtgacgcatccaatatgaaaacatttttcacactgctgaaggcgttcgttggcacaggcattattttcctgcccaaagcattccgcaacggaggaattttattttcctcgattacgctagtgacggttgcgttgatcaccactgtgtgctttcgccttctcctgcagtgtcgtcgacaatatggtgggggttatggcgaaattggtgagcggattgcaggacctcgtctccggtcccttatcctctcgtccatcaccatctctcagattggcttcgtgtgcacgtgtttcatcttcaccgccgagaatattcaggccttcttaaaggccatggcgactaatatctcgacggggagtttgatcttgctccaattgctcgtgctcattccgctcgcttggattcgaaacatctctaagctgggtccggcagcgctgctttccgatgtgttcattctcctgggactaggatatatctactggtacgacgttgcgactctcgtaacgcgaccgggagcagacccaaccgtcgagctattcaacccgcactcattcacgctgaccatcggttcgtcgattttcaccttcgaaggtatcggtctcgtattgccaatccagtcctcaatgaggaagccgcaacatttcgaccgtcttctatacatcgtcatggcgatcatcactacactcttcacagcagtgggcgcattatcttatgctacattcggtaaccggactcagacagagatcttcagcaatttcccccaaacagacagacttgtcaacacgatccaatttctttactcccttgcaatcctagtgggcgctccaattcaactgtttccagctacccgtatcatggagggcaagctctttgggcacaagtccgggaaaggtgacacgtcaatcaaatggaagaagaatatcttccgaatggtcctcgttttatgctgtgccttcatctcctccgttggtgcgggtgacttggacaaatttgtttccataatcgggtcgtttgcgtgtgtaccgctggtctatatatacccggcgtatctgcattggaaaggcgtggccgagcttccgtgggagaaacggggagatattgctatgatggtgcttggtttcgtgtttatgatttacactaccattgctacgttggctgtttgggttcaaggcagtccatga

SEQ ID NO: 92374 - protein, 579 aa, Aspergillus oryzae
MSDQYLSSTPRDQDSEAREAILAQHLNPQFTASLQDETFAPSETTHEGAEDSPEPQSSLLLQGGDIHRDLYRIEAKSKQAKIDKRAASFSVPPREAEDAIEEGVAAMEPGSFRRHFVQQHKNGNFDSPGVTTSFLDFLDLYGNFAGEDLAETEEDSVVSEDRETRTLPWEQTPLIQRARRRSRVGRPGDASNMKTFFTLLKAFVGTGIIFLPKAFRNGGILFSSITLVTVALITTVCFRLLLQCRRQYGGGYGEIGERIAGPRLRSLILSSITISQIGFVCTCFIFTAENIQAFLKAMATNISTGSLILLQLLVLIPLAWIRNISKLGPAALLSDVFILLGLGYIYWYDVATLVTRPGADPTVELFNPHSFTLTIGSSIFTFEGIGLVLPIQSSMRKPQHFDRLLYIVMAIITTLFTAVGALSYATFGNRTQTEIFSNFPQTDRLVNTIQFLYSLAILVGAPIQLFPATRIMEGKLFGHKSGKGDTSIKWKKNIFRMVLVLCCAFISSVGAGDLDKFVSIIGSFACVPLVYIYPAYLHWKGVAELPWEKRGDIAMMVLGFVFMIYTTIATLAVWVQGSP

SEQ ID NO: 92375 - DNA, 2244 bp, Aspergillus oryzae
  CDS (1)..(2244)
atgtcttcacccgcacatccagacaatggggagggttcatcatctcaacctcgtcagtcaacaccgctctcgacgagcgcattgcgccctggttctccctcagcggatgcttcatcgagacaaatctcgattgcacggctagcatctccagtaccttctccatctagctcatacccccatgcaaccagacaattgccggtaccgatccaaccagtgacaggcacagatgaggatatccggaaagtggacaatctatcgtctctaccaggccctgggcaatccatgatcgcatctgctctccaagaaagcctcggtcgctcacctccgagacttgggacaccgccaagacgcactgcttcccctgccttgcatcaggctcagccaatcaggtccaactatggttcatttgacaataagcccgggtgggaaggctcagaatactcagcagggccgtatgaagatccggaagtcgtcaaaagacacttagtactaccgcaaaacactgtcgagagtcgagatgatgctgcttctggggatgctgcaaatgacgaggaattctccagcctgcagctacaaggaggtgacattacaaggcaggtctacaggtgggcagaaggtgcagaggcaggaagtccttccagattcaatcggagcaagagcttcagcataaatcgacccacaccacaggatgagacgatgaacatcaacagcattcgcataccaggaggattccgcagagactatatccggagaactgtagcctcaaacgttccagaaagccctgacggccagggaccacaacctcctctgcctcaacctcagctcccaaccagcagcttcttagaatttttgactcttttcggccactttgcaggagaggagctagaagaggatgacgaagtgctggggcccgatgagtacttctctgacgcctgggaagaggatggtagagagccgggagaaagatcggccctcctccgtcctgagacccctggaagaagaaaacggaagccgcgtggaggcactggaaacaacactaggactggagcagctctacttctgctcaagtctttcgttggtacaggggtcttgttccttccaagggctttccttaatggcggtatgctttttagtagtctggtattgcttggtgtgtcgcttctcagcttctatgctttcatacttcttgtcaacacccgactgaaaattgatggctcgttcggtgatattggcggcattctgtatggaaaacatatgcgacgcattatccttggatctatagtcttgagtcaattgggattcgtctctgcatatattgtgttcactgctgagaatttgcaggctttcgtccttgctgtcagcaactgcaagtccttcattgacatcaagttcatgttgttgatacagctggtcatcttcttacctctttcgttgatccgcgatatcagcaagcttgggtttacggctctaattgcagatgttttcatcctgcttggcctgatctatctgtactactatgatatcttaactatctctgcacaaggcggtgtttcggatattatatccttcaatccatctacatggacacttttcatcgggacggctattttcacttacgagggcattggtcttatcattccaatccaagagtcgatgaagcgtcctcagcaattccccggtgttcttgctggggtaatggtcattatcacgattgttttcctctctgctggtgcgctgagctatgctgcgtacggatctgcaacgaaaacggtggttattctcaaccttcctcaggacgataagtttgtgaatggtgtccaattcctctattcgcttgcgattctgctgagcacgcccctgcagctcttcccagccatccggatcatggagaatgagctcttcacacgcagcggcaagtataaccccagaatcaaatggcagaagaattgtttccgcttcttccttgtcatgatatgtgctttcgttgggtggggtggagcagacgatcttgacaaatttgtctcacttgtcggtagctttgcctgcgttccacttatatacgtatacccgcctctgttgcatctgaaagcctgcgcgcattcaagaaaacagcagatcgctgacattgcccttactatcttcggcgtaattagttgcctctatacgacttcactgactctagcaaactgggtcggaggaggagctcccccgtcacctggatactgcgacttgaagtctggttaa

SEQ ID NO: 92376 - protein, 747 aa, Aspergillus oryzae
MSSPAHPDNGEGSSSQPRQSTPLSTSALRPGSPSADASSRQISIARLASPVPSPSSSYPHATRQLPVPIQPVTGTDEDIRKVDNLSSLPGPGQSMIASALQESLGRSPPRLGTPPRRTASPALHQAQPIRSNYGSFDNKPGWEGSEYSAGPYEDPEVVKRHLVLPQNTVESRDDAASGDAANDEEFSSLQLQGGDITRQVYRWAEGAEAGSPSRFNRSKSFSINRPTPQDETMNINSIRIPGGFRRDYIRRTVASNVPESPDGQGPQPPLPQPQLPTSSFLEFLTLFGHFAGEELEEDDEVLGPDEYFSDAWEEDGREPGERSALLRPETPGRRKRKPRGGTGNNTRTGAALLLLKSFVGTGVLFLPRAFLNGGMLFSSLVLLGVSLLSFYAFILLVNTRLKIDGSFGDIGGILYGKHMRRIILGSIVLSQLGFVSAYIVFTAENLQAFVLAVSNCKSFIDIKFMLLIQLVIFLPLSLIRDISKLGFTALIADVFILLGLIYLYYYDILTISAQGGVSDIISFNPSTWTLFIGTAIFTYEGIGLIIPIQESMKRPQQFPGVLAGVMVIITIVFLSAGALSYAAYGSATKTVVILNLPQDDKFVNGVQFLYSLAILLSTPLQLFPAIRIMENELFTRSGKYNPRIKWQKNCFRFFLVMICAFVGWGGADDLDKFVSLVGSFACVPLIYVYPPLLHLKACAHSRKQQIADIALTIFGVISCLYTTSLTLANWVGGGAPPSPGYCDLKSG

SEQ ID NO: 92377 - DNA, 2079 bp, Saccharomyces cerevisiae
  CDS (1)..(2079)
atgaatggaaaagaggtttcaagtggctctggaagaacgcagagcaacaacaacaaaaaaaataacaacggaggcagtacaggaatctcgcatgcgtctggctcacctttaacggacggcaacggtggcaatagcaacggtaatagtagaagtagaagcagaagtagaaaatctagtggaactacaggtggtttgctaaaaaagccgccgctgcttgtgaacaatgaagcggtgcatgctagcgtacccgacgcgtcgcacacttcctgtaacaatggcacgcttgaagtgagcataaataaccctgagccacatgtggtagatgccgtggcacgccacttgataagaaacccgagtaacagcctacaattgcaaggcggagacattacaagagatctgtataagtggacaaacgaccatccttcatcaccatcgcagtatcagtacccaagtcaacctgcactttccacctcaataccttcacaagcgccctcattctcgaatcgtaaaaggtctatgagcttttctgccgcttctatagcatcttcctctcaccttaacaacaactcggaggcgaatgggaatcctctagcggcaataggcctggcgcccgcaccgatgacgcacgaagaaatcagggctcctggtggattcagaagatcttttataatacagaagcgcaggaaacataacgttgatgcgcccataccgaattttttcaccaggaactttattgaatttttgaccttgtatggccacttcgctggtgaagatttatcggaagaagaggaggaggaggaagaaactgaagaggagccagaggaggaagctttggaaacggaaagcacccagctagtttctcgtgaacacgggcgccatcctcacaaatcatctacggtaaaggcggtgctgctcttgttaaagtcatttgttgggacaggtgtgcttttcctaccaaaggctttccataacggtggttggggatttagcgccctttgtctactctcgtgtgccctcatttcttatggatgtttcgtatcattgattaccaccaaggacaaagtaggcgtagatgggtacggtgacatgggtcgtatactatatgggcccaaaatgaaatttgccattctttcgtctatcgccttgtcacaaatcgggttttctgctgcatacactgttttcactgcaactaatttgcaggtcttttctgaaaatttcttccatttgaaaccgggcagcatcagtctagccacctatatctttgcacaagtactcatctttgtcccactatctttgacaagaaacatagccaagttaagtgggaccgcgttaatagcagatctatttattctactgggattggtttatgtttacgtttactccatttattatattgctgttaatggtgtcgcatccgatacaatgcttatgttcaataaagcggactggtcgttgttcatcggtaccgccatattcacctttgaaggtataggcctacttatccccattcaggagtcaatgaaacacccgaagcatttccggccatcgttgtccgcggtgatgtgtatcgtggcagtgattttcatatcatgtggtctcttatgctatgccgcttttggatctgacgtgaaaactgttgttttattgaattttccgcaggacacttcctatactctcactgttcaattactgtatgcattagccattttgttatccacgccgttgcagctatttcccgcgatacgtattttggaaaactggacttttccctcaaatgcatctggtaaatacaacccgaaagtcaaatggttgaaaaactatttccgttgcgctattgtcgtcctgacatctatcctcgcttgggtaggcgccaacgatttggacaaatttgtatcactggtaggctccttcgcgtgtatcccattgatctacatatacccgccattgttgcactataaggcgtccatcttatctggaacctcgagagccaggcttcttttagatttaatcgtcatagtatttggagttgctgtcatggcctacacgtcatggcagacgattaaaatgtggagccagtaa

SEQ ID NO: 92378 - protein, 692 aa, Saccharomyces cerevisiae
MNGKEVSSGSGRTQSNNNKKNNNGGSTGISHASGSPLTDGNGGNSNGNSRSRSRSRKSSGTTGGLLKKPPLLVNNEAVHASVPDASHTSCNNGTLEVSINNPEPHVVDAVARHLIRNPSNSLQLQGGDITRDLYKWTNDHPSSPSQYQYPSQPALSTSIPSQAPSFSNRKRSMSFSAASIASSSHLNNNSEANGNPLAAIGLAPAPMTHEEIRAPGGFRRSFIIQKRRKHNVDAPIPNFFTRNFIEFLTLYGHFAGEDLSEEEEEEEETEEEPEEEALETESTQLVSREHGRHPHKSSTVKAVLLLLKSFVGTGVLFLPKAFHNGGWGFSALCLLSCALISYGCFVSLITTKDKVGVDGYGDMGRILYGPKMKFAILSSIALSQIGFSAAYTVFTATNLQVFSENFFHLKPGSISLATYIFAQVLIFVPLSLTRNIAKLSGTALIADLFILLGLVYVYVYSIYYIAVNGVASDTMLMFNKADWSLFIGTAIFTFEGIGLLIPIQESMKHPKHFRPSLSAVMCIVAVIFISCGLLCYAAFGSDVKTVVLLNFPQDTSYTLTVQLLYALAILLSTPLQLFPAIRILENWTFPSNASGKYNPKVKWLKNYFRCAIVVLTSILAWVGANDLDKFVSLVGSFACIPLIYIYPPLLHYKASILSGTSRARLLLDLIVIVFGVAVMAYTSWQTIKMWSQ

SEQ ID NO: 92379 - DNA, 1971 bp, Schizosaccharomyces pombe
  CDS (1)..(1971)
atgagtaatagtcagtctataaaaataaagaaacctcgttctaacgagaatttcgcttctggttcctactctagtcgtcgctctcagcaaattcatcgattgtcccattcccccatggctgaaggattccacaagcctaaattaaatatttccccttctgagtcaaatttgccaaacaatgttgctgagaacacgacagatacacctgtaaactacggatctatcagagacgaaaatcacaactctaggaaaggaaaagatgtaactctaaattcagatgaagctcattccgagaatgttcccagtacatctgaagaccccgatgttgttcgccgtcatttaggtggacaagccgcagatgatgataatttttcttctcttcagcttcaaggcggtgatatgcaccgccaggtgtatcgttggcaacaggaagtagatcaaaataagcagattcgtcgtggtcgttctcgctcgtttagtgcaaaggtttctgaccccaatcttcatttgcgaagtgttcaggatatgaaacaagctggtggaatgagacgtgattttcttcgtaatcgtgccagtagcatttcgatgagcagtaatgctcatggtaatcccaattttttaaatcgcaactttattgagttcctctctgtttacggtcactttgcaggtgaagaacttagcgaagaagatgaagatgaggatacagacgactttgctatgcctcgagacgttaatccttctttgattcattctactgttccctctgagcaagaacctttgatttctcgtcatggacgttacaaactacagacgcctggaaatgcttcaaacggaaaagctgtacttctacttttaaagtcatttgttggtaccggtgtactctttcttcccaaagcctttaaattaggtggattggtattttcaagtgcgacccttcttattgtgggagtattgtctcatatttgcttcttacttctcattcagactcgaatgaaggtacctggaagttttggtgatattgggggaactttatatggtcctcatatgcgatttgctattcttgcttctatcgtggtttcacagattggattttcgagtgcttatatttcgtttgttgctagcacattacaagcatgtgtaaaagttatatccactactcaccgagaataccatttagctgttttcatttttattcagtttttggtatttgtccctctatcgctcgttcgcaagatatcaaaactttctgctactgctttaattgctgatgtttttattttgctagggatattatatttgtatttctgggacgtgattacgctagccactaaaggaatagccgatgttgcaatgtttaacaaaactgattttagtttatttattggtgttgccatttttacttacgaaggaatttgtttgatattgcctatccaagaacagatggctaaaccaaagaatttacctaagctcctcacaggtgtgatggcagcgatctctctcttgtttatttctattgggttgctgtcttacgctgcttttggttcaaaggtcaaaacggtggttattttgaatatgccagagagtactttcaccgttattatccaattcttgtatgctattgcaattttgcttagtaccccattgcaattgtttcctgcaattgctatcattgaacagggaattttcactagaagcggtaaaagaaacagaaaaattaaatggaggaagaattatcttcgtgtcttaattgttattctagctatcctaatatcttgggctggatcttcacgtcttgatttatttgtaagtatggtaggtagcgtctgttgcataccgcttatctatatgtatccgccgatgctacattataaggcttgtgcaaataattggattttacgtactcttgatatttttatgtttactattggtgccttcgcaatggctttcactacgtacatgacatttttttag

SEQ ID NO: 92380 - protein, 656 aa, Schizosaccharomyces pombe
MSNSQSIKIKKPRSNENFASGSYSSRRSQQIHRLSHSPMAEGFHKPKLNISPSESNLPNNVAENTTDTPVNYGSIRDENHNSRKGKDVTLNSDEAHSENVPSTSEDPDVVRRHLGGQAADDDNFSSLQLQGGDMHRQVYRWQQEVDQNKQIRRGRSRSFSAKVSDPNLHLRSVQDMKQAGGMRRDFLRNRASSISMSSNAHGNPNFLNRNFIEFLSVYGHFAGEELSEEDEDEDTDDFAMPRDVNPSLIHSTVPSEQEPLISRHGRYKLQTPGNASNGKAVLLLLKSFVGTGVLFLPKAFKLGGLVFSSATLLIVGVLSHICFLLLIQTRMKVPGSFGDIGGTLYGPHMRFAILASIVVSQIGFSSAYISFVASTLQACVKVISTTHREYHLAVFIFIQFLVFVPLSLVRKISKLSATALIADVFILLGILYLYFWDVITLATKGIADVAMFNKTDFSLFIGVAIFTYEGICLILPIQEQMAKPKNLPKLLTGVMAAISLLFISIGLLSYAAFGSKVKTVVILNMPESTFTVIIQFLYAIAILLSTPLQLFPAIAIIEQGIFTRSGKRNRKIKWRKNYLRVLIVILAILISWAGSSRLDLFVSMVGSVCCIPLIYMYPPMLHYKACANNWILRTLDIFMFTIGAFAMAFTTYMTFF

SEQ ID NO: 92381 - DNA, 24 bp, Artificial sequence
  primer
atggtcactaacaatggagatggt

SEQ ID NO: 92382 - DNA, 25 bp, Artificial sequence
  primer
ctagacaccgaatatactctggtaa

SEQ ID NO: 92383 - protein, 675 aa, Artificial sequence
  consensus sequence
  Variant (2)..(4): Xaa in position 2 to 4 is any amino acid
  Variant (8)..(9): Xaa in position 8 to 9 is any amino acid
  Variant (11)..(12): Xaa in position 11 to 12 is any amino acid
  Variant (14)..(47): Xaa in position 14 to 47 is any amino acid
  Variant (48)..(84): Xaa in position 48 to 84 is any or no amino acid
  Variant (91)..(103): Xaa in position 91 to 103 is any amino acid
  Variant (104)..(140): Xaa in position 104 to 140 is any or no amino acid
  Variant (142)..(143): Xaa in position 142 to 143 is any amino acid
  Variant (145)..(145): Xaa in position 145 is any amino acid
  Variant (149)..(150): Xaa in position 149 to 150 is any amino acid
  Variant (153)..(153): Xaa in position 153 is any amino acid
  Variant (158)..(173): Xaa in position 158 to 173 is any amino acid
  Variant (174)..(195): Xaa in position 174 to 195 is any or no amino acid
  Variant (197)..(197): Xaa in position 197 is any amino acid
  Variant (198)..(199): Xaa in position 198 to 199 is any or no amino acid
  Variant (201)..(209): Xaa in position 201 to 209 is any amino acid
  Variant (210)..(233): Xaa in position 210 to 233 is any or no amino acid
  Variant (235)..(244): Xaa in position 235 to 244 is any amino acid
  Variant (248)..(248): Xaa in position 248 is any amino acid
  Variant (250)..(250): Xaa in position 250 is any amino acid
  Variant (254)..(254): Xaa in position 254 is any amino acid
  Variant (259)..(259): Xaa in position 259 is any amino acid
  Variant (262)..(262): Xaa in position 262 is any amino acid
  Variant (266)..(267): Xaa in position 266 to 267 is any amino acid
  Variant (270)..(272): Xaa in position 270 to 272 is any amino acid
  Variant (274)..(279): Xaa in position 274 to 279 is any amino acid
  Variant (281)..(282): Xaa in position 281 to 282 is any amino acid
  Variant (284)..(286): Xaa in position 284 to 286 is any amino acid
  Variant (288)..(298): Xaa in position 288 to 298 is any amino acid
  Variant (299)..(299): Xaa in position 299 is any or no amino acid
  Variant (301)..(302): Xaa in position 301 to 302 is any amino acid
  Variant (304)..(307): Xaa in position 304 to 307 is any amino acid
  Variant (309)..(314): Xaa in position 309 to 314 is any amino acid
  Variant (317)..(317): Xaa in position 317 is any amino acid
  Variant (320)..(321): Xaa in position 320 to 321 is any amino acid
  Variant (324)..(324): Xaa in position 324 is any amino acid
  Variant (327)..(328): Xaa in position 327 to 328 is any amino acid
  Variant (331)..(332): Xaa in position 331 to 332 is any amino acid
  Variant (335)..(336): Xaa in position 335 to 336 is any amino acid
  Variant (339)..(339): Xaa in position 339 is any amino acid
  Variant (342)..(357): Xaa in position 342 to 357 is any amino acid
  Variant (358)..(370): Xaa in position 358 to 370 is any or no amino acid
  Variant (372)..(376): Xaa in position 372 to 376 is any amino acid
  Variant (379)..(381): Xaa in position 379 to 381 is any amino acid
  Variant (383)..(383): Xaa in position 383 is any amino acid
  Variant (385)..(385): Xaa in position 385 is any amino acid
  Variant (388)..(391): Xaa in position 388 to 391 is any amino acid
  Variant (393)..(393): Xaa in position 393 is any amino acid
  Variant (395)..(396): Xaa in position 395 to 396 is any amino acid
  Variant (399)..(400): Xaa in position 399 to 400 is any amino acid
  Variant (403)..(423): Xaa in position 403 to 423 is any amino acid
  Variant (424)..(428): Xaa in position 424 to 428 is any or no amino acid
  Variant (431)..(435): Xaa in position 431 to 435 is any amino acid
  Variant (437)..(437): Xaa in position 437 is any amino acid
  Variant (440)..(441): Xaa in position 440 to 441 is any amino acid
  Variant (444)..(444): Xaa in position 444 is any amino acid
  Variant (451)..(452): Xaa in position 451 to 452 is any amino acid
  Variant (456)..(456): Xaa in position 456 is any amino acid
  Variant (459)..(460): Xaa in position 459 to 460 is any amino acid
  Variant (462)..(463): Xaa in position 462 to 463 is any amino acid
  Variant (465)..(467): Xaa in position 465 to 467 is any amino acid
  Variant (469)..(470): Xaa in position 469 to 470 is any amino acid
  Variant (472)..(478): Xaa in position 472 to 478 is any amino acid
  Variant (480)..(482): Xaa in position 480 to 482 is any amino acid
  Variant (484)..(486): Xaa in position 484 to 486 is any amino acid
  Variant (488)..(490): Xaa in position 488 to 490 is any amino acid
  Variant (492)..(495): Xaa in position 492 to 495 is any amino acid
  Variant (497)..(500): Xaa in position 497 to 500 is any amino acid
  Variant (502)..(502): Xaa in position 502 is any amino acid
  Variant (505)..(508): Xaa in position 505 to 508 is any amino acid
  Variant (510)..(512): Xaa in position 510 to 512 is any amino acid
  Variant (514)..(514): Xaa in position 514 is any amino acid
  Variant (518)..(518): Xaa in position 518 is any amino acid
  Variant (532)..(533): Xaa in position 532 to 533 is any amino acid
  Variant (535)..(535): Xaa in position 535 is any amino acid
  Variant (537)..(539): Xaa in position 537 to 539 is any amino acid
  Variant (541)..(542): Xaa in position 541 to 542 is any amino acid
  Variant (543)..(575): Xaa in position 543 to 575 is any or no amino acid
  Variant (579)..(583): Xaa in position 579 to 583 is any amino acid
  Variant (586)..(586): Xaa in position 586 is any amino acid
  Variant (589)..(590): Xaa in position 589 to 590 is any amino acid
  Variant (592)..(594): Xaa in position 592 to 594 is any amino acid
  Variant (596)..(604): Xaa in position 596 to 604 is any amino acid
  Variant (606)..(608): Xaa in position 606 to 608 is any amino acid
  Variant (615)..(616): Xaa in position 615 to 616 is any amino acid
  Variant (618)..(618): Xaa in position 618 is any amino acid
  Variant (622)..(622): Xaa in position 622 is any amino acid
  Variant (625)..(625): Xaa in position 625 is any amino acid
  Variant (627)..(627): Xaa in position 627 is any amino acid
  Variant (630)..(631): Xaa in position 630 to 631 is any amino acid
  Variant (634)..(634): Xaa in position 634 is any amino acid
  Variant (636)..(646): Xaa in position 636 to 646 is any amino acid
  Variant (647)..(660): Xaa in position 647 to 660 is any or no amino acid
  Variant (662)..(667): Xaa in position 662 to 667 is any amino acid
  Variant (669)..(673): Xaa in position 669 to 673 is any amino acid
LXXXGGDXXRXXYXXXXXXXXXXXXXXXXXXXXXXXXXXXXXXXXXXXXXXXXXXXXXXXXXXXXXXXXXXXXXXXXXXXXXXXPGGFRRXXXXXXXXXXXXXXXXXXXXXXXXXXXXXXXXXXXXXXXXXXXXXXXXXXTXXFXEFLXXYGXFAGEXXXXXXXXXXXXXXXXXXXXXXXXXXXXXXXXXXXXXXEXXXLXXXXXXXXXXXXXXXXXXXXXXXXXXXXXXXXXGXXXXXXXXXXLLKXFXGTGXLFLPXAFXNGGXXFSXXXLXXXXXXSXXCXXXLXXXXXXXXXXXXGXXGXXXXGXXXXXXILXSIXXSQXGFXXAYXXFTXXNLXAFXXXXXXXXXXXXXXXXXXXXXXXXXXXXXQXXXXXPLXXXRXIXKLXXXXLXAXXFIXXGLXXXXXXXXXXXXXXXXXXXXXXXXXXFNXXXXXLXIGXXIFXFEGIGLXXPIQXSMXXPXXFXXXLXXVXXXXXXXFXXXGXXXYXXXGXXXXTXXXXNXPQXXXXVXXXQXLYSXAILLSTPLQLFPAXXIXEXXXFXXXXXXXXXXXXXXXXXXXXXXXXXXXXXXXXXXXSGKXXXXXKWXKNXXRXXXVXXXXXXXXXGXXXLDKFVSXXGXFACXPLXYXYPXXLHXKXXXXXXXXXXXXXXXXXXXXXXXXXDXXXXXXGXXXXXYT

SEQ ID NO: 92384 - protein, 61 aa, Artificial sequence
  protein pattern
  Variant (4)..(4): Xaa in position 4 is any amino acid
  Variant (5)..(5): Xaa in position 5 is Asp, Asn or Ser
  Variant (6)..(7): Xaa in position 6 to 7 is any amino acid
  Variant (8)..(8): Xaa in position 8 is Ile or Val
  Variant (11)..(11): Xaa in position 11 is any or no amino acid
  Variant (13)..(13): Xaa in position 13 is any or no amino acid
  Variant (15)..(16): Xaa in position 15 to 16 is any amino acid
  Variant (18)..(20): Xaa in position 18 to 20 is any amino acid
  Variant (22)..(26): Xaa in position 22 to 26 is any amino acid
  Variant (27)..(27): Xaa in position 27 is Ile, Leu or Val
  Variant (28)..(28): Xaa in position 28 is Ala, Gly or Ser
  Variant (29)..(30): Xaa in position 29 to 30 is any amino acid
  Variant (31)..(31): Xaa in position 31 is Gly or Asn
  Variant (32)..(32): Xaa in position 32 is Ala, Gly or Ser
  Variant (33)..(33): Xaa in position 33 is Asp, Glu, Gly, Asn, Gln or Ser
  Variant (34)..(34): Xaa in position 34 is any amino acid
  Variant (35)..(35): Xaa in position 35 is Ile or Leu
  Variant (37)..(37): Xaa in position 37 is any amino acid
  Variant (39)..(39): Xaa in position 39 is Leu or Val
  Variant (40)..(40): Xaa in position 40 is Ala or Ser
  Variant (41)..(41): Xaa in position 41 is Phe, Ile, Leu, Met or Val
  Variant (42)..(42): Xaa in position 42 is any amino acid
  Variant (44)..(44): Xaa in position 44 is Cys, Asn or Ser
  Variant (45)..(45): Xaa in position 45 is Phe, Leu or Val
  Variant (46)..(46): Xaa in position 46 is Ala or Cys
  Variant (48)..(48): Xaa in position 48 is Ile or Val
  Variant (51)..(51): Xaa in position 51 is Ile or Val
  Variant (52)..(52): Xaa in position 52 is Phe or Tyr
  Variant (53)..(53): Xaa in position 53 is Ile, Met or Val
  Variant (56)..(56): Xaa in position 56 is Ala, Pro or Ser
  Variant (57)..(57): Xaa in position 57 is any amino acid
  Variant (58)..(58): Xaa in position 58 is Ile or Leu
  Variant (60)..(60): Xaa in position 60 is any amino acid
  Variant (61)..(61): Xaa in position 61 is Lys or Arg
SGKXXXXXKWXKXNXXRXXXVXXXXXXXXXXXXXXDXFXXXXGXXXCXPLXXXYPXXXHXX

SEQ ID NO: 92385 - protein, 58 aa, Artificial sequence
  protein pattern
  Variant (2)..(3): Xaa in position 2 to 3 is any amino acid
  Variant (5)..(6): Xaa in position 5 to 6 is any amino acid
  Variant (7)..(9): Xaa in position 7 to 9 is any or no amino acid
  Variant (11)..(11): Xaa in position 11 is Ala, Ser or Thr
  Variant (12)..(12): Xaa in position 12 is Phe or Tyr
  Variant (15)..(15): Xaa in position 15 is Ile or Val
  Variant (18)..(18): Xaa in position 18 is Ile, Leu or Val
  Variant (19)..(19): Xaa in position 19 is Ile or Leu
  Variant (21)..(21): Xaa in position 21 is Ile or Val
  Variant (22)..(22): Xaa in position 22 is Gln or Thr
  Variant (23)..(23): Xaa in position 23 is Asp, Glu or Ser
  Variant (26)..(27): Xaa in position 26 to 27 is any amino acid
  Variant (29)..(30): Xaa in position 29 to 30 is any amino acid
  Variant (32)..(34): Xaa in position 32 to 34 is any amino acid
  Variant (35)..(35): Xaa in position 35 is Leu or Met
  Variant (36)..(37): Xaa in position 36 to 37 is any amino acid
  Variant (38)..(38): Xaa in position 38 is Ile or Val
  Variant (39)..(39): Xaa in position 39 is Ile or Met
  Variant (40)..(44): Xaa in position 40 to 44 is any amino acid
  Variant (45)..(45): Xaa in position 45 is Ile, Leu or Val
  Variant (46)..(46): Xaa in position 46 is Phe or Met
  Variant (47)..(49): Xaa in position 47 to 49 is any amino acid
  Variant (50)..(50): Xaa in position 50 is Ala or Gly
  Variant (51)..(51): Xaa in position 51 is any amino acid
  Variant (52)..(52): Xaa in position 52 is Phe, Ile, Leu or Val
  Variant (53)..(53): Xaa in position 53 is Cys, Gly or Ser
  Variant (55)..(55): Xaa in position 55 is any amino acid
  Variant (56)..(56): Xaa in position 56 is Ala or Thr
  Variant (57)..(57): Xaa in position 57 is Phe or Tyr
FXXTXXXXXFXXEGXGLXXPXXXSMXXPXXFXXXXXXXXXXXXXXXXXXXXXXYXXXG

SEQ ID NO: 92386 - protein, 58 aa, Artificial sequence
  protein pattern
  Variant (2)..(10): Xaa in position 2 to 10 is any amino acid
  Variant (11)..(11): Xaa in position 11 is any or no amino acid
  Variant (14)..(14): Xaa in position 14 is any or no amino acid
  Variant (16)..(16): Xaa in position 16 is Ala or Ser
  Variant (17)..(17): Xaa in position 17 is Phe or Leu
  Variant (18)..(18): Xaa in position 18 is Ile or Val
  Variant (20)..(20): Xaa in position 20 is Ser or Thr
  Variant (22)..(22): Xaa in position 22 is Ile or Val
  Variant (23)..(23): Xaa in position 23 is Ile or Leu
  Variant (26)..(26): Xaa in position 26 is Gly or Pro
  Variant (27)..(27): Xaa in position 27 is any amino acid
  Variant (29)..(29): Xaa in position 29 is Phe or Tyr
  Variant (30)..(31): Xaa in position 30 to 31 is any amino acid
  Variant (34)..(35): Xaa in position 34 to 35 is any amino acid
  Variant (38)..(40): Xaa in position 38 to 40 is any amino acid
  Variant (42)..(44): Xaa in position 42 to 44 is any amino acid
  Variant (45)..(45): Xaa in position 45 is Ala, Gly or Ser
  Variant (46)..(46): Xaa in position 46 is Ala, Ile, Leu or Val
  Variant (47)..(47): Xaa in position 47 is any amino acid
  Variant (48)..(48): Xaa in position 48 is Ser or Thr
  Variant (49)..(50): Xaa in position 49 to 50 is any amino acid
  Variant (51)..(51): Xaa in position 51 is Ala, Cys or Ser
  Variant (52)..(52): Xaa in position 52 is Phe or Tyr
  Variant (53)..(53): Xaa in position 53 is any amino acid
  Variant (54)..(54): Xaa in position 54 is Gly, Ile or Leu
  Variant (56)..(56): Xaa in position 56 is Ile, Leu or Val
  Variant (57)..(57): Xaa in position 57 is any amino acid
  Variant (58)..(58): Xaa in position 58 is Ala, Cys, Ser or Thr
GXXXXXXXXXXLLXKXXXGXGXXFLXXAXXXGGXXFSXXXLXXXXXXXXXXXXXLXXX

SEQ ID NO: 92387 - protein, 25 aa, Artificial sequence
  protein pattern
  Variant (2)..(2): Xaa in position 2 is Phe, Ile or Leu
  Variant (3)..(3): Xaa in position 3 is Phe, Leu or Val
  Variant (5)..(5): Xaa in position 5 is Ala or Ser
  Variant (6)..(6): Xaa in position 6 is any amino acid
  Variant (9)..(9): Xaa in position 9 is any or no amino acid
  Variant (11)..(11): Xaa in position 11 is any amino acid
  Variant (12)..(12): Xaa in position 12 is any or no amino acid
  Variant (15)..(15): Xaa in position 15 is Ile or Leu
  Variant (17)..(17): Xaa in position 17 is Ile, Leu or Met
  Variant (20)..(20): Xaa in position 20 is Ala or Pro
  Variant (21)..(21): Xaa in position 21 is Ile, Leu or Val
  Variant (22)..(22): Xaa in position 22 is any amino acid
  Variant (23)..(23): Xaa in position 23 is Ile, Leu or Val
  Variant (24)..(24): Xaa in position 24 is any amino acid
QXXYXXAIXLXXTPXQXFPXXXXXE

SEQ ID NO: 92388 - protein, 26 aa, Artificial sequence
  protein pattern
  Variant (2)..(4): Xaa in position 2 to 4 is any amino acid
  Variant (5)..(7): Xaa in position 5 to 7 is any or no amino acid
  Variant (9)..(9): Xaa in position 9 is Ile, Leu, Met or Val
  Variant (10)..(10): Xaa in position 10 is Asp or Glu
  Variant (13)..(13): Xaa in position 13 is any amino acid
  Variant (14)..(14): Xaa in position 14 is Ile, Leu, Met or Val
  Variant (15)..(15): Xaa in position 15 is Phe or Tyr
  Variant (17)..(17): Xaa in position 17 is any amino acid
  Variant (22)..(22): Xaa in position 22 is any amino acid
  Variant (23)..(23): Xaa in position 23 is Phe or Leu
  Variant (24)..(24): Xaa in position 24 is Ala, Asp, Glu, Asn or Ser
  Variant (25)..(25): Xaa in position 25 is Asp or Glu
  Variant (26)..(26): Xaa in position 26 is Asp, Glu, Gln or Thr
PXXXXXXFXXFLXXXGXFAGEXXXXX

SEQ ID NO: 92389 - protein, 9 aa, Artificial sequence
  protein pattern
  Variant (7)..(7): Xaa in position 7 is any amino acid
  Variant (8)..(8): Xaa in position 8 is Phe, His or Tyr
  Variant (9)..(9): Xaa in position 9 is Ile, Leu or Val
PGGFRRXXX

SEQ ID NO: 92390 - protein, 21 aa, Artificial sequence
  protein pattern
  Variant (2)..(3): Xaa in position 2 to 3 is any amino acid
  Variant (4)..(4): Xaa in position 4 is Ile, Leu, Met or Val
  Variant (5)..(5): Xaa in position 5 is any amino acid
  Variant (6)..(6): Xaa in position 6 is Phe, Ile or Val
  Variant (7)..(7): Xaa in position 7 is Phe, Ile, Leu or Val
  Variant (9)..(12): Xaa in position 9 to 12 is any amino acid
  Variant (13)..(13): Xaa in position 13 is Ala, Gly, Ile, Leu or Val
  Variant (15)..(15): Xaa in position 15 is any or no amino acid
  Variant (17)..(17): Xaa in position 17 is Ser or Thr
  Variant (18)..(20): Xaa in position 18 to 20 is any amino acid
  Variant (21)..(21): Xaa in position 21 is Ile, Leu, Met or Val
DXXXXXXGXXXXXYXTXXXXX

SEQ ID NO: 92391 - DNA, 1461 bp, Saccharomyces cerevisiae
  CDS (1)..(1461)
atgtcgcatactttaaaatcgaaaacgctccaagagctggacattgaggagattaaggaaactaacccattgctcaaactagttcaagggcagaggattgttcaagttccggaactagtgcttgagtctggcgtggtcataaataatttccctattgcttataagacgtggggtacactgaatgaagctggtgataatgttctggtaatttgtcatgccttgactgggtccgcagatgttgctgactggtggggccctcttctgggtaacgacttagcattcgacccatcaaggttttttatcatatgtttaaactctatgggctctccatatgggtctttttcgccattaacgataaatgaggagacgggcgttagatatggacccgaattcccattatgtactgtgcgcgatgacgttagagctcacagaattgttctggattctctgggagtaaagtcaatagcctgtgttattggtggctctatgggggggatgctgagtttggaatgggctgccatgtatggtaaggaatatgtgaagaatatggttgctctggcgacatcagcaagacattctgcctggtgcatatcgtggtctgaggctcaaagacaatcgatttactcagatcccaactacttggacgggtactatccggtagaggagcaacctgtggccggactatcggctgcacgtatgtctgcattgttgacgtacaggacaagaaacagtttcgagaacaaattctccagaagatctccttcaatagcacaacaacaaaaagctcaaagggaggagacacgcaaaccatctactgtcagcgaacactccctacaaatccacaatgatgggtataaaacaaaagccagcactgccatcgctggcatttctgggcaaaaaggtcaaagcgtggtgtccaccgcatcttcttcggattcattgaattcttcaacatcgatgacttcggtaagttctgtaacgggtgaagtgaaggacataaagcctgcgcagacgtatttttctgcacaaagttacttgaggtaccagggcacaaagttcatcaataggttcgacgccaattgttacattgccatcacacgtaaactggatacgcacgatttggcaagagacagagtagatgacatcactgaggtcctttctaccatccaacaaccatccctgatcatcggtatccaatctgatggactgttcacatattcagaacaagaatttttggctgagcacataccgaagtcgcaattagaaaaaattgaatctcccgaaggccacgatgccttcctattggagtttaagctgataaacaaactgatagtacaatttttaaaaaccaactgcaaggccattaccgatgccgctccaagagcttggggaggtgacgttggtaacgatgaaacgaagacgtctgtctttggtgaggccgaagaagttaccaactggtag

SEQ ID NO: 92392 - protein, 486 aa, Saccharomyces cerevisiae
MSHTLKSKTLQELDIEEIKETNPLLKLVQGQRIVQVPELVLESGVVINNFPIAYKTWGTLNEAGDNVLVICHALTGSADVADWWGPLLGNDLAFDPSRFFIICLNSMGSPYGSFSPLTINEETGVRYGPEFPLCTVRDDVRAHRIVLDSLGVKSIACVIGGSMGGMLSLEWAAMYGKEYVKNMVALATSARHSAWCISWSEAQRQSIYSDPNYLDGYYPVEEQPVAGLSAARMSALLTYRTRNSFENKFSRRSPSIAQQQKAQREETRKPSTVSEHSLQIHNDGYKTKASTAIAGISGQKGQSVVSTASSSDSLNSSTSMTSVSSVTGEVKDIKPAQTYFSAQSYLRYQGTKFINRFDANCYIAITRKLDTHDLARDRVDDITEVLSTIQQPSLIIGIQSDGLFTYSEQEFLAEHIPKSQLEKIESPEGHDAFLLEFKLINKLIVQFLKTNCKAITDAAPRAWGGDVGNDETKTSVFGEAEEVTNW

SEQ ID NO: 92393 - DNA, 1623 bp, Methanosarcina acetivorans C2A
  CDS (1)..(1623): transl_table=11
atggcggtttcttccgggaattcttccgtgaactcttccaaaaaacttttttcgggaaaaaaaggccagagcatcgggatagtccgctcgatgaactataaaatcccggggaccttcggccttgagagcggaaaaaccctttccggcgtcagggtagagtacgaaatgtacgggaagatgaatgccgataagagcaacgtcatcctgatctgccacgcccttacaggcgatgcccatgctgccgggtttcatgagggtgacaaaaaaccgggctggtgggagatcgtaatcggccccaataaggcatttgacactgaaaaatactgcgtcatctgctcaaacatcctgggaggctgtaaaggctctacaggtccttcttccatagaccccgaaaccggaaaacactacggcatctcctttcccgtaattacggtcaaggacatggtaaatgcccagaaaaaactgatagagcacctcggagtaaaacaactttttgcggttgcaggcggttccatggggggaatgcaggtactccagtggacggtcagctaccccgaaatggtaagaaaagcaattgcaatagcgaccacagcctccacaactccgcagcaaatcgcattcggagcaatcggcaggaaagccataaccgatgacccgaaatggaacggcggagactattacggaaaagagataccttcccaggggcttgccctcgcccgaatgataggacacattacatacctgagcgacgcttcaatgcagaataagttcggaaggctccagcaggataccgataaatcagggataaaaggcacgacgggtacggaaggaaagaattcatccgaaatatcctctgaaatatcctcaatatcctctgagatctcctccgagctctcctacgactttaccccaaacttccaggtcgagagctacctgaactacaaaggagataatttcacaaaacgttttgatgccaattcttacctgtacattacaaaagctgtggactactttgaccttgcaaagaacggctcccttatagagggcttttccggagttactgcaaaataccttgtaatttccatatcttcagactggctctatcccccttaccagtcccaggaaatcgtatcggctcttactgcaaacggagtcgatgccagatatgaagaaatcagatcccagcacgggcacgatgcgttcctgcttgaagaaggacagctgagctacctgctaaggagcttcctctcgcacatccttgtcagcgatgtcatgaaccggaacttctatacggtatcgagagacgaaaccatcgaacactcctcaaagctcatggtaaaagaatgcgtaagccacctgccggtcatctcagaggacggaaaactcgaaggcatagtcacatcctgggatatcacaaaagcagtggcatgcaaaatcaacgagctggacgaaatcataacgcgggatgtaaagtacgtatatgaggatgaaaagattgaacacgcatcctcaataatggaaaaacactcgatttccgcactccccgtaatagattccgagcaccgtataataggcattgttacaagcgaaagcataagtgctctttttggcaagtatgattga

SEQ ID NO: 92394 - protein, 540 aa, Methanosarcina acetivorans C2A
MAVSSGNSSVNSSKKLFSGKKGQSIGIVRSMNYKIPGTFGLESGKTLSGVRVEYEMYGKMNADKSNVILICHALTGDAHAAGFHEGDKKPGWWEIVIGPNKAFDTEKYCVICSNILGGCKGSTGPSSIDPETGKHYGISFPVITVKDMVNAQKKLIEHLGVKQLFAVAGGSMGGMQVLQWTVSYPEMVRKAIAIATTASTTPQQIAFGAIGRKAITDDPKWNGGDYYGKEIPSQGLALARMIGHITYLSDASMQNKFGRLQQDTDKSGIKGTTGTEGKNSSEISSEISSISSEISSELSYDFTPNFQVESYLNYKGDNFTKRFDANSYLYITKAVDYFDLAKNGSLIEGFSGVTAKYLVISISSDWLYPPYQSQEIVSALTANGVDARYEEIRSQHGHDAFLLEEGQLSYLLRSFLSHILVSDVMNRNFYTVSRDETIEHSSKLMVKECVSHLPVISEDGKLEGIVTSWDITKAVACKINELDEIITRDVKYVYEDEKIEHASSIMEKHSISALPVIDSEHRIIGIVTSESISALFGKYD

SEQ ID NO: 92395 - DNA, 1515 bp, Magnaporthe grisea 70-15
  CDS (1)..(1515)
atgtcgtcttcatcacccactggtggagagaggctgcgttacgaaagaacgcggagccagccggagaaccccttcgcgacgctcattccggaccagcagatagcaatcatcccatccttcactctggagtctggtgtgacgcttcgcaatgtgcccgtggcgtacacaaccaggggccagctgaacgcagccggagacaatgccatggtcatatgccatgccctgacaggaagcgccgatgttgccgactggtggggtccgctgttgggcggccctggtcgtgcctttgacacctcgaggttcttcatcgtttgtatgaacagtctgggaagcccatatggcacggccagcccggttacggccaaggatggtgacccgagcctgggccagtacggcccggaattcccccttactacgattcgcgatgacgtgaacttgcacaagatgctactggacgaccttggtgtcaagcaagtagccgcagtcgtcggtggatctctgggaggcatgttcgttctggagtgggcttactttggaaaagactacgttcgctgcgtcgtcccaatagccacttctagccgtcatagtgcttggggaatcagctggggcgaggcacaacggcagagcatttacgcggaccccaaatacaatgacggttactaccctttctcggatcctccgtctaccgggctcggagccgctcgtatgtcggcactgctgacttaccgaagccggaactcctttgaggcccgtttcggtcggaacatccccgatccatcccggcgccaaacaataagagaacggccccgacccagcacgccatctgaggctcacttccacatccataacgacggccacaacatatcccgggatggcctatcccggcacaacagcaatggccaggggagcaaggcagcgaataccggcgccaatcctaccgccacccctgccgtggcgcaagcggctgccgaggagcgatcaatggatccccagttccacggcccggaaaagaaggaaagtctcaccggtggagatgccgtaccgacctcaacctacttctccgcgcaatcatacctgcgataccaaggcgagaagttcgtcaagcgttttgatagcaactgctacattgctatgactcgaaagctcgacacgcacgacgtgtcgcgtagccgtgccccgtcgattgccaatgcgctggccatgattgagcagcccacattagttctgggaatcgagagcgacgggctcttcacctttgcagagcaggaggagatagctgagcacgtccccaacgcgcgactagagaagattgacagcccggagggacacgacgcctttttgctgcagttcgaacaggtcaatcgctacaccctcgagttcttgcgggaagtgcttccagacatcatggagaaggatggcgatggcagctcagagacagtggagagttcggtgggacagcttaccaagtccagcacctttggcgaggcggaggtcgatgatattacggcttggtag

SEQ ID NO: 92396 - protein, 504 aa, Magnaporthe grisea 70-15
MSSSSPTGGERLRYERTRSQPENPFATLIPDQQIAIIPSFTLESGVTLRNVPVAYTTRGQLNAAGDNAMVICHALTGSADVADWWGPLLGGPGRAFDTSRFFIVCMNSLGSPYGTASPVTAKDGDPSLGQYGPEFPLTTIRDDVNLHKMLLDDLGVKQVAAVVGGSLGGMFVLEWAYFGKDYVRCVVPIATSSRHSAWGISWGEAQRQSIYADPKYNDGYYPFSDPPSTGLGAARMSALLTYRSRNSFEARFGRNIPDPSRRQTIRERPRPSTPSEAHFHIHNDGHNISRDGLSRHNSNGQGSKAANTGANPTATPAVAQAAAEERSMDPQFHGPEKKESLTGGDAVPTSTYFSAQSYLRYQGEKFVKRFDSNCYIAMTRKLDTHDVSRSRAPSIANALAMIEQPTLVLGIESDGLFTFAEQEEIAEHVPNARLEKIDSPEGHDAFLLQFEQVNRYTLEFLREVLPDIMEKDGDGSSETVESSVGQLTKSSTFGEAEVDDITAW

SEQ ID NO: 92397 - DNA, 1509 bp, Gibberella zeae PH-1
  CDS (1)..(1509)
atgtcagaaatcaacactacaaacggcgactcccgtaagcactatgcaccctatactgtgatcctatacatcacggtttatcacaatggttcccccataacgcaatcacagcccgagaacccgttcgctgctctcatccctgagcagcagctagcgattgttcctgaatttactctcgagtctggagttactctttacaacctcccagtcgcttacacaactcgcggcaagctcaatgaggaaggcaacaatgccatggtcatttgtcatgctctcactggaagtgcggatgtgagcgattggtggggtcctcttcttggtggtcctggtcgggctttcgacacctcgagattcttcatcgtctgcatgaacagtctgggcagtccgtacggtactgcgagcccagtgacagcaaaggacaacgaccccagcaagggccgatatggacctgagtttcctctcacaaccattcgcgacgatgtcaacctccacaagcttatcctggatgacctaggtgtcaagcagctagccgctgttgtaggaggttctcttggcggcatgtttgtgcttgagtgggcgtactttggaaaggactacatccgctgtgtcgtcccaattgctacttcaagcaggcacagtgcttggggcatcagctggggtgaagcccagcgacagagcatctacgccgaccccaagtatgacgatggatactactctttcgatgatccaccctccactggcctgggtgcggcccgcatgtctgctctccttacatatcgaagccgcaactcatttgagtcgcggtttggacgcaacatccccgacccgtccaaggtccaaaccattggcggccgaccacgcccctcaactccatcagaggcgcactttcaaatccacaacgacggccatgttgtcaagcgcacctccatatcccagagcagtgcagccgatgccgcctcagcgcctcagacacctgcagagcctgatgttgctgaccctcaatttcatggtcctagcaacggtagtcttaccggaggggatatgccacaatcgcactacttctctgcccaatcgtatctgcggtaccagggccgtaaatttgttacgcgattcgacagcaactgttacattgccatgactcgtaagttggacacacatgacgtgtcgcgcaaccgggcagataccattgcagatgcattggctatgattcagcagcccacactcgttttgggaattgaaagtgatggcctctttacatttgcagaacaagaggagatcgcgcagcatgtccccaacgcacgccttgagcgaatcgagagccccgagggtcacgatgcgttcttactgcagttcgagcaagtcaacaactatgttctatcatttttcaaggaagtgctgccagacattatgtctaaggacggcgctgtacctgaggaagctagtgttgggcagattaccaagtcgagcacgtttggtgaagctgaagtcgaggacatcactgcctggtag

SEQ ID NO: 92398 - protein, 502 aa, Gibberella zeae PH-1
MSEINTTNGDSRKHYAPYTVILYITVYHNGSPITQSQPENPFAALIPEQQLAIVPEFTLESGVTLYNLPVAYTTRGKLNEEGNNAMVICHALTGSADVSDWWGPLLGGPGRAFDTSRFFIVCMNSLGSPYGTASPVTAKDNDPSKGRYGPEFPLTTIRDDVNLHKLILDDLGVKQLAAVVGGSLGGMFVLEWAYFGKDYIRCVVPIATSSRHSAWGISWGEAQRQSIYADPKYDDGYYSFDDPPSTGLGAARMSALLTYRSRNSFESRFGRNIPDPSKVQTIGGRPRPSTPSEAHFQIHNDGHVVKRTSISQSSAADAASAPQTPAEPDVADPQFHGPSNGSLTGGDMPQSHYFSAQSYLRYQGRKFVTRFDSNCYIAMTRKLDTHDVSRNRADTIADALAMIQQPTLVLGIESDGLFTFAEQEEIAQHVPNARLERIESPEGHDAFLLQFEQVNNYVLSFFKEVLPDIMSKDGAVPEEASVGQITKSSTFGEAEVEDITAW

SEQ ID NO: 92399 - DNA, 1500 bp, Candida glabrata CBS 138
  CDS (1)..(1500)
atgggaagaagggcaacaaacatgttgaaagaagttgatattgcagagctgagcaagactaatccgtttgtgaagttggtgaaggggcagaagatagtggaggttcctgagttggtgttggagtctggtgtggtgttgaacaattttccgattgcgtacaagacatggggtcatttgaacagtcgaggcgataactgtatggttatctgtcatgcgcttacggggtcttccgatgtgtcggactggtggggacccatgcttggtaatgaccttgggttcgacccatcgcggtttttcatcgtgtgcttgaactctatgggctctccgtacggctccttctcgccgctgactattaatgaggaaaccggcaggccatacggcccagagttccccttgtgtacggtacgggacgatgtcagggctcacaagattgttctggagtcgctgggtgtcaagtcggtcgcatgtgtgatcggtggctctatgggtggtatgctggctttggaatgggcctcgctatatggccacggtccagaaaaatacgtgcacaacctggtggcattggcgacctcagcaagacactctgcatggtgtatatcgtggtcagaagctcaaagacagtccatttattctgaccctaagtacatggacggttactacacattcgatgaaccacctgtaactggtctctctgcagcacgtatgagcgctctgctgacttacaggtccagaaacagttttgaaaacaagttctccagaaggaaaccatccatagaacaggcacagaaatctaacagaaaagcctctgcaggtgagggacaagaagcaacgataccgtcctctgtcagcgagcaatcgttacgcatccacaacgacggctacaggtctagcactccacagcctagaatcgagttcaacagaaatggaagaaacggaagcgtggtttcagacgtatcctcggctgaatctatcaaatctgcatcttcgttgacctccgtgagttcagtgaccggtgaagcgaaggaggttaagcctgcacagacatatttctctgcccagagttacttgagataccaaggcgccaagttcgtcaataggttcgatgccaactgctacattgctatcactagaaagctagatacacacgatcttgccagagacaggccagaatacgacgaggacatagaaagagtcctagagagtatcgacatcccaagtttgatcattggtattaaatcagatggactatttacttactcggagcaagagttcttggccgagtatttgccaaactcacgtctcgaaaagatagaatcccccgagggccacgacgcattcctactggagttcaaattgatcaaccagttgattctagaattcttgaacaagaacgtgaaggatatcatgactgccccaccacgtcaatggaccggtgaaataggtcaagacgaacatgctggttccgtgttcggcgaagccgaagaagtaacaaactggtag

SEQ ID NO: 92400 - protein, 499 aa, Candida glabrata CBS 138
MGRRATNMLKEVDIAELSKTNPFVKLVKGQKIVEVPELVLESGVVLNNFPIAYKTWGHLNSRGDNCMVICHALTGSSDVSDWWGPMLGNDLGFDPSRFFIVCLNSMGSPYGSFSPLTINEETGRPYGPEFPLCTVRDDVRAHKIVLESLGVKSVACVIGGSMGGMLALEWASLYGHGPEKYVHNLVALATSARHSAWCISWSEAQRQSIYSDPKYMDGYYTFDEPPVTGLSAARMSALLTYRSRNSFENKFSRRKPSIEQAQKSNRKASAGEGQEATIPSSVSEQSLRIHNDGYRSSTPQPRIEFNRNGRNGSVVSDVSSAESIKSASSLTSVSSVTGEAKEVKPAQTYFSAQSYLRYQGAKFVNRFDANCYIAITRKLDTHDLARDRPEYDEDIERVLESIDIPSLIIGIKSDGLFTYSEQEFLAEYLPNSRLEKIESPEGHDAFLLEFKLINQLILEFLNKNVKDIMTAPPRQWTGEIGQDEHAGSVFGEAEEVTNW

SEQ ID NO: 92401 - DNA, 1464 bp, Kluyveromyces lactis NRRL Y-1140
  CDS (1)..(1464)
atgagcactgtaaaaagttcattaccagagttagaccaagaggaactgtcgaagactaacccattcatcaaaattgtgcatggtcaaactattgttgaagttccggaattggaactagaatgtggaatcacgattaataatttcccgatcgcatataagacatggggatatctaaacgaggccaaggataatgtcttagttatttgccatgcgttgactggctcgtcggatgtctctgactggtggggtcctttactagggaacggattagcttttgatccatccaaattttttattatttgtttgaattctatgggttcgccatacggttcattttcgccattatctattgattcttccactggtgaaagatacggacctgagttccctctttgtaccgttagggacgatgtgaatgcacataggatagtattggactcacttggaataagctctatagcatgtgttattggtggttctatgggtggtatggtcgccttggaatgggctgcaatttttggtactgattacgtcaaaaaccttatcgctttggcaacatcagcaagacactctgcctggtgtatatcctggtcggaagcacaaagacagtctatatattcagacccgaagtatcttgatgggtattacccattagaagagccaccaaccgttgggttatctgctgccagaatgtcggcattattgacttatcgttcaagaaacagttttgaaaacaaatttgctagatcagttccttctcagcaacatcaacagaaatctggccgttctgaatcacaaaatagtctcacgtcaaagaaattgcaagaactcaataaagaaattcacaacgacggccattatcgcagaaactcaccatcatttgaaagaaaaccaagtgtatcatctgtttcctcatcttgttcttcaccaagggattctaatcactctttgtcatcatctacatctactacttctttgaacagattaaagggttcaaaacaggttaaacccgtacaaacatacttctctgcccaatcttacttgcgttaccaaggtgagaaattcattaaaagatttgatgccaactgttacatttcaatcaccagaaaattggacacacatgatttggctcgtgacagagatgatgaagatataactcatgttcttgggtccttcaaacagccaactttagtcatcggtatctcttcagatggactgttcacttactctgaacaggaatttttggcaaataacattccaaaggccagattggaaaagatagactcgccggaagggcatgatgcatttttattagagtttaaattgataaatgaattgattaaaagtttccttgcgactaactgcaagggcctggtcagttcagagggtcgtctttggcaggacacaagcgaagttgtaacaaactctgtgtttggagaagccgaagaagttaccaattggtga

SEQ ID NO: 92402 - protein, 487 aa, Kluyveromyces lactis NRRL Y-1140
MSTVKSSLPELDQEELSKTNPFIKIVHGQTIVEVPELELECGITINNFPIAYKTWGYLNEAKDNVLVICHALTGSSDVSDWWGPLLGNGLAFDPSKFFIICLNSMGSPYGSFSPLSIDSSTGERYGPEFPLCTVRDDVNAHRIVLDSLGISSIACVIGGSMGGMVALEWAAIFGTDYVKNLIALATSARHSAWCISWSEAQRQSIYSDPKYLDGYYPLEEPPTVGLSAARMSALLTYRSRNSFENKFARSVPSQQHQQKSGRSESQNSLTSKKLQELNKEIHNDGHYRRNSPSFERKPSVSSVSSSCSSPRDSNHSLSSSTSTTSLNRLKGSKQVKPVQTYFSAQSYLRYQGEKFIKRFDANCYISITRKLDTHDLARDRDDEDITHVLGSFKQPTLVIGISSDGLFTYSEQEFLANNIPKARLEKIDSPEGHDAFLLEFKLINELIKSFLATNCKGLVSSEGRLWQDTSEVVTNSVFGEAEEVTNW

SEQ ID NO: 92403 - DNA, 1461 bp, Debaryomyces hansenii CBS767
  CDS (1)..(1461)
atgactttactatctccaaacccaacttataaagatattaccgaagaacaaaaggccaataattcatatgctacttttgttccaggtcaaacaattgttgaaattccttcatacacattagagtgtggcgaagttttgaataactttccagtggcatataaaacatggggtagattgaataaagatagagataacgtttttattatttgtcatgccttaactggatcttctgatgttcaagattggtggggacctttattaggtacagataaaacgtttgatccttccagatttttcataatttgcatcaatttcttgggatcaccctatggatcttgctcgccagtaagcatagataaatctaccgggaagccatacggtccattatttccattagtgactgttaaggatgatataagtattcaaaagttgatattagattcattaggtgtagaaggcatcgcatgtgttataggtggctctatgggaggaatgattgctttggaatacgccgctacctacaatgattcaccatatgttaaatctgtaatttctctagcaacatctgctagggcatctgcctggtgtatttcgtggaatgaaacacagagacaatgcattttcagtgatccaaattatgacgatgggtattattatgaaaacaaaaatggcattaaaccagattcgggactaagtgcagctagaatggcagcattgttaacatatagatcaagaaattcgttcgagacaaggtttggaaggaatttgccgtccgttaaagctaatattgaaccgaaagaaatttctgaagaagaacgtaaaaagcaagaacaagaacaaggaattagataccctaaaaataaggatgaagaaaactggctcttgcataatgaaggatccagatctaggtcatctgtgaatagaagttcatcatcattaagtgtgtcttcatccgttaagccacaaacttattttaccgctcaatcttatttaagatatcaaggtaataaatttgttaaccgttttgatgcaaattgttatatttcaattacaagaaaattagatacccatgatataactaggaacagggttgattcagagcaagttttggaagatcctttaccagattttctttcaaatttgaaacaaccacacttagttattggtatccaatctgacgggctatttacatatggagaacaacagttattagggcaatgcattccgaattgtgttctcaagaagataaattcgcccgaaggtcacgatgcatttctattagaatttgaaatcattgataaatactgcaaagagtttttacatagtaagctccctgaatttttcagcccagagtcaaataaggtagaactctttgaagattggaacaagtatgtagctagttccgataatggtggtaattcggttttcggtgaagctgaaacgaatattactaattggtaa

SEQ ID NO: 92404 - protein, 486 aa, Debaryomyces hansenii CBS767
MTLLSPNPTYKDITEEQKANNSYATFVPGQTIVEIPSYTLECGEVLNNFPVAYKTWGRLNKDRDNVFIICHALTGSSDVQDWWGPLLGTDKTFDPSRFFIICINFLGSPYGSCSPVSIDKSTGKPYGPLFPLVTVKDDISIQKLILDSLGVEGIACVIGGSMGGMIALEYAATYNDSPYVKSVISLATSARASAWCISWNETQRQCIFSDPNYDDGYYYENKNGIKPDSGLSAARMAALLTYRSRNSFETRFGRNLPSVKANIEPKEISEEERKKQEQEQGIRYPKNKDEENWLLHNEGSRSRSSVNRSSSSLSVSSSVKPQTYFTAQSYLRYQGNKFVNRFDANCYISITRKLDTHDITRNRVDSEQVLEDPLPDFLSNLKQPHLVIGIQSDGLFTYGEQQLLGQCIPNCVLKKINSPEGHDAFLLEFEIIDKYCKEFLHSKLPEFFSPESNKVELFEDWNKYVASSDNGGNSVFGEAETNITNW

SEQ ID NO: 92405 - DNA, 1452 bp, Yarrowia lipolytica CLIB122
  CDS (1)..(1452)
atgaaattccgacggactaaagtagtcaaagaaaaccccttctcgggactggtctcggaccaggaaatcgcccatgttcccgaataccaactagagtccggagtcactatctacaatgttcctatcgcctacaagacgtggggagttctgaatgaagctggaaataacgccatggttatttgccacgctcttaccggttccgctgacgtctccgactggtggggccctcttattggccctggccgagcgttcgatcccacccgattcttcattgtgtgtctcaactccctcggatcaccctacggttcggcttctccttgcaccgctgacaacacccccggagctgataagaacacatactacggccccgagttcccactggtgaccgttcgagatgacgttaacatccacagactggtgctggacgacctaggaatcaagcagatcgcctgttgcattggaggatctatgggcggcatgctgacgctggagtacgcctttttcggtaaggactacgtgcggacctttgtggcgctcgccacttcggctcgacactcagcctggtgcatttcctggggagaggcccagcggcagtgcatttattcggaccccaagtacgacgacgggtactactcgtttgaagatccgccctcctcgggcctcggagccgctcgaatggctgctctgctgacctaccgatccagagactcgtttgaaaacaagtttggacgagacacgcccgacccaactcgacataagacaattaacggaccccaacgacgaggtcctcagactgcttctgaggagcattggctcattcacaacgacggtcacatgcgaggaaagaagatggccgatgaagaaggtagctccactcccactgccaacggtgtttctcagccctctagcgtgagcaccaacggttccattctcgacgatacatcttctgtctcttcttcgtcttcgtttgttcctcttgctgtcaagaagaagccacccacccacttctcagcccaaaactacctccgataccaatcggacaagttcacaaagcgattcgacgccaactgctacatcgcaatcaccagaaagctggacactcatgatgtgtctcgagagagagccgaatctgttgaggctgctctccagactctcgagcagaacgctcttatcattggtattaagtctgacggacttttcacattcgctgagcaggaactcattgccgcaaacgttaagaactcgcacctggttaccatcgactcgcctgagggccacgacgccttcctgctggactttgctctcattaacaaggagattgtcgagttcctggccgccaacgtgcccgacattatcaacaccaacggcgtctcctgggaggaggccaaggtgggcgagctgggcaagtcatcgctgtttggtgaggccgaggtcgaaatcacccagtggtga

SEQ ID NO: 92406 - protein, 483 aa, Yarrowia lipolytica CLIB122
MKFRRTKVVKENPFSGLVSDQEIAHVPEYQLESGVTIYNVPIAYKTWGVLNEAGNNAMVICHALTGSADVSDWWGPLIGPGRAFDPTRFFIVCLNSLGSPYGSASPCTADNTPGADKNTYYGPEFPLVTVRDDVNIHRLVLDDLGIKQIACCIGGSMGGMLTLEYAFFGKDYVRTFVALATSARHSAWCISWGEAQRQCIYSDPKYDDGYYSFEDPPSSGLGAARMAALLTYRSRDSFENKFGRDTPDPTRHKTINGPQRRGPQTASEEHWLIHNDGHMRGKKMADEEGSSTPTANGVSQPSSVSTNGSILDDTSSVSSSSSFVPLAVKKKPPTHFSAQNYLRYQSDKFTKRFDANCYIAITRKLDTHDVSRERAESVEAALQTLEQNALIIGIKSDGLFTFAEQELIAANVKNSHLVTIDSPEGHDAFLLDFALINKEIVEFLAANVPDIINTNGVSWEEAKVGELGKSSLFGEAEVEITQW

SEQ ID NO: 92407 - DNA, 1230 bp, Candida albicans SC5314
  CDS (1)..(1230): transl_table=12
atgacatacaaagacgtgacagaagaacagttacaaactaatccatatgtcaagcttgtgccgggacaaaccatagttgaaatccctgaatacacactagagtgtggcgaaacattacataattttcctgttgcttacaagacctggggtaagttgaatgagaccgctgataatgcattagtgatatgccatgctttgagtgggtcttctgatgttgacgattggtggggagaattacttggaactgatagagcttttgatccttctcgatatctcatcatttgtataaattttcttggatcgccttatgggtcttgttcaccagtcacaattgacaagagcactggtaagccttatggtccctcattcccattagtaacattcaaggatgatgttggaatacagagattgatattagattcattgaatgtcaaacggttagctgccgttgttgggggatccatggggggaatgttggcattagaatacctggcaatttacaacaataccggatacgtacagaaagtagtcgcattggctactgcagccagaacttcagcatggtgcatatcttggaatgagacacaaagacaatgcattttcagtgatcctttttacgatgacgggtattactacgaaactggaaataaacctgattctggattaagtgccgcaagaatggccgctttgcttacttatcgttctagaaactcgtttgaaagtagatttggcagaaaattgggtccgagatctcctaatgatggtggtgccagtcctagaaccaaacacgaagagcattctttattgcataatgacgggtcaaagcttatcaatggagctcctgtaaatgaaaaatatccaccaacttatttctcggcacagtcatatatgcgttataacggttccaaatttatcaatagatttgatgcaaattgttacatagccattagtcgaaaattggatactaatgatctttctcgaggtcgagtcaatgcacccaacgacgctaatggtgatccattggttcatgttttaaaggatctttcaacccctacgttggtcataggaattgaatcagatcatctttttacaataactgaacaaaaacttttggctgacaatattccaaatgctatatttgagacgttggacagtgaagagggacacgatgcatttttgttagagtttgagaaaataaatagtttcatcactagttttttgaataattga

SEQ ID NO: 92408 - protein, 409 aa, Candida albicans SC5314
MTYKDVTEEQLQTNPYVKLVPGQTIVEIPEYTLECGETLHNFPVAYKTWGKLNETADNALVICHALSGSSDVDDWWGELLGTDRAFDPSRYLIICINFLGSPYGSCSPVTIDKSTGKPYGPSFPLVTFKDDVGIQRLILDSLNVKRLAAVVGGSMGGMLALEYSAIYNNTGYVQKVVALATAARTSAWCISWNETQRQCIFSDPFYDDGYYYETGNKPDSGLSAARMAALLTYRSRNSFESRFGRKLGPRSPNDGGASPRTKHEEHSLLHNDGSKLINGAPVNEKYPPTYFSAQSYMRYNGSKFINRFDANCYIAISRKLDTNDLSRGRVNAPNDANGDPLVHVLKDLSTPTLVIGIESDHLFTITEQKLLADNIPNAIFETLDSEEGHDAFLLEFEKINSFITSFLNN

SEQ ID NO: 92409 - DNA, 1260 bp, Desulfotalea psychrophila LSv54
  CDS (1)..(1260): transl_table=11
atgcaacggattgaaaccttttcagcttgtctctttcctcctgttgcgcgacaaaaaatattggttccgtaccgacataaaaagacaatggaaaaagagataaaagatcataaatccgtgggcatcgttgaaaaacaatttttcacctgcgcccaagtaccaagcccccttatcctggaaaatggtgccaaattaggccccataaccattgcctacgaaacctatggcaatttatcagccagaaaggataatgccatcctgatcaaccacgccttttcaggagactcccatgttgcggggcactatgccacggatggccccaaggaaaaaccaggttggtgggactttcttgtcggcccgggcaagggtattgacaccgacaaatactttattatctgctccaatatcctcggtagctgtaatggcaccaccggccccgccagtaagaattcggaaaccggggaggcctatgcacttgatttccctatggttaccatcggtgacatggttgccacccaaaagctccttattgaccatctgggtatccccaagttacttgccgtaatcggcggttccgtgggcggcatgcagaccctggaatgggcgattcgctaccccgagatgatgcactctgttatccctattgccaccaccatgcgccactcggccctggccatcgcctttaacgaaattgccagacaggctattatgactgaccctcactggaacagggggaaatattacggccaggcccatccggacacaggccttgccgtggcccgcatggtcggccatgtcacctacctctccgacgaggcaatgcgccgtaagtttggccgcaaccttcaggaaaaggagaatctctcctatggttttgacgcagactttcaggtggaatcctacctccgctatcagggcaataaattcgtgcaccgctttgacgccaactccctgctctatatcaccaaggcgtcggattattttgacattgttgaacggatcagcacatccggaccagaaacagaactcactgcgccacagcagaaataccttgtcatctcatatagctctgactggctctatccaacctatcaggccagagatttggtaaaggccttaaaacgctccggacgaaacgtcagtttttctgaaatagaatccgactgtggtcacgacgcatttcttattcccgatgatcgcctggagcaactgatgaggggctttctggccggcatctatacgggcattgccgagatataa

SEQ ID NO: 92410 - protein, 419 aa, Desulfotalea psychrophila LSv54
MQRIETFSACLFPPVARQKILVPYRHKKTMEKEIKDHKSVGIVEKQFFTCAQVPSPLILENGAKLGPITIAYETYGNLSARKDNAILINHAFSGDSHVAGHYATDGPKEKPGWWDFLVGPGKGIDTDKYFIICSNILGSCNGTTGPASKNSETGEAYALDFPMVTIGDMVATQKLLIDHLGIPKLLAVIGGSVGGMQTLEWAIRYPEMMHSVIPIATTMRHSALAIAFNEIARQAIMTDPHWNRGKYYGQAHPDTGLAVARMVGHVTYLSDEAMRRKFGRNLQEKENLSYGFDADFQVESYLRYQGNKFVHRFDANSLLYITKASDYFDIVERISTSGPETELTAPQQKYLVISYSSDWLYPTYQARDLVKALKRSGRNVSFSEIESDCGHDAFLIPDDRLEQLMRGFLAGIYTGIAEI

SEQ ID NO: 92411 - DNA, 1092 bp, Mannheimia succiniciproducens MBEL55E
  CDS (1)..(1092): transl_table=11
atggattcttcaatgtcagcacagcaagtaaccctttttacggaacaacccttagacctgatttttggcgggcggcttgggcaaatagatgtcgcttaccaaacttacggtacattgaatgaagataaaagcaatgcggtattaatttgtcatgcgttgaccggtgatgcggaaccttatttatcaccggtggaaaatcaagccggcggctggtggcaaagctttatgggcgaaggattggctttggacacttcccgttatttttttatttgctcaaacgtattaggcggctgcaaaggcacaaccgggccggcttcgattaatccgaaaaccaataaaccctacggcagccaatttcccaaagttaccgttcaagatatcgtccgccttcaaaaagcacttatttctcatttaaatattcctcatttgcatgcggtaatcggcggatcattcggggggatgcaggcgacccaatgggcgatttattatcctgattttgtggataaagtcgttaatctctgctcatcactgactttcagtgcggaggctatcggtttcaatcatgtaatgcggcaagcgattattaatgatcctaattttaataacggcgattattatgagggtgagccccctgaaaacggattatctatcgccagaatgctcggtatgctgacttaccgtacggatctgcagttggcaaaagcttttggtcgcgccaccaaaaacgaagggcattactggggcgattactttcaggttgaatcttatttaagttatcaggggcagaaatttttaggccgttttgatgcaaacagctatctgcatttattacgggctttagatatttatgacccgagtatcggctttgataatatcaaagaagcgttgtcgcgtattaaggcgcattatactttagtggcggtaaccaacgatcaactattcaaattaacggatttgcataaaagcaaaactttattggagcaggccggggttccgctggattattacgaatttccttccgattacgggcacgacgcttttctggtggattacgatacctttgaaccgaaaattcgcagcgggttggaatag

SEQ ID NO: 92412 - protein, 363 aa, Mannheimia succiniciproducens MBEL55E
MDSSMSAQQVTLFTEQPLDLIFGGRLGQIDVAYQTYGTLNEDKSNAVLICHALTGDAEPYLSPVENQAGGWWQSFMGEGLALDTSRYFFICSNVLGGCKGTTGPASINPKTNKPYGSQFPKVTVQDIVRLQKALISHLNIPHLHAVIGGSFGGMQATQWAIYYPDFVDKVVNLCSSLTFSAEAIGFNHVMRQAIINDPNFNNGDYYEGEPPENGLSIARMLGMLTYRTDLQLAKAFGRATKNEGHYWGDYFQVESYLSYQGQKFLGRFDANSYLHLLRALDIYDPSIGFDNIKEALSRIKAHYTLVAVTNDQLFKLTDLHKSKTLLEQAGVPLDYYEFPSDYGHDAFLVDYDTFEPKIRSGLE

SEQ ID NO: 92413 - DNA, 1740 bp, Methanosarcina barkeri str. Fusaro
  CDS (1)..(1740): transl_table=11
atggagatctcgacccaggttccttccttcaaaaatcttttttcgggaaaaaaaggccagaatcttgggctagtccgttcaatgaactatgaaattcctggaattttcaggctcgagagcggaaagactctttcccatgtccggatagagtacgagatgtacgggaagatgaacgcggataagagtaatgttatcctggtctgccacgcccttacaggtgatgctcatgctgccggatttcatacaggcgacaaaaagccgggctggtggaacattgtaattggcccgaataaggcatttgatacggaaagatattgcatcgtctgttcaaacataattggaggctgtaaaggttctacaggcccttcttccatcaaccctgaaacaggaaagccttacggtatttcttttcctatacttactattgcagatatggtaaatgcccagaaaaagcttgtcgagcacctgggagtaaaacagctttttgcagttgcaggcggctcaatgggcgggatgcaggtgcttcaatggacggtcagttatcctgaaatggttaaaaaagcaattgcaatcgcaacaactgcgtccacaacccctcagcaaatcgcatttggggcaatcggtagaaaagcgataacagatgatccaaagtggaatggaggtaactattacggaaagaaaactcctgcacagggcctggcgcttgcccgcatgataggccatattacatacttaagcgatgcttcgatgcaaaagaagttcgggagagacaaacaggagaaagtaggcccggatatgcctaaaatctcttccaaagtctcttcagaagtctctccagcagcctcttcaaaaacctcttcagaaacttctccagaaacctcttcaaaaacctcttcaaaaacctcttcagaaacctcttcaaaaacctcttcaaaaacctcttcaaaaacctcttcaaaaacctcttcagaaacctcttcagaaacctcttcaaaaaccttttcagaaactttccctgaccgctcctcacattttcaggtcgaaagctacctgaatcaccagggagatacctttacaaagcgttttgatgccaattcttatctttatatcacaaaagccgtagatttttttgacctttcaaaaaacgggtctcttatagagggtctttccgtagttactgcaaaatatcttgtgatttctataacctcagactggctatatcctccctatcaatcccaggaaatcgtgtctgcacttactgcaaacggggttgatgccaaatacgaagaaatcaggtctcagtacgggcatgatgcttttttgcttgaagaagggcagctcaattaccttataaggggctttctttctcagattcttgtaagtgatatcatgtatcggaacttctattcggtttccagaaacgaaacaattgaaaacgcttcaactcttatggtaaaaaagaaagtaaaccatctacctgtagtctcagaggatggaaaacttgaaggcatagtcacttcctgggatattacaaaagccgttgcctgcaaaatcaccgaactggatgagataattacccgcgacgtgaaatacgtattttcaggtgataaaattgagactgcatcctcgataatggaagatttctcgatttctgcgcttcctgtaatcgattctgaaaaccgagttataggtatggttacgagtgaaagcataagcgcacttattggaaagttcagttaa

SEQ ID NO: 92414 - protein, 579 aa, Methanosarcina barkeri str. Fusaro
MEISTQVPSFKNLFSGKKGQNLGLVRSMNYEIPGIFRLESGKTLSHVRIEYEMYGKMNADKSNVILVCHALTGDAHAAGFHTGDKKPGWWNIVIGPNKAFDTERYCIVCSNIIGGCKGSTGPSSINPETGKPYGISFPILTIADMVNAQKKLVEHLGVKQLFAVAGGSMGGMQVLQWTVSYPEMVKKAIAIATTASTTPQQIAFGAIGRKAITDDPKWNGGNYYGKKTPAQGLALARMIGHITYLSDASMQKKFGRDKQEKVGPDMPKISSKVSSEVSPAASSKTSSETSPETSSKTSSKTSSETSSKTSSKTSSKTSSKTSSETSSETSSKTFSETFPDRSSHFQVESYLNHQGDTFTKRFDANSYLYITKAVDFFDLSKNGSLIEGLSVVTAKYLVISITSDWLYPPYQSQEIVSALTANGVDAKYEEIRSQYGHDAFLLEEGQLNYLIRGFLSQILVSDIMYRNFYSVSRNETIENASTLMVKKKVNHLPVVSEDGKLEGIVTSWDITKAVACKITELDEIITRDVKYVFSGDKIETASSIMEDFSISALPVIDSENRVIGMVTSESISALIGKFS

SEQ ID NO: 92415 - DNA, 1179 bp, Syntrophus aciditrophicus SB
  CDS (1)..(1179): transl_table=11
atgaaaggaagtttttcagattttccggacgccgtggaagtcatatccggaaatccattgaaattagacagcatggatcaagtagaaacccgatatttcaactttgccgaaccatcggaaaatctagacctggaaagcggcgaaaaactggggccggtgaccctggcctacgaaacctatgggtgcttgaacgcgcagaagtccaatgccgtcctgatctgccacgccctttccggcgacgcccatgcggccggttatcacgccggtgagcagaaaccgggctggtgggacaacatgatcggggctggcagggccttcgacacggatcgttacttcgttctctgttccaacgtgatcgggggatgcaaggggtcaaccggaccagcatcactcaatccggcgacaggaaagccatacggcctgagtttccctgtcatcacgatcagggacatggtggaggcccagcgtcgcctgattgattttttcggcattgaacgattgctgtgcgttgccggagggtccatgggcggcatgcaggccctgcagtgggccgcttcctacccgcagcgggtgcgttccgtgatcgccattgccacgacagccaggcattcgcctctgcagatcgccttcaacgaggtgatccggcagagcatcatggctgatcgaacgtggcggtccggagactactatgactacggccctccggaccggggacttgccatcgcccggatgatcggccatatcaccttcatgagtgaagcgtccatggaacaaaaattttcccgcaaccggactcaggttttaaaaggcattccctttgatccggagttcgaggtcgggggatacctgaaatatcgtgggaatcagtttgtgaagcggttcgatgccaatgcctatctctacatcacgcgggcgctcgactacttcgacctgtcgggagaccggctgatttccccggacggggtgcgggatgcccggtttctcatcatttcgttttcgtcggactggctttacccgcccagtcaatcccaggacatcgtgcgccagttgaaaaagggacaggtggacgtgacctcctgtgaactgaattccagttacggccatgatgcctttctggtggaaacggaagggcagaccactttgatacggaattttttgagcagcagccatgaacgttag

SEQ ID NO: 92416 - protein, 392 aa, Syntrophus aciditrophicus SB
MKGSFSDFPDAVEVISGNPLKLDSMDQVETRYFNFAEPSENLDLESGEKLGPVTLAYETYGCLNAQKSNAVLICHALSGDAHAAGYHAGEQKPGWWDNMIGAGRAFDTDRYFVLCSNVIGGCKGSTGPASLNPATGKPYGLSFPVITIRDMVEAQRRLIDFFGIERLLCVAGGSMGGMQALQWAASYPQRVRSVIAIATTARHSPLQIAFNEVIRQSIMADRTWRSGDYYDYGPPDRGLAIARMIGHITFMSEASMEQKFSRNRTQVLKGIPFDPEFEVGGYLKYRGNQFVKRFDANAYLYITRALDYFDLSGDRLISPDGVRDARFLIISFSSDWLYPPSQSQDIVRQLKKGQVDVTSCELNSSYGHDAFLVETEGQTTLIRNFLSSSHER

SEQ ID NO: 92417 - DNA, 1467 bp, Methanococcoides burtonii DSM 6242
  CDS (1)..(1467): transl_table=11
atgagtgaaaggtctgtaggcattgtggcaacgaactaccataccatagaaggtgagttccagttagaaggcggtcataccctgaagaacatcaggttggcctatgagacctatggtaatctcaataaggagaaaagtaatgcgatccttgtctgccatgctctaacaggcgatgcacacgcagcaggcaggcacagtgacgatgacaaaaaaccgggatggtgggatgacatcatcggtcccgggaaagcccttgatactgacaggtacttcgtgctatgttccaatgttctgggagggtgtaagggtactaccggaccggcttcccttgatcctgacacggggcggcaatatggtatcacttttccggtcataacgattagagatatggtgaatgtccagaaaaggctgatagaccatatgggaatcaccactctctttgcagtagttggtggttccatgggcggtatgcagacgcttcaatggtgtgttgcctatcctgagcttgtaaagaaggccgtggtcattgcttctacggcagtctcatctccgcagcagatagctttcaatgaggttggcaggaatgccattatctctgatcctgactggaatgggggagactattacgagggtgaacccccggttaatggtctttccacagcaaggatgatcgctcacatcacatatctaagcgatgcttccatgcatgaaaagtttggacggagattgcaacagggtgaaagctacaagttcgatatgtccaatgattttcaggtggggagctatctgaaatatcagggagacacatttaccggcaggttcgatgccaattcctatctttatgctacaaaagctgtggattatttcgacctttcaatgaacggttctctggcagaaggcctgaaatatgtacaggcaaagatgctggtgatatcgataacttccgactggctgtattcgccatatcattcaaaaaagatagtcgaaggtcttactgtaaaggagcatgatgtaagttatcgtgagatcgaatccagttatggacacgatgccttcctgctcgaaagcggccagatcaattatgtcatccacaatttcctgactcacacgtccgttgctgatgtaatgaccgaaaaggttgctaccatcagggaaggcgcgagcatagatacagctgcaaaggtcatgttcgaggaggcccttactcatttgcctgtcgttaatgagaacggctgtcttgttggtatcgtcacttcctgggatatctcaaaagcggttgcattaaagtgtagcaaactggagaatataatgaccagggatgttctgacggctttccctgatgaacctatagtagctgctgccaagaggatggagcgccacagcatctcagctttgcctgtagtcgacgagaagaacagacttattggtatcatcgatagtgaggacatcaaccgactgataggttga

SEQ ID NO: 92418 - protein, 488 aa, Methanococcoides burtonii DSM 6242
MSERSVGIVATNYHTIEGEFQLEGGHTLKNIRLAYETYGNLNKEKSNAILVCHALTGDAHAAGRHSDDDKKPGWWDDIIGPGKALDTDRYFVLCSNVLGGCKGTTGPASLDPDTGRQYGITFPVITIRDMVNVQKRLIDHMGITTLFAVVGGSMGGMQTLQWCVAYPELVKKAVVIASTAVSSPQQIAFNEVGRNAIISDPDWNGGDYYEGEPPVNGLSTARMIAHITYLSDASMHEKFGRRLQQGESYKFDMSNDFQVGSYLKYQGDTFTGRFDANSYLYATKAVDYFDLSMNGSLAEGLKYVQAKMLVISITSDWLYSPYHSKKIVEGLTVKEHDVSYREIESSYGHDAFLLESGQINYVIHNFLTHTSVADVMTEKVATIREGASIDTAAKVMFEEALTHLPVVNENGCLVGIVTSWDISKAVALKCSKLENIMTRDVLTAFPDEPIVAAAKRMERHSISALPVVDEKNRLIGIIDSEDINRLIG

SEQ ID NO: 92419 - DNA, 1140 bp, Acidobacteria bacterium Ellin345
  CDS (1)..(1140): transl_table=11
atgagcacaggcacatgtaccgtgagcgcgggtgaaccgattccggccccgcgctctcaacgcaatcttcaccttatccagggcgcgttcaccttcgccgatgaaggcttccccctggataacggtggctcccttcggcccgtcaccattcgctatgcgcaatacggcgagcccaacgcgaaggccgacaatgtcgttctcgtctgccacgctctctccggatccgccaaggttgacgactggtggcccgaactcttcgccgaaggcggattgctcgacctcgataaattctgcgtgatcggcaccaacatcctcggctcctgctacggctctaccggcccgaattccatcaacgccgaaaccggacagccctatggtgcagattttccgctcgtcaccatcagcgacatcgtgcgcgcccaggcgaagctcctcgatcatctcggcatcaagaagttgaagcttgccatcggcggttcgatcggcggcatgcaggccctgcactgggccatggattatcccgatcgcgtcgagcaggcgattgccatcggcaccgcgccgctgggcgccctcggcctcgcgcttaaccatatccagcgccaggttatccgcctcgatcccaagtggaatgccggctcctactcgcacgagaattcgccaagccaaggcatctccatcgcgcgccagatcgccatgctctcctacaaatccgcggagttgttcgacgagcgctatggccgcaagctcaaccgcaacggcgaagatccgtacacgcaccatgaggcacgcttcgatgtcggcggctatctcgatcaccagggcgagaaattcgtccagcgcttcgatgcgaactcgtacgtttcgatcacgcgcaccatggacacgttcgaccccgtccgcaaataccgcagtgccaaagccgcgtacagtcgcatcaaggcgaagatcacgctggtagggatttcgtccgactggctcttcccaccggaagacgttcgcaaactcgcgcaagaaatgatcgctgccggagccagctgcgattatcgcgaaatcatctccgcccacggccacgacgcattcttagccgaaccggagaaactcctcgaagtcctaagcgacgcccacgcccgcccggtttag

SEQ ID NO: 92420 - protein, 379 aa, Acidobacteria bacterium Ellin345
MSTGTCTVSAGEPIPAPRSQRNLHLIQGAFTFADEGFPLDNGGSLRPVTIRYAQYGEPNAKADNVVLVCHALSGSAKVDDWWPELFAEGGLLDLDKFCVIGTNILGSCYGSTGPNSINAETGQPYGADFPLVTISDIVRAQAKLLDHLGIKKLKLAIGGSIGGMQALHWAMDYPDRVEQAIAIGTAPLGALGLALNHIQRQVIRLDPKWNAGSYSHENSPSQGISIARQIAMLSYKSAELFDERYGRKLNRNGEDPYTHHEARFDVGGYLDHQGEKFVQRFDANSYVSITRTMDTFDPVRKYRSAKAAYSRIKAKITLVGISSDWLFPPEDVRKLAQEMIAAGASCDYREIISAHGHDAFLAEPEKLLEVLSDAHARPV

SEQ ID NO: 92421 - DNA, 1122 bp, Mycobacterium sp. MCS
  CDS (1)..(1122): transl_table=11
ttgaagagccccgccgtgcccgccctcgacctgcccgccgagggtgagaccggcgtggtcgacatcggcccgctgaccctggagagcggcgcggtcatcgacgacgtgtcgatcgccgtccagcgctggggtgagctctcccccaaccgcgacaacgtcgtgatggtgctgcatgcgctcaccggtgactcgcacgtcaccggaccggccggccccgaccatcccaccccgggctggtgggacggcgtcgccgggccgggagccccgatcgacaccgaccgctggtgcgcggtgtcgacgaacgtcctcggcggctgccgtgggtcgaccggcccgtcgtcgatcgctcccgacggccggccgtacggttcgcggttccccgcggtgacgatccgcgaccaggtcaccgcggacctcgccgcgctcgaggcgctgggcatcaccgaggtcgccgcggtggtgggcggatccatgggcggcgcgcgtgcgctggagtggatcgtcggccatccggccaccgtgcgttcggcgctgatcctcgccgtcggcgcccgcgccaccgccgaccagatcggcacgcagagcacccaggtcgccgcgatcaaggccgatcccgactggtgcggcggcgactaccacgacaccggtcgcgtgccgtccaccggtctggcgatcgcccgccgcttcgcccacctgacctaccgcggtgaagtcgaactcgacgaccggttcggcaaccacgcccagggtgacgagagcccgaccgacggcggccggtacgcggtgcagagttatctggagtaccagggcgccaagctggtcgagcggttcgacgcaggcacctacgtcacgctgaccgacgcgttgtcgagccacgacgtgggtcgcggccgcggaggcgtgcgcgctgcgctgcagggttgccgggtgcccacgatcgtcggcggcgtcacctccgaccggctctaccccctgcggctgcagcaggagttggccgaactgctgcccggctgtaccggtctggacgtggtcgattcggtctacggccacgacgggttcctggtcgagacggaggccgtcggcaagctcatccggcgcacactggagttggcggagcggtga

SEQ ID NO: 92422 - protein, 373 aa, Mycobacterium sp. MCS
MKSPAVPALDLPAEGETGVVDIGPLTLESGAVIDDVSIAVQRWGELSPNRDNVVMVLHALTGDSHVTGPAGPDHPTPGWWDGVAGPGAPIDTDRWCAVSTNVLGGCRGSTGPSSIAPDGRPYGSRFPAVTIRDQVTADLAALEALGITEVAAVVGGSMGGARALEWIVGHPATVRSALILAVGARATADQIGTQSTQVAAIKADPDWCGGDYHDTGRVPSTGLAIARRFAHLTYRGEVELDDRFGNHAQGDESPTDGGRYAVQSYLEYQGAKLVERFDAGTYVTLTDALSSHDVGRGRGGVRAALQGCRVPTIVGGVTSDRLYPLRLQQELAELLPGCTGLDVVDSVYGHDGFLVETEAVGKLIRRTLELAER

SEQ ID NO: 92423 - DNA, 1017 bp, Cytophaga hutchinsonii ATCC 33406
  CDS (1)..(1017): transl_table=11
atggagtatcatatttatacgcacaaatctccggttacgcttgagtccggcgctgttttacccgaagtccgcattcaatattccacttcaggcatcagaaatgcagatgaagataatatcatttgggtttgccatgcgcttaccgctaattccgatgtagaatcctggtggccgggtcttgttggtacagattatttatataatccgcaagaacactttatcgtgtgcgccaatattctatcttcctgctacggcactaccggaccaacagaaacaaatccggaaacaaataaaccatacttcctttccttcccggttgtcaccatccgcgacatggttaccattcatgatatactgagagaacacttagaaataaaaaaaattcatacacttattggcggttctctgggcgggcagcaagcgatggagtgggccattcaacagcctcatttatttcagcatcttatactattatctacaaatgcatttcactctccctggggcattgcctttaatgagtcgcagcgtatggcaatagacatggaccctacatggaaaaatccttcgcttgacgcaggcagagaagggttgaaaacggcacgctctatagctatgctttcctacagaagttacgagacctatgtagaaacacagcgtgaagaagactcttctaaaacggatgattacagagctattacctatcagcattaccagggtgataaattagtaaaacgcttcaactgccactcctattggtatctgtctaaagcaatggacagtcatcatgtaggaagaaacagagaaagtgctgcagcagcattagcatctatccgctctaaaacacttgtcatcggtatttcttcagatattttatttccggtttgcgaacaggaatacgttgcgaagcatatctccggagcacaatatgtatgcattgattctctgtatggccacgatgggtttttaacggaaacggacaaactggatgttgttatccggaatttttatctcgaataa

SEQ ID NO: 92424 - protein, 338 aa, Cytophaga hutchinsonii ATCC 33406
MEYHIYTHKSPVTLESGAVLPEVRIQYSTSGIRNADEDNIIWVCHALTANSDVESWWPGLVGTDYLYNPQEHFIVCANILSSCYGTTGPTETNPETNKPYFLSFPVVTIRDMVTIHDILREHLEIKKIHTLIGGSLGGQQAMEWAIQQPHLFQHLILLSTNAFHSPWGIAFNESQRMAIDMDPTWKNPSLDAGREGLKTARSIAMLSYRSYETYVETQREEDSSKTDDYRAITYQHYQGDKLVKRFNCHSYWYLSKAMDSHHVGRNRESAAAALASIRSKTLVIGISSDILFPVCEQEYVAKHISGAQYVCIDSLYGHDGFLTETDKLDVVIRNFYLE

SEQ ID NO: 92425 - DNA, 1074 bp, Haemophilus somnus 129PT
  CDS (1)..(1074): transl_table=11
atggctgtacaaactttaacgctttttaccgattatcccttgatgttagtacaaggtgggcaattaaaaaatattgaagttgcttatcagacttatggtactttaaataaagataagagcaatgtcattttaatttgtcatgctttgaccggcgatgctgaaccctattttgctgataaatcgcaaaatggttggtggcagagttttatgggggagggattggcacttgatacgagtaaatatttttttatttgttctaatgtattgggcggctgtaaagggacaacaggtccgtcgtccattaatcctgatacaaataaaccttacggtagtcagtttccgcatattattgtacaagatatggtgaaagttcagcgagaactgctgaatacattggatatagcaaaactttatgctgtgattggtggctcgttcgggggaatgcaagcgacacaatgggctattgattatcctgattgcgttagcagagtggttaatctttgttcgtcactttatttaagtgcggaggcaatcgggtttaatcatgtgatgcgtcaagcgattattaatgatcctcattttaataatggagattattatgacagactgcctccaagtaaagggttatctattgcgagaatgttggctatgctgacctatcgtaccgattttcaattagaaaaagcgtttggacgagctaaaaaagcggaaagtctgtattggggagattatttccaagttgaatcttatttaacttatcaagggaaaaaatttttggaacgttttgatgccaatagctatgtgcatttattgcgggctttagatttatatgatccggcttggaactataaggacattaaggctgcattaagtcgtataaaagcacgctatactttggtcgcagttactactgatcagctgtttaaattgaccgatctacataaaagtaaagcattattggagcaaagcggcgttgatttaaattattatgaatttccttcagattatggacatgatgcttttttagtagattatgatttctttgagagtaagattatgacaggtttagcttga

SEQ ID NO: 92426 - protein, 357 aa, Haemophilus somnus 129PT
MAVQTLTLFTDYPLMLVQGGQLKNIEVAYQTYGTLNKDKSNVILICHALTGDAEPYFADKSQNGWWQSFMGEGLALDTSKYFFICSNVLGGCKGTTGPSSINPDTNKPYGSQFPHIIVQDMVKVQRELLNTLDIAKLYAVIGGSFGGMQATQWAIDYPDCVSRVVNLCSSLYLSAEAIGFNHVMRQAIINDPHFNNGDYYDRLPPSKGLSIARMLAMLTYRTDFQLEKAFGRAKKAESLYWGDYFQVESYLTYQGKKFLERFDANSYVHLLRALDLYDPAWNYKDIKAALSRIKARYTLVAVTTDQLFKLTDLHKSKALLEQSGVDLNYYEFPSDYGHDAFLVDYDFFESKIMTGLA

SEQ ID NO: 92427 - DNA, 1185 bp, Magnetospirillum magnetotacticum MS-1
  CDS (1)..(1185): transl_table=11
atgagcctgaacgagaccgttccgactgtttcccccaacgccctcggcctcaaggtcgaactggggcgcgaccggccgattcgcctggattgcggggtggaacttgggccgattcaggtggcctatcagacctatggcagcctcaatgccgacaaatccaacgccatccttatctgtcacgcgctgaccggcgaccattatgtggccgatcctcaccccatcactgccaagcccggctggtggagcgaactggtggggccgggccgggtcttcgataccgaccgttatttcctgatctgctccaatgtgctgggcggctgcatgggcaccacggggcccatggacgagaaccaggagaccggccagccctggggactggattttccggtcatcaccatcggcgacatggtcaaggtccaggcccggctggtggatcatctgggcatcgaccagctgttctgcgtggtgggcggctccatgggcggcatgcaggtgctgaaatgggcgcagacctaccccgagcgggtgttctcggccattcccatcgcggcggccgcccgtcattcggcccagaacatcgccttccacgaagtggggcgccaggccatcatggccgatcccgactggtgcgacggcaattacctgaaagagggcaagcggccccatcgcggtctggcggtggcgcgcatggcggcgcacatcacctatctgtccgagcccgccctgcaccagaaattcgggcgcaacctgcagaaccgcgacaccgtcacctatggcttcgacgccgatttccaggtggaaagctatctgcgccaccagggatccaccttcgtcgaccgtttcgacgccaattcctatctctacatcacgcgggccatggattatttcgatctggcggcggaaaacggcggtgtgctggccaatgccttccgcggcacgcgcacccgcttttgcgtggtcagcttcaccagcgactggctgttccccacctcggaaagccgggcggtggtgcatgctctgaacgcggtggccgccaatgtcagtttcgtcgagatcaagtcggacaaggggcacgacgccttcttgctggatgagcccgaattccacgccaccctgaccggtttcctggacggcgccgccgcccatcgtggcctaccgcgccagacgagcggagccggaccatga

SEQ ID NO: 92428 - protein, 394 aa, Magnetospirillum magnetotacticum MS-1
MSLNETVPTVSPNALGLKVELGRDRPIRLDCGVELGPIQVAYQTYGSLNADKSNAILICHALTGDHYVADPHPITAKPGWWSELVGPGRVFDTDRYFLICSNVLGGCMGTTGPMDENQETGQPWGLDFPVITIGDMVKVQARLVDHLGIDQLFCVVGGSMGGMQVLKWAQTYPERVFSAIPIAAAARHSAQNIAFHEVGRQAIMADPDWCDGNYLKEGKRPHRGLAVARMAAHITYLSEPALHQKFGRNLQNRDTVTYGFDADFQVESYLRHQGSTFVDRFDANSYLYITRAMDYFDLAAENGGVLANAFRGTRTRFCVVSFTSDWLFPTSESRAVVHALNAVAANVSFVEIKSDKGHDAFLLDEPEFHATLTGFLDGAAAHRGLPRQTSGAGP

SEQ ID NO: 92429 - DNA, 1071 bp, Nostoc punctiforme PCC 73102
  CDS (1)..(1071): transl_table=11
atgatctactcagatttcatctcaccacaaacccagttttaccagcttacagtgccatttcaacttgaaagcggcaaagtattaattggggttcaggttgcttatcgcagctggggagagttaaatgctcaaggcgataatggggtactaatttgtcatgccttaactggttcggctgatgctgatgattggtgggaacctttgtttggttcagggaaagccttcaatcccgatcgcgattttattgtgtgcagcaacattttgggaagttgttacggtacaacagggccaactactatcaacccaacaaccagaaagccttatggtgtatccttccctaaaattacaatccgagatatggttcgcctacaagctgtactgctagaatacctgggtgttcaatctctgcggttcgtaattggtggttcgctcggtggaatgcaatcactggagtgggcattattatatcccgacaaggtgaaaagtattgcacctatcgctgtttctggcagacattccgcttggtgtattggattaagtgaagcccaaagacaggcaatttatgccgatccaaattggcaaggagggaactacaccctggatgcgcctcccaaccaaggactagcagtggcgagaatgatggcgatgtctacttaccgttcttgggatagttttacaacccgctttggacggcagtatgatccatctgagaagtttgctatagcgagttacttacagcatcaaggtcaaaagctgacagaacgatttgatgccaatacttatattatcctcacccatgcaatggatgggcacgatattgcacgcgatcgcacggctcctaatttatcagattatgaatctgttctgggaagcatccagcaaccaactctagttgtcgccattgattctgatattctctatccgccagtagaacaacaagaattagcaaatttaatccctaatgctcaactgtcgtggttaaagtcaacccacggacatgacgcatttttaattgatatggctgccttgaatgaaattattcaacagaaccatgagtttgttcttttttga

SEQ ID NO: 92430 - protein, 356 aa, Nostoc punctiforme PCC 73102
MIYSDFISPQTQFYQLTVPFQLESGKVLIGVQVAYRSWGELNAQGDNGVLICHALTGSADADDWWEPLFGSGKAFNPDRDFIVCSNILGSCYGTTGPTTINPTTRKPYGVSFPKITIRDMVRLQAVLLEYLGVQSLRFVIGGSLGGMQSLEWALLYPDKVKSIAPIAVSGRHSAWCIGLSEAQRQAIYADPNWQGGNYTLDAPPNQGLAVARMMAMSTYRSWDSFTTRFGRQYDPSEKFAIASYLQHQGQKLTERFDANTYIILTHAMDGHDIARDRTAPNLSDYESVLGSIQQPTLVVAIDSDILYPPVEQQELANLIPNAQLSWLKSTHGHDAFLIDMAALNEIIQQNHEFVLF

SEQ ID NO: 92431 - DNA, 1077 bp, Haemophilus influenzae R2846
  CDS (1)..(1077): transl_table=11
atgtctgtgcaaaatgtagtgctttttgacacacagcctttaactctgatgcttggcggcaaactttcctatattaatgtcgcgtatcaaacttatggcacgctcaatgatgagaaaaataatgcggtattaatttgccacgctttgactggcgatgctgagccttatttcgatgatggtcgcgatggttggtggcagaattttatgggagcaggtttggcattggatacggatcgttatttttttattagctcgaacgtattaggtggttgcaagggaacaactgggccttcatcaattaatccgcaaacgggtaaaccttatggtagccaatttcctaatatcgttgtgcaagatattgtcaaagtacaaaaagccttgcttgatcatcttggcgttagccatttaaaagcgattattggtggatcttttggcggcatgcaagcgaatcaatgggcgattgattatcctgattttatggataatatcgtaaatctttgttcatccatttattttagtgctgaagccataggttttaatcacgtaatgcgtcaagcggtaattaatgatcctaattttaacggcggcgattattacgagggtacaccgccagatcaagggttatctattgcacgtatgctaggtatgctgacttaccgcaccgatttacaactagccaaagcctttgggcgtgccacaaaatcagatggcagtttttggggcgattactttcaagttgaatcctacctttcttatcaaggcaaaaaatttttagaacgttttgatgccaatagttatttgcatttgttacgtgcgttggatatgtatgatcccagtttggggtatgacaatgttaaagaagcattgtcacgcattaaagcacgctatacattggtttcagtgacaacggatcaactttttaaacccattgatctttataaaagtaaacagcttttagagcaaagtggagtcgatctacatttttatgaattcccatcagattacggacacgatgcgtttttagtggattatgatcagtttgaaaaacgaattagagatggtttggcgggtaattaa

SEQ ID NO: 92432 - protein, 358 aa, Haemophilus influenzae R2846
MSVQNVVLFDTQPLTLMLGGKLSYINVAYQTYGTLNDEKNNAVLICHALTGDAEPYFDDGRDGWWQNFMGAGLALDTDRYFFISSNVLGGCKGTTGPSSINPQTGKPYGSQFPNIVVQDIVKVQKALLDHLGVSHLKAIIGGSFGGMQANQWAIDYPDFMDNIVNLCSSIYFSAEAIGFNHVMRQAVINDPNFNGGDYYEGTPPDQGLSIARMLGMLTYRTDLQLAKAFGRATKSDGSFWGDYFQVESYLSYQGKKFLERFDANSYLHLLRALDMYDPSLGYDNVKEALSRIKARYTLVSVTTDQLFKPIDLYKSKQLLEQSGVDLHFYEFPSDYGHDAFLVDYDQFEKRIRDGLAGN

SEQ ID NO: 92433 - DNA, 1077 bp, Haemophilus influenzae R2866
  CDS (1)..(1077): transl_table=11
atgtctgtgcaaaatgtagtgctttttgacacacagcctttaactctgatgcttggcggcaaactttcccatattaatgtcgcgtatcaaacttatggcacgctcaatgccgaaaaaaataatgcggtattaatttgccatgctttgactggtgatgctgagccttatttcgatgatggtcgagatggctggtggcagaattttatgggagcaggtttagcattggatacggatcgttatttttttattagctcgaacgtattaggtgggtgtaagggaacaactgggccttcatcaattaatccgcaaacgggtaaaccttatggcagccaatttcctaatattgttgtgcaagatattgttaaagtacaaaaagccttgcttgatcatcttggtattagccatttaaaagccattattggtggatcttttggcggcatgcaagcgaatcaatgggcgattgattatcctgattttatggataatatcgtgaatctttgctcatccatttattttagtgctgaagccataggctttaaccacgtgatgcgtcaagcggtcattaatgatcccaattttaacggcggcgattattatgagggtacaccgccagatcaagggttatctattgcgcgtatgctaggtatgctgacttaccgcaccaatttacaactagccaaagcctttgggcgtgctacaaaatcagatggcagcttttggggcgattactttcaagtggaatcctatctttcttaccaaggcaaaaaattcttagaacgttttgatgccaatagttatttgcatttgttacgtgcgttggatatgtatgatccaagtttggggtatgacaatgttaaagaggcattgtcacgcattaaagcacgctatacattggtttctgtgacaacggatcaactttttaagccagttgatctttataaaagtaaacagcttttagaacaaagtggcgtcgatctacatttttatgaatttccatcagactacggacacgatgcgtttttagtggattatgatcagtttgaaaaacgaattcgagatggtttggcaggtaattaa

SEQ ID NO: 92434 - protein, 358 aa, Haemophilus influenzae R2866
MSVQNVVLFDTQPLTLMLGGKLSHINVAYQTYGTLNAEKNNAVLICHALTGDAEPYFDDGRDGWWQNFMGAGLALDTDRYFFISSNVLGGCKGTTGPSSINPQTGKPYGSQFPNIVVQDIVKVQKALLDHLGISHLKAIIGGSFGGMQANQWAIDYPDFMDNIVNLCSSIYFSAEAIGFNHVMRQAVINDPNFNGGDYYEGTPPDQGLSIARMLGMLTYRTNLQLAKAFGRATKSDGSFWGDYFQVESYLSYQGKKFLERFDANSYLHLLRALDMYDPSLGYDNVKEALSRIKARYTLVSVTTDQLFKPVDLYKSKQLLEQSGVDLHFYEFPSDYGHDAFLVDYDQFEKRIRDGLAGN

SEQ ID NO: 92435 - DNA, 1074 bp, Prosthecochloris aestuarii DSM 271
  CDS (1)..(1074): transl_table=11
atgaactatatcaagcccatatcgaagcatacaggtttttttgtctcgcgtcaaccttttactctcgaatctggcggtgttttgcctgaggttaccgtagcatacaggacatggggcagattgaaccgtgaccggagcaatgctgttcttgtctgtcatgccttgaccggttcagctgatgcagatgagtggtggccgggtatgttcggaaagggctgcgccttcgatcctgaccatgattttgtgatctgcagcaatgtgcttggcagttgttacggtacgacgggtccactctctgtcaacccgcagagcgggaggcactacggccccgattttcccgccattaccattcgcgatatggtgcatcttcagcgtcttttgctggatgaacttggaatcgagcggctcagattggttgttggcgcttcacttggcggcatgcaggttctggaatggggatgtttataccctgaaaaagttcacgccctgatgccgatgggtatttcaggacgccattccgcctggtgcatcgctcagagcgaggcgcagcgtagcgcaatcatggccgatcgggagtggaatgatgggtggtacgatccggcccatcaaccgaaaggcgggcttggtgccgcgagaatgatggctatgtgcacctatagaagttttgagaattttcaggagcgcttcggacgaaagagaaaagacagtctgctgtttcaggctgaaagttatcttcattatcagggggagaagcttgtccggcgctttgatgccaacacctatattgcgctgaccagggcaatggatatgcacgatctcgggcgcggaagagagagctatgaagctgctctcgacgcaatacgggtgccagtggcaatcttgtccatcacgtcagatattctctatcctcctgaggagcaggaagagctcgcgaagctgattcccgattcgtcaatcggttaccttcgcgagccgtacggacatgacgcgtttctgatcctgaccgacgaggtcagcgctatggtcaggcagttcaaggagcgtattgcttcagggaatcattcagctgcctga

SEQ ID NO: 92436 - protein, 357 aa, Prosthecochloris aestuarii DSM 271
MNYIKPISKHTGFFVSRQPFTLESGGVLPEVTVAYRTWGRLNRDRSNAVLVCHALTGSADADEWWPGMFGKGCAFDPDHDFVICSNVLGSCYGTTGPLSVNPQSGRHYGPDFPAITIRDMVHLQRLLLDELGIERLRLVVGASLGGMQVLEWGCLYPEKVHALMPMGISGRHSAWCIAQSEAQRSAIMADREWNDGWYDPAHQPKGGLGAARMMAMCTYRSFENFQERFGRKRKDSLLFQAESYLHYQGEKLVRRFDANTYIALTRAMDMHDLGRGRESYEAALDAIRVPVAILSITSDILYPPEEQEELAKLIPDSSIGYLREPYGHDAFLILTDEVSAMVRQFKERIASGNHSAA

SEQ ID NO: 92437 - DNA, 1098 bp, Erythrobacter sp. NAP1
  CDS (1)..(1098): transl_table=11
atgaacgctgccccagcctcgaagagctatgcgctgcccgctcccctgccgcttgatagcgggcaggcgctcgaaggcgcgagaatcgcgtatgagacctatggcgagttggccgaggatcgctcgaatgcggtgctaatctgccatgcgctaaccggtgaccaatatgttgcgagcaatcacccgatcaccggcaagccgggctggtgggagcggatggtcggccccggcaagccgatcgacacggatcgcttccacgtcatctgcgccaatgtgatcggcagctgcatggggtcgagcggccctgcgtccgaagcatccgacggtgcgccttatgcgatgcgcttccccgttatcaccatccgcgacatggtgcgcgggcttgtggctttgctcgacgggctcgggatcgagcagcttcatacggttgtcggcggatcgatgggcggcatgcaggcgttgagccttgccgctaactggccaagccgcgcagcgcgggtgttggtgatcgcttcgaccgcgcggcattcggcgcagaacatcgcctttcacgaagtcggacgccaggcgatcatggcggacccggcttgggcggacggcgactattatgcgagcggctcctcgcccgacaatggcctcgccgtggcgcgtatggcggcgcatattacctacctttccgaggaaggactgaccgccaagttcgggcggcgcttgcaggaccgcgatgccaagagcttcggcttcgatgccgacttccaggtcgagagttatctgcgctatcagggcagcggtttcacccagcgatttgacgccaattcctacctctacatcacgcgggcgatggactatttcgatatcgccgaagagcatggcgggaagcttgccgatgcctttgcagggacgagcgcgcggttctgcatcgtcagcttcgacaccgactggctctatccgacgtcggagagccggcacgtcgtccacgccttgaacgccgctggagccaaggtcagctttgtcgagctgtccgctcccaacgggcatgacagcttcctgttgccgcatgaagagctcgaccgcgttgtgaaggccttcgtcgaatga

SEQ ID NO: 92438 - protein, 365 aa, Erythrobacter sp. NAP1
MNAAPASKSYALPAPLPLDSGQALEGARIAYETYGELAEDRSNAVLICHALTGDQYVASNHPITGKPGWWERMVGPGKPIDTDRFHVICANVIGSCMGSSGPASEASDGAPYAMRFPVITIRDMVRGLVALLDGLGIEQLHTVVGGSMGGMQALSLAANWPSRAARVLVIASTARHSAQNIAFHEVGRQAIMADPAWADGDYYASGSSPDNGLAVARMAAHITYLSEEGLTAKFGRRLQDRDAKSFGFDADFQVESYLRYQGSGFTQRFDANSYLYITRAMDYFDIAEEHGGKLADAFAGTSARFCIVSFDTDWLYPTSESRHVVHALNAAGAKVSFVELSAPNGHDSFLLPHEELDRVVKAFVE

SEQ ID NO: 92439 - DNA, 1401 bp, Xanthobacter autotrophicus Py2
  CDS (1)..(1401): transl_table=11
atgctccggccgtccctgcggcgggctacttatccacacgccggcttacaattttgcgaaggtcgcccatctatctggtgcgctgcacggctttctgccgcgcgcggcctgttccgctccgtttccacggtgcctgtgcctgcgcttgacaggtgcgcgcccgcgtcgcttggttcgcccatgacttctttcgtccaacaggatgtcgccctgcaagactccgccggagcctccgtcctccaggcgcggcgcgaggcggacgacccccactccccggtggcgcgcttcggcgcccgcaacccgctcaagctcgacgcgggggtggagctgtcgcacctgcagatcgcctaccagacctatggcgagcccaatgccgcacgctccaacgccatcctggtgtgccacgcgctgaccggcgaccagcatgcggccagcctcaatcccgtcaccggcaagccgggctggtgggagacgctggtcggccccggcaagcccatcgacaccgagcgcttctacgtcatctgcgccaatgtgctcggcggctgcatgggcaccaccgggccggcctccaccaatcccctgaccggccagccctatgggctcgacatgccggtggtgaccatccgcgacatggtcaacgcccaggccatgctgctggatcacctcggcatcgacaagctgttgtgcgtggctggcggctccatgggcggcatgcaggtgctgcaatgggcggcgagctatcccgagcgggtgttctcggccctgcccattgccaccggcgcgcgccattcggcgcagaacatcgccttccacgaggtgggccggcaggcggtgatggccgatcccgactggcgcggcgggcgctatctcgcggagggggtgacgccccatcgcgggctcgccgtggcgcgcatggcggcccacatcacctacatgtcggaccagtccctgcacaacaagttcggccggcgcctgcagaaccgcgacatgcccaccttcggcttcgatgccgacttccaggtggaaagctatctgcggcaccagggcgaaagcttcgtgcagcgcttcgatcccaactcctatctctacgtgacccgcgccatggattatttcgacctcgccgccgaccatggcggcgtgctggccaatgccttccggggctcgaagacgcgcttctgcgtggtctccttcacctcggactggctgttccccaccgaggattcgcgcgccatcgtccatgcgctcaacgcctcgggagcgaacgtgtccttcaccgagatcgatagcgacaagggccacgacgccttcctgctgcacgagccggagctgaccgccatcacccgcggcttcctcgacagcgcggcgcgggccttcggcctgccggcggcacggcaggcctga

SEQ ID NO: 92440 - protein, 466 aa, Xanthobacter autotrophicus Py2
MLRPSLRRATYPHAGLQFCEGRPSIWCAARLSAARGLFRSVSTVPVPALDRCAPASLGSPMTSFVQQDVALQDSAGASVLQARREADDPHSPVARFGARNPLKLDAGVELSHLQIAYQTYGEPNAARSNAILVCHALTGDQHAASLNPVTGKPGWWETLVGPGKPIDTERFYVICANVLGGCMGTTGPASTNPLTGQPYGLDMPVVTIRDMVNAQAMLLDHLGIDKLLCVAGGSMGGMQVLQWAASYPERVFSALPIATGARHSAQNIAFHEVGRQAVMADPDWRGGRYLAEGVTPHRGLAVARMAAHITYMSDQSLHNKFGRRLQNRDMPTFGFDADFQVESYLRHQGESFVQRFDPNSYLYVTRAMDYFDLAADHGGVLANAFRGSKTRFCVVSFTSDWLFPTEDSRAIVHALNASGANVSFTEIDSDKGHDAFLLHEPELTAITRGFLDSAARAFGLPAARQA

SEQ ID NO: 92441 - DNA, 1158 bp, gamma proteobacterium HTCC2207
  CDS (1)..(1158): transl_table=11
atgacaccaggcataagcgcaaattctgtcggcgtggtaacggcggaaaaaattcttatcgaaacgcccctcactctggcctgcggcgtcgtactgcccagccatgagctgatggttgagacctacggcaccctcaatgccgacaagagtaatgccctattgatctgtcatgccctgagcggaagccatcacgccgcaggcgtttatgccgagggcgaaaagcctggctggtgggatgcctatataggcccgggcaaagccatggacaccgatcgcttttttattgtttcactgaataatatcggtagctgctttggcagcaccggccccaccacaatcaatcctcaaagtggcaaaccctggggagcagatttcccggtcctgcgtgctcgagattgggtggaatcacagcgattgctgatggagcatctcgagattcaacagtgggcggcggttatcggcggcagcctcggcggcatgcaggcgatgcgctgggctcttgagcatccagacaagctagccaatagcatagtgattgcctcatccatgaaactaacggcgcagaatatcgcctttaatgagctggcccgcagagcaatccagtcggatcccgatttctatgctggcgactatctagacaacaatacagccccacgccgtggtctggctctggcgcgcatgattggacatgtcacttacctgtccgatgaattgatgggccaaaaatttggtcgcgagctgcgttccggaacctttactcagggcgaggccgcacctatcgaatttcagattgagagctacctcaactatcaaggcgagaagttttccggtgacttcgatgccaatgcctatattttgatcaccaaaatgctcgattactttgatctctcacgggagtatcagaatgatccagtgcaggcctttagccatgccaattgtgactttttggtggtttccttcagcagtgactggcgtttttctccccagcgctcccgggagattaccgacgccctaatcgccgccgggaaaaatgtctccttcgctgaaattgattcggaccagggccatgacgcatttctactgcccaacccgcgctacgagcaagtactgggcaactatctgagtagagtcgccgataaattggagggcgcagcatga

SEQ ID NO: 92442 - protein, 385 aa, gamma proteobacterium HTCC2207
MTPGISANSVGVVTAEKILIETPLTLACGVVLPSHELMVETYGTLNADKSNALLICHALSGSHHAAGVYAEGEKPGWWDAYIGPGKAMDTDRFFIVSLNNIGSCFGSTGPTTINPQSGKPWGADFPVLRARDWVESQRLLMEHLEIQQWAAVIGGSLGGMQAMRWALEHPDKLANSIVIASSMKLTAQNIAFNELARRAIQSDPDFYAGDYLDNNTAPRRGLALARMIGHVTYLSDELMGQKFGRELRSGTFTQGEAAPIEFQIESYLNYQGEKFSGDFDANAYILITKMLDYFDLSREYQNDPVQAFSHANCDFLVVSFSSDWRFSPQRSREITDALIAAGKNVSFAEIDSDQGHDAFLLPNPRYEQVLGNYLSRVADKLEGAA

SEQ ID NO: 92443 - DNA, 1131 bp, marine gamma proteobacterium HTCC2080
  CDS (1)..(1131): transl_table=11
atggttcaagctggggacgtcggccttgtaacagcagcacgcgaggttttttctgaaaccctcaccctcacgtcggggcgaactctggcgggctttgaactgatcacggagacctacggccagcttaatgcgcagcgcagtaatgccgtattgatctgccatgcgctaagcggcaaccatcatgctgccggtcgctacgacctttcagacccaaaacccggatggtgggatttgcatattggtcccggaaaagcgattgataccaaccgattttttgttgtgtccctcaataatcttggtggttgtgacggcagctcggggcctaacacaatgaactctgccaccgaacagccgtgggggcctgacttcccacaagtcagcgttagcgactgggtcacgactcaagtgatgctggccgaaaggctgggaattgaaagctgggccgcggtcattggtggcagtctgggtggcatgcaggcactccactgggcggttcactatcccgagcgcgtgcgcaactgtgtggcactggcggcggcagcaaagctcactgcccagaacattgcattcaatgaaattgcgcgtcaggccatactttcagatcccgattggctgacaggtcattaccaacgagaaacggtgacacctacccggggcctatctctggcacggatggtaggccacctgacctatatgtcagcagacggtatgagcgaccgctttgggcgagatacccgcactccctctgaaaccatcgattcagatgaaaccgtatttcaggtagaaagctatctccggtatcagggtaagcagttttcaacccgctttgacgccaacacttaccttttgatgaccagagccttggatcgatttgatatcgctgctgattttaatgactcactcaatgacgccatggcggtgacaacctcacgcatgctgatcattgccttctccagtgattggcgcttctcccctgcccgatctcaagagctagtcgatgccttactcgcgtcagggcggccggttagctacgccgaaattgaaaccgacgccggacacgatgcgtttttgcttgatgaacctcattacaccgggctatttaccgcctggatgcagcaggttgttatttga

SEQ ID NO: 92444 - protein, 376 aa, marine gamma proteobacterium HTCC2080
MVQAGDVGLVTAAREVFSETLTLTSGRTLAGFELITETYGQLNAQRSNAVLICHALSGNHHAAGRYDLSDPKPGWWDLHIGPGKAIDTNRFFVVSLNNLGGCDGSSGPNTMNSATEQPWGPDFPQVSVSDWVTTQVMLAERLGIESWAAVIGGSLGGMQALHWAVHYPERVRNCVALAAAAKLTAQNIAFNEIARQAILSDPDWLTGHYQRETVTPTRGLSLARMVGHLTYMSADGMSDRFGRDTRTPSETIDSDETVFQVESYLRYQGKQFSTRFDANTYLLMTRALDRFDIAADFNDSLNDAMAVTTSRMLIIAFSSDWRFSPARSQELVDALLASGRPVSYAEIETDAGHDAFLLDEPHYTGLFTAWMQQVVI

SEQ ID NO: 92445 - DNA, 1461 bp, Aspergillus niger
  CDS (1)..(1461)
atggtcgctcaagccaccgcccccgggcaattccagagggctgactcccaacccgaaaacccttattcggctctcatcaccgatcaaacgatcgttaccattccttccttcacccttgagtctggtgttaccttgcacaacgttcctgtggcctacacgacgaggggtcaactctcccccgaacgtgacaatgcattggtgatctgtcatgctctcagtggtagtgcggatgtcgcggactggtggggtcccctgcttggtggccccggtcaagctttcgatacctcgcggtttttcgtcgtctgcttgaacagtctgggtagtccgtacggaagtgccagtgccgtgacctacaaggacggcgatccgtccaagggcttgtacggtcctgagtttcctctcactaccgtccgtgatgatgtaaagattcacaagatggtgctggatgacatgggcatccgtcaaattgcagccgtggtgggtggctccatgggtggtatgcttactctcgagtacgcctactttggcaaggactatgttcgtgcaatcgtccctatcgccacctctcctcgtcattcggcttggtgtatcagctggggtgaagcccaacggcagagcatctacagtgacccgaagtatgaggatggctactacccgtttgacgatcctccggccaccggattgggtgcggcgcgcatgtctgccctcctcacctaccgcagccgcaactctttcgagtctcgatttggcagaaacgtgcccgatccctccaagcggcagaccatcaatggccaagaaagatcgcctaccccccctaacgagcactgggctatccacaacgacggacacaagagtggacgcagctcgcccgggccgcagtccgacgcccaacattctgaagtccagtttcaagatcctcaattctctggtgccaagaccttcagcaagaccatcgagaccaacggttcccagaagcggctccccacctatttctcggcgcagtcgtaccttcggtaccagggcgagaaattcgtgaagcgtttcgatgccaattgctacatcgccatcacccgcaagcttgacacgcacgatgtgtcccgacaccgggccagtccttccgcggagaaccccgtccgtgaagccctgtctcaaattcagcagcctgctctggttctaggtatcgaatctgatggactgttcactttcgacgaacagaaggagatcgcggccggcattccggactcccgcctgaagcggattgagagtcccgaaggtcacgacgccttcctcctccagttcgaacaggtcaaccgttacatcctcgagttcttccgcgaggtcctgccggacatcatgtccaaggcacctgccgaaggagtccaggctgtggacggagtcaacaagctaaccaagagcagcacgttcggcgaagcggaagtggaagatatcaccgcgtggtaa

SEQ ID NO: 92446 - protein, 486 aa, Aspergillus niger
MVAQATAPGQFQRADSQPENPYSALITDQTIVTIPSFTLESGVTLHNVPVAYTTRGQLSPERDNALVICHALSGSADVADWWGPLLGGPGQAFDTSRFFVVCLNSLGSPYGSASAVTYKDGDPSKGLYGPEFPLTTVRDDVKIHKMVLDDMGIRQIAAVVGGSMGGMLTLEYAYFGKDYVRAIVPIATSPRHSAWCISWGEAQRQSIYSDPKYEDGYYPFDDPPATGLGAARMSALLTYRSRNSFESRFGRNVPDPSKRQTINGQERSPTPPNEHWAIHNDGHKSGRSSPGPQSDAQHSEVQFQDPQFSGAKTFSKTIETNGSQKRLPTYFSAQSYLRYQGEKFVKRFDANCYIAITRKLDTHDVSRHRASPSAENPVREALSQIQQPALVLGIESDGLFTFDEQKEIAAGIPDSRLKRIESPEGHDAFLLQFEQVNRYILEFFREVLPDIMSKAPAEGVQAVDGVNKLTKSSTFGEAEVEDITAW

SEQ ID NO: 92447 - DNA, 1500 bp, Ostreococcus tauri
  CDS (1)..(1500)
atgagcgcccaggaggtcccggatgatcacatgggcgacgtcaaaacgggcgccccgccggaagcgaccctggtcgtcctgaacgaacctctcacgctggaatccggtgacgcgatcgagcgctgtgcgtgcgcatacacaatgtacggcgagctgagcgcgtcgagagataacgtcgtgctcgtcggccattcgttgacgtcgaactcgaacgtacgcgagtggtgggcggagtgcgtgggtgaaggggacggatacgcgttggatttgagtaaggattgcgtcgtgtgcgtgaactacctagggtcgccgtacggaagcgcgagtccggtgagcgtcgatccgaggaagagcgatggaggggcgtatggggtggattttccaacgccagtaacgatcagggataactgtgcgatgtgtaagatgctattggattcgctcggggtgaacggggtgcgatgcgcgatgggcgggtcgatgggttcgatgctcgcgctggagtttgcggcgacgtatcccgatttcgtggagaccatggtgttgatagcgggctgcggaagacacacggactgggcgatcgggatgggtgaggcgcagagatatgcgatcatgagcgatgggaagtataagggcggagcgtacgctcacgatgacggaccaaacgccggtttggcgacatctcgcatgatggccatgttgagctatcgcgcaccggcgagtgtggacgggagattttcgaggacgagcatgagtgagtttaaacccgcagaggagatagagttggggattcgggcgcacgaaaaggagacgaagctgccatactttgccgtggagtcgtaccttcagtatcaagggaaaaaattcatacggaggtttgacgcaaactgttacattcagctgacttacaccctagattcacacgacgtttctcgtgggcgtggggattatttcgacgtcttggcgaagattaagcagcgcgctctcgtggttggcattctcagcgacgtcttgtatccgtacgcgcttcaaagagagctcgcggacgcactgcccaactcacagctttacacagtcgactcgccccacggccacgattcgttcttgatcgaaatacagcagttgaatcaagttatggcgaagtggcgccgcggtgagtgcgtggacacccgtcaaggcgtccctgatttcaccgctctcgaaagctcggaagacgtgcgcgagctccgtgaaggcatcaaacgtcttcgcgaggagctcacgaccgctgagctcaagcgcgaacgcgccgaggccgctctccgagctgcactggatcctgcacaaaacattagtggttcggcgagcgcgctccagcgctccgcatctgtcggcagcgccctgaaccttcccggcgtcatacttccggcgaacccgtccgggagcgagaccctgcgacttccggtctttggcaagctctctatcgacaacgacaattcgtacgccgggttcgcagccttctaa

SEQ ID NO: 92448 - protein, 499 aa, Ostreococcus tauri
MSAQEVPDDHMGDVKTGAPPEATLVVLNEPLTLESGDAIERCACAYTMYGELSASRDNVVLVGHSLTSNSNVREWWAECVGEGDGYALDLSKDCVVCVNYLGSPYGSASPVSVDPRKSDGGAYGVDFPTPVTIRDNCAMCKMLLDSLGVNGVRCAMGGSMGSMLALEFAATYPDFVETMVLIAGCGRHTDWAIGMGEAQRYAIMSDGKYKGGAYAHDDGPNAGLATSRMMAMLSYRAPASVDGRFSRTSMSEFKPAEEIELGIRAHEKETKLPYFAVESYLQYQGKKFIRRFDANCYIQLTYTLDSHDVSRGRGDYFDVLAKIKQRALVVGILSDVLYPYALQRELADALPNSQLYTVDSPHGHDSFLIEIQQLNQVMAKWRRGECVDTRQGVPDFTALESSEDVRELREGIKRLREELTTAELKRERAEAALRAALDPAQNISGSASALQRSASVGSALNLPGVILPANPSGSETLRLPVFGKLSIDNDNSYAGFAAF

SEQ ID NO: 92449 - DNA, 1485 bp, Aspergillus oryzae
  CDS (1)..(1485)
atggccactgaatcgaacagtgcgcctgcacaaccccagagactcgactctcaacctgagaaccctttctcaaacctcatcacggatcagttgtttgtttcgatcccctcgttcactttggaatcgggcgttacgttgtacaatgtcccagtggcctacactacgcggggtcagctgtccgagaccggagacaatgccttagtgatctgtcacgctctgagcggtagcgcggatgtcgcagattggtggggaccacttctgggtggccctggacaggccttcgacacatctcgatttttcgtgatctgcttgaatagcctgggtagcccgtacggaagcgctagtgccgtaacctacaaggatggaaacccagaaaagggactgtatggaccggaatttccacttactacagttcgtgatgatgtgaggatccacaagatcgttctggattatctgggagttcgacagattgctgccgttgtgggcggctccatgggcggtatgctcactttggaatatgcctacttcggtaaagattatgtacgagcgattgtgccgattgccacctctccgcggcattccgcatggtgcatcagttggggagaggcccagcgccaaagcatctatagcgaccctaaatacgaggacggctattattcttttgatgatcctcctgctactggtcttggcgcagctcgcatgtccgctcttcttacctaccggagccgcaactcgttcgaatctcggtttgggcgaaatgtgccggaccctaccaaacaacaaaacattaagggcacggaaaagctgcctacacccccgaatgagcactgggctattcataatgacgggcacaaaggtggtcgttcgacacctagtgggcgcaactcccccacctctcccacaccgcaacagaccgaagttcagtacatggacccccagttctccggaaccaaaactttcagtaaaaccatcgatagcgcactgaagagcggtcagaagcgtccgccaacctatttctccgcccagtcgtatctccgttaccagggtgagaagtttgtgaaacggttcgatgctaactgttacatcgctatcacacgcaaactggacacacatgacgtgtcaaggcaacgagcgagcccgacgtcgagtgatccagttcgcgaggctttggcgcaaattcaacagccagcattggtattgggaatcgagagtgacggcctattcacttttgaggagcagaaagagattgcagctggcattccggactcacgcctcaaacgaatcgaaagcccagagggccacgatgccttcctcctccagtttgagcaggtcaaccgctacattctggagttcttccgcgaagttttgccggacatcatgtccaaggctccagctgatggggccgtggaggtggacggggtgaataagctaaccaagagcagcacattcggagaggcggaggtggaagatatcaccgcctggtaa

SEQ ID NO: 92450 - protein, 494 aa, Aspergillus oryzae
MATESNSAPAQPQRLDSQPENPFSNLITDQLFVSIPSFTLESGVTLYNVPVAYTTRGQLSETGDNALVICHALSGSADVADWWGPLLGGPGQAFDTSRFFVICLNSLGSPYGSASAVTYKDGNPEKGLYGPEFPLTTVRDDVRIHKIVLDYLGVRQIAAVVGGSMGGMLTLEYAYFGKDYVRAIVPIATSPRHSAWCISWGEAQRQSIYSDPKYEDGYYSFDDPPATGLGAARMSALLTYRSRNSFESRFGRNVPDPTKQQNIKGTEKLPTPPNEHWAIHNDGHKGGRSTPSGRNSPTSPTPQQTEVQYMDPQFSGTKTFSKTIDSALKSGQKRPPTYFSAQSYLRYQGEKFVKRFDANCYIAITRKLDTHDVSRQRASPTSSDPVREALAQIQQPALVLGIESDGLFTFEEQKEIAAGIPDSRLKRIESPEGHDAFLLQFEQVNRYILEFFREVLPDIMSKAPADGAVEVDGVNKLTKSSTFGEAEVEDITAW

SEQ ID NO: 92451 - DNA, 2221 bp, Pichia pastoris
  CDS (450)..(1877)
aggaagtcaaatgcgaactgattattagagatttcaataataacataaagcagctacccctaccacagaaataggtgacttgtgagtcggttcgtactatggtactatttagtctaaaatattccaattcagctcctaatggcattctgtagatcgagctcaattaacccttaacatgtattatctcaagcattagttgtgtgatactctaggcaattgactactgggctacctacatgccatgaaaaaagcaacaagaaaatccccggtaatcttgtaatgagttccaggtcagtgaaatcaggcaagagcttaagttaagttacctttgaacaggcctcagtttattaaacttgtttctccacaccgcgacattgcacgtgatctaatctactctccttctataatcagtctcaagttcgccttttttcgcctcaacatattgaattatgagataccaggaggttcatgagcccgaaaacccattctcacttctagtaaaaggtcagacaatagtggaaatacctcaagtgcagttggaaagcggcgaaactttgcacaatgttccggtagctttcaaaacctgggggaagcttaacaaagaaggcaccaattgcatggtgatctgccatgctttaacgggttccagtgatgtagttgattggtggggacctttgttaggtaagggcaaggcatttgatcccagcaagttttttattgtgtgcttgaattctttaggaagtccttatgggtcctgttctccagtaactagagatccggcagttaatgaactatatggtccagaattcccccttgtatcagtcagagatgatgtgaatatacatagactgattctaaatgatcttggtgtcaagcaggtcgcaatagtaataggaggatctatgggtggaatgcttgctttagaatggtgcttttttggtctatcgtatgtcctcaactgcgtcgttttggccaccagtgctaagcatagtgcatggtgtatatcttggggagaagcccaaagacaaagtatatacagtgatcccaaatatgatgacggttattacccactggaagatccacctattcaaggattgggagctgctagaatgagcgctttgttgacttatcgttctcgcaactctttcgaagaacgttttggacgaggagccccaacgccacaaatgagagaaaagtctcttcgaacttccgtcataactgatgccattgaagcacctgctgttagcgaagataactgcgctgtacataacgatggacattattcatactcttcatccaccaaagttagatcaagatctctgtcttcgaacaattttagtcttttagatgtgaaagaggacacaagtagtattgtcaaccaacatggcgttggtcaacgtacccgccgtcgtccacagcattatttttctgctcaaagttacttaaggtaccaggcagccaagttcagtcaaagatttgatgctaattgttatatatccattacaaggaaattggacacacatgacgtgggaaggaacagacctgaatttcataactccacaatagaggctctccaatcgttagaacagaatttccttgtagtaggcatacaatctgatgccctgtttacatactcagaacaggttttcatagcaaaacacgttaagaattccaagttatgcaaaattgactctccagagggccatgatgcgtttttattagagttcgaagcaattaacaagctgattctagaatttgaaatcgaacacgttcctgaacttctaatgcaaacctccgacgattcttggtcggattctgaactaggaaacactaaggagagcatattcggtgaagttgaggatccgacgtcgtggtaagctacaaagtaaaaatttgcctcacgctatttgctctggctgaaataataatgaccgtttatagaaaattaataatggtaaagtttttatcattctttaacgagcctcaatctgtctaaaacttcctgacggacttcgattatattccgtcgctcggaaggtaaaaaaagtgcaacgatgaaaaagttggtaaccgcaagcacagttattaatgttgacgtgaaaagaaaaagaacactagaccatggggctatgaaagagactaatgttacggaaacatgcaatccaataatgactaaaattgaaacaaagacgtgaaaagatctccattttacctgacgtct

SEQ ID NO: 92452 - protein, 475 aa, Pichia pastoris
MRYQEVHEPENPFSLLVKGQTIVEIPQVQLESGETLHNVPVAFKTWGKLNKEGTNCMVICHALTGSSDVVDWWGPLLGKGKAFDPSKFFIVCLNSLGSPYGSCSPVTRDPAVNELYGPEFPLVSVRDDVNIHRLILNDLGVKQVAIVIGGSMGGMLALEWCFFGLSYVLNCVVLATSAKHSAWCISWGEAQRQSIYSDPKYDDGYYPLEDPPIQGLGAARMSALLTYRSRNSFEERFGRGAPTPQMREKSLRTSVITDAIEAPAVSEDNCAVHNDGHYSYSSSTKVRSRSLSSNNFSLLDVKEDTSSIVNQHGVGQRTRRRPQHYFSAQSYLRYQAAKFSQRFDANCYISITRKLDTHDVGRNRPEFHNSTIEALQSLEQNFLVVGIQSDALFTYSEQVFIAKHVKNSKLCKIDSPEGHDAFLLEFEAINKLILEFEIEHVPELLMQTSDDSWSDSELGNTKESIFGEVEDPTSW

SEQ ID NO: 92453 - DNA, 1506 bp, Ascobolus immersus
  CDS (1)..(1506)
atgcatctcgtcgatagagttggtgcaaatgcaccccacaagaagtatgaacgagtaacgacgcaacccgaaaaccccttcttcaacattgtccacaaccaatctgttgccatcatcccttcctttacgctcgagtctggtgtgatcctctacgactgtccggttgcctacaagacgtttggtgtgctgaatgagagtgccgacaatgtcatggtgatttgccatgcgttgacgggcagtgcggatgttgaggattggtgggggcccttgattgggccaggcagagcgtttgatacaagtcgctattttatcgtctgctgcaatagtatgggaagtccgtatggaagtgctagtccttgtaccttggactcgacgactgggaggaggtatgggccggagtttcccttgacgactgtgagggatgatgttagaatccacaagctcatcatggacgacctaggagttcgccaaattgccgtagtcattggcggttccatgggtggcatgctcgccctcgaatgggcctactttggcaaagactacgtcaaagccgtcgtagccctagccacctccgcccgccactccgcctggtgcatctcctggggtgaggctcaacgacaatccatctactcggaccccaaatacgacgacggctactactccttctctgatccaccctacaccggcctcggcgccgcccgcatgtctgccctcctcacctaccgctcccgcaactccttcgaatcgcgcttcggccgcaacatccccgacccttcccgccatccctacatcaacacttcccaacccccttcccaccccgccgaagaacactacgacatccacaacgaaggcttccgcaaccgcaaaggcttccgccgctcctccaccactacctccgacgctcccccttctcccactcgcacctcctccacctcctcaacagacgcaatcactcccgcctccacaaccccactccacccctcccgagcccaaccttctggcatcgccacccctcccaactccgtctctgaccccttccgcccagtaaagaggccctgcccgacttacttctccgcccaatcctaccttcgctaccaagccgacaaattcgtcaagcgcttcgacgcaaactgctacatcgccatcacccgtaagttggacacacacgacgtctctcgcggccgcacctccactctccacgaggctctcgcgatgatcgagcagcccaccctcatcattggcattgaaagtgacggcctgtttacgtttgccgagcaaatggagctggccgaatatatccccgacgcgagactaaagaggatcgatagtcccgagggacatgatgcgtttttgattatgtttgcggaggtgaatcggtatatctgtgagtttttgagggaggtgcagccggagattatgggtaaggagggggtgcatgtggagagtaaggtgggggagattagggcgagtacgacgggggaggtggaggatatcacacattggtag

SEQ ID NO: 92454 - protein, 501 aa, Ascobolus immersus
MHLVDRVGANAPHKKYERVTTQPENPFFNIVHNQSVAIIPSFTLESGVILYDCPVAYKTFGVLNESADNVMVICHALTGSADVEDWWGPLIGPGRAFDTSRYFIVCCNSMGSPYGSASPCTLDSTTGRRYGPEFPLTTVRDDVRIHKLIMDDLGVRQIAVVIGGSMGGMLALEWAYFGKDYVKAVVALATSARHSAWCISWGEAQRQSIYSDPKYDDGYYSFSDPPYTGLGAARMSALLTYRSRNSFESRFGRNIPDPSRHPYINTSQPPSHPAEEHYDIHNEGFRNRKGFRRSSTTTSDAPPSPTRTSSTSSTDAITPASTTPLHPSRAQPSGIATPPNSVSDPFRPVKRPCPTYFSAQSYLRYQADKFVKRFDANCYIAITRKLDTHDVSRGRTSTLHEALAMIEQPTLIIGIESDGLFTFAEQMELAEYIPDARLKRIDSPEGHDAFLIMFAEVNRYICEFLREVQPEIMGKEGVHVESKVGEIRASTTGEVEDITHW

SEQ ID NO: 92455 - DNA, 1507 bp, Saccharomyces pastorianus
  CDS (32)..(1492)
gaattaaaaagagaagcgataagaaagatatatgtctcacactttaaaatcgaaaacgctccaagagctggatattgaagatattaaggagaccaaccctttactgaagctggtccaaggacagagaattgtccaaatcccggaactggtgttagagtctggtgtggtgctaagtaacttccccattgcttacaagacatggggaacgctgaacgaagcctgcgataacgttctggtcatctgtcacgccctgacgggatctgcagacgtcgcagactggtggggccctcttctgggcaacgatctggcattcgacccatcgagatttttcatcatatgcctgaactctatgggctctccttacggctcgttttcaccattgacgataaatgagcagaccggtactcgatatggtcctgagttcccattgtgcactgtgcgtgatgacgtcagggcccacagaatcgttctggattctttaggtgtgaagtccatagcgtgcgttatcggggggtccatgggagggatgttaagcctggagtgggctgccatgtacggtaatgagtacgtgaagaatatggttgccctcgcgacctcggcaagacactctgcctggtgtatatcgtggtcggaggctcaaagacagtcgatatactcagacccaaactacctggatggctactacccagtagaagagcaaccagtagccgggttgtcagctgcacgtatgtctgcattgttgacataccgaactagaaacagtttcgaaaacaaattctccaggagatctccctcgatagcccagcaacaaaaggcccaaaaagcagaagcgcgtaaaccctccactatcagcgagcactccttacagattcacaacgacggttacaaaagtaaagccaatggtgccattgttggcatctcaggacaaaagcgtcaaagcgtggtttctactacatcgtcttcggactcattaacttcacagtcatccatgacctcggtaagttccatcactggcgaagtgaaggacatcaagcctgctcaaacatatttttctgcacaaagctacttgaggtaccaaggtaccaaatttatcaataggtttgacgccaactgttacattgccattacgcgtaagctggacacgcacgatttagccagagacagggtcgaagacatcacgaaggtactttccgccatcgagcagccttcactgatcatcggtatccaatctgatggcctattcacatactccgaacaagaattcctggctgaatacataccgaagtcgcaactggaaaaaatcgaatctccagaaggccacgatgcctttttgttggaattcaagcggataaacaaactaattgtggacttcttgaaaaccaactgtaagaatattacggatgccaaaccaagtacttggggaggagatgttggtaacgacgaaacgaaaacatctgtcttcggcgaggcggaggaagttaccaactggtagccaagagggccaccc

SEQ ID NO: 92456 - protein, 486 aa, Saccharomyces pastorianus
MSHTLKSKTLQELDIEDIKETNPLLKLVQGQRIVQIPELVLESGVVLSNFPIAYKTWGTLNEACDNVLVICHALTGSADVADWWGPLLGNDLAFDPSRFFIICLNSMGSPYGSFSPLTINEQTGTRYGPEFPLCTVRDDVRAHRIVLDSLGVKSIACVIGGSMGGMLSLEWAAMYGNEYVKNMVALATSARHSAWCISWSEAQRQSIYSDPNYLDGYYPVEEQPVAGLSAARMSALLTYRTRNSFENKFSRRSPSIAQQQKAQKAEARKPSTISEHSLQIHNDGYKSKANGAIVGISGQKRQSVVSTTSSSDSLTSQSSMTSVSSITGEVKDIKPAQTYFSAQSYLRYQGTKFINRFDANCYIAITRKLDTHDLARDRVEDITKVLSAIEQPSLIIGIQSDGLFTYSEQEFLAEYIPKSQLEKIESPEGHDAFLLEFKRINKLIVDFLKTNCKNITDAKPSTWGGDVGNDETKTSVFGEAEEVTNW

SEQ ID NO: 92457 - DNA, 1134 bp, Corynebacterium glutamicum
  CDS (1)..(1134): transl_table=11
atgcccaccctcgcgccttcaggtcaacttgaaatccaagcgatcggtgatgtctccaccgaagccggagcaatcattaaaaacgctgaaatcgcctatcaccgctggggtgaataccgcgtagataaagaaggacgcagcaatgtcgtcctcatcgaacacgccctcactggagattccaacgcagccgattggtgggctgacttgctcggtcccggcaaagccatcaacactgatatttactgcgtgatctgtaccaacgtcatcggtggttgcaacggttccaccggacctggctccatgcatccagatggaaatttctggggtaatcgcttccccgccacgtccattcgtgatcaggtaaacgccgaaaaacaattcctcgacgcactcggcatcaccacggtcgccgcagtacttggtggttccatgggtggtgcccgcaccctagagtgggccgcaatgtacccagaaattgttggcgcagctgctgttcttgcagtttctgcacgcgccagcgcctggcaaatcggcattcaatccgcccaaattaaggcgattgaaaacgaccaccactggcacgaaggcaactactacgaatccggctgcaacccagccaccggactcggcgccgcccgacgcatcgcccacctcacctaccgtggcgaactagaaatcgacgaacgcttcggcaccaaagcccaaaagaacgaaaacccactcggtccctaccgcaagcccgaccagcgcttcgccgtggaatcctacttggactaccaagcagacaagctagtacagcgtttcgacgccggctcctacgttttgctcaccgacgccctcaaccgccacgacattggtcgcgaccgcggaggcctcaacaaggcactcgaatccatcaaagttccagtccttgtcgcaggcgtagacaccgatattttgtacccctaccaccagcaagaacacctctcccgaaacctgggaaatctactggcaatggcaaaaatcgtatcccctgtcggccacgatgctttcctcaccgaaagccgccaaatggatcgcatcgtgaggaacttcttcagcctcatctccccagacgaaaacaacccttcgacgtacatcgagttctacatctaa

SEQ ID NO: 92458 - protein, 377 aa, Corynebacterium glutamicum
MPTLAPSGQLEIQAIGDVSTEAGAIIKNAEIAYHRWGEYRVDKEGRSNVVLIEHALTGDSNAADWWADLLGPGKAINTDIYCVICTNVIGGCNGSTGPGSMHPDGNFWGNRFPATSIRDQVNAEKQFLDALGITTVAAVLGGSMGGARTLEWAAMYPEIVGAAAVLAVSARASAWQIGIQSAQIKAIENDHHWHEGNYYESGCNPATGLGAARRIAHLTYRGELEIDERFGTKAQKNENPLGPYRKPDQRFAVESYLDYQADKLVQRFDAGSYVLLTDALNRHDIGRDRGGLNKALESIKVPVLVAGVDTDILYPYHQQEHLSRNLGNLLAMAKIVSPVGHDAFLTESRQMDRIVRNFFSLISPDENNPSTYIEFYI

SEQ ID NO: 92459 - DNA, 1461 bp, Saccharomyces bayanus
  CDS (1)..(1461)
atgtctcacactttaaaatcgaaaagcctccaagagctggatattgaagatattaaggagaccaaccctttactgaagctggtccaaggacagagaattgtccaaatcccggaactggtgttagagtctggtgtggtgctaagtaacttccccattgcttataagacatggggtacgctgaacgaagcctgcgataacgttctggtcatctgtcacgccctgacgggatctgcagacgtcgcagactggtggggccctcttctgggcaacgatctggcgttcgacccatcgagatttttcatcatatgcctgaactctatgggctctccttacgggtcgttttcaccattgacgataaatgagcagaccggtactcggtatggtcctgagttcccattgtgcactgtgcgtgatgacgtcagggcccacagaatcgttctggattctttaggtgtgaagtccatagcgtgcgttatcggggggtccatgggagggatgttaagcctggagtgggctgccatgtacggtaatgagtacgtgaagaatatggttgccctcgcgacctcggcaagacactctgcctggtgtatatcgtggtcggaggctcaaagacagtcgatatactcagacccaaactacctggatggctactacccagtagaagagcaaccagtagccgggttgtcagctgcacgtatgtctgcattgttgacataccgaactagaaacagtttcgaaaacaaattctccaggagatctccctcgatagcccagcaacaaaaggcccaaaaagcagaagcgcgtaaaccctccactatcagcgagcactccttacagattcacaacgacggttacaaaagtaaagccaatggtgccattgttggcatctcaggacaaaagcgtcaaagcgtggtttctactacatcgtcttcggactcattaacttcacagtcatccatgacctcggtaagttccatcactggcgaagtgaaggacatcaagcctgctcaaacatatttttctgcacaaagctacttgaggtaccaaggtaccaaatttatcaataggtttgacgccaactgttacattgccattacgcgtaagctggacacgcacgatttagccagagacagggtcgaagacatcacgaaggtactttccgccatcgagcagccttcactgatcatcggtatccaatctgatggcctattcacatactccgaacaagaattcctggctgaatacataccgaagtcgcaactggaaaaaatcgaatctccagaaggccacgatgcctttttgttggaattcaagcggataaacaaactaattgtggacttcttgaaaaccaactgtaagaatattacggatgccaaaccaagtacttggggaggagatgttggtaacgacgaaacgaaaacatctgtcttcggcgaggcggaggaagttaccaactggtag

SEQ ID NO: 92460 - protein, 486 aa, Saccharomyces bayanus
MSHTLKSKSLQELDIEDIKETNPLLKLVQGQRIVQIPELVLESGVVLSNFPIAYKTWGTLNEACDNVLVICHALTGSADVADWWGPLLGNDLAFDPSRFFIICLNSMGSPYGSFSPLTINEQTGTRYGPEFPLCTVRDDVRAHRIVLDSLGVKSIACVIGGSMGGMLSLEWAAMYGNEYVKNMVALATSARHSAWCISWSEAQRQSIYSDPNYLDGYYPVEEQPVAGLSAARMSALLTYRTRNSFENKFSRRSPSIAQQQKAQKAEARKPSTISEHSLQIHNDGYKSKANGAIVGISGQKRQSVVSTTSSSDSLTSQSSMTSVSSITGEVKDIKPAQTYFSAQSYLRYQGTKFINRFDANCYIAITRKLDTHDLARDRVEDITKVLSAIEQPSLIIGIQSDGLFTYSEQEFLAEYIPKSQLEKIESPEGHDAFLLEFKRINKLIVDFLKTNCKNITDAKPSTWGGDVGNDETKTSVFGEAEEVTNW

SEQ ID NO: 92461 - DNA, 1335 bp, Cephalosporium acremonium
  CDS (1)..(1335)
atgctgccgtcggcccaagtggcccgtctaaagccggacccctttcccccgagtctctccccgatcccgcacggggccgtcactttcgctgccctcgctccttgtcataacctacctatattctcatcccggcaaatgctgcgggatagcctcacctacagccacacgtcgcccaccatgtcgcctcagatcgccaatcgcttcgaggcttcgctagatgcccaagacatagccagaatatcgctcttcacactggaatctggcgtcatccttcgcgatgtacccgtggcatacaaatcgtggggtcgcatgaatgtctcaagggataactgcgtcatcgtctgccacaccttgacgagcagcgcccatgtcacctcgtggtggcccacactgtttggccaaggcagggctttcgatacctctcgctacttcatcatctgcctaaattatctcgggagcccctttgggagtgctggaccatgttcaccggaccccgatgcagaaggccagcgcccgtacggggccaagtttcctcgcacgacgattcgagatgatgttcggattcatcgccaggtgctcgacaggttaggcgtcaggcaaattgctgccgtagtcggcgcatccatgggtggaatgcacactctggaatgggccttctttggtcccgagtacgtgcgaaagattgtgcccatcgcgacatcatgccgtcagagcggctggtgcgcagcttggttcgagacacagaggcagtgcatctatgatgaccccaagtacctggacggggagtacgacgtagacgaccagcctgtccgggggctcgaaacagcgcgcaagattgcgaatctcacgtacaagagcaaacctgcgatggacgagcgcttccatatggctccaggagtccaagccggccggaatatcagcagccaggatgcgaagaaggaaatcaacggcacagacagcggcaacagccaccgtgctggccagcccattgaagccgtatcttcctatctccggtaccaggcccagaagtttgccgcgagcttcgacgccaactgctacatcgccatgacactcaagttcgacacccacgacatcagcagaggccgggcaggatcaatcccggaggctctggcaatgattacacaaccagcgttgatcatttgcgccaggtcagacggtctgtactcgtttgacgagcacgttgagatggggcgcagtatcccaaacagtcgtctttgcgtggtggacacgaatgagggtcatgacttctttgtaatggaagcggacaaggttaatgatgccgtcagaggattcctcgatcagtcattaatgtga

SEQ ID NO: 92462 - protein, 444 aa, Cephalosporium acremonium
MLPSAQVARLKPDPFPPSLSPIPHGAVTFAALAPCHNLPIFSSRQMLRDSLTYSHTSPTMSPQIANRFEASLDAQDIARISLFTLESGVILRDVPVAYKSWGRMNVSRDNCVIVCHTLTSSAHVTSWWPTLFGQGRAFDTSRYFIICLNYLGSPFGSAGPCSPDPDAEGQRPYGAKFPRTTIRDDVRIHRQVLDRLGVRQIAAVVGASMGGMHTLEWAFFGPEYVRKIVPIATSCRQSGWCAAWFETQRQCIYDDPKYLDGEYDVDDQPVRGLETARKIANLTYKSKPAMDERFHMAPGVQAGRNISSQDAKKEINGTDSGNSHRAGQPIEAVSSYLRYQAQKFAASFDANCYIAMTLKFDTHDISRGRAGSIPEALAMITQPALIICARSDGLYSFDEHVEMGRSIPNSRLCVVDTNEGHDFFVMEADKVNDAVRGFLDQSLM

SEQ ID NO: 92463 - DNA, 1470 bp, Emericella nidulans
  CDS (1)..(1470)
atgaccacagaacagcctaccgcccgtctccagagagtcgattcccaacctgaaaacccattctcagccctgatcgaggaccagtctatcgttatcatcccaacattcaccttggaatccggcgttaccctctataacgttccggtagcctatacaacccgcggaacactctcaccgagtggtgacaatgctcttgtcatctgccatgctttgagtggtagcgctgatgtggctgactggtggggacccctacttggcggccccggacaagccttcgatatctcgcggttctttgttgtctgtctcaatagcctcggtagtccgtacggaagcgcaagtgcggtgacctacaaggatggaaacccggaaaaaggcctgtacgggcccgagttccctcttaccactgtccgtgacgatgtgagaattcacaagatggtgctggacgatcttggtattaaacaaatcgcggctgtagttggcggctcaatgggcggcatgctcactcttgaatatgcatactttgggaaggactacgttcgagccatcgttcccatcgcgacatcggcacgacactctgcctggtgcatcagctggggggaggcgcagcgccagagcatctacagcgaccccaagtacgaaaatgggtactattcattcgacgaacctcctgccgctgggcttggtgctgcccggatgtcggcccttctgacctaccgaagccgtaattcgttcgagtctcggttcggtcgaaacgtaccagacccgtcgaagcggcagaacatcaatggtacagaaagactacctactcctccgaacgagcattgggcgatccacaatgatggccacaagggcaattggagcggccgtaactctcccgcgccagagaaacctgcggagaagaccgaggtgcagtatatggacccacagttctctgggaccaagactttcagcaaaagtgtcagcactaccgatggaaatgctcagaaacgacctgcgacctatttttctgcccagtcataccttcgctaccagggagacaagtttgtgaaacggttcgacgccaactgttacatcgccatcactcgcaagctggatacacatgacgtctctcgccaccgagcccgtccggactccgaaaatcccgttcgtgaggcgctttcgcagatccagcaacccgccctggttctgggaatcgagagcgatgggctcttcaccttcgaggaacagaaagaaatcgccgagggcatcccagactcgagactcaaacgcattgacagccccgaaggccacgatgccttcctacttcaattcgagcaggtcaatcagtacatcctggagttcttccgggaggttcttcccgacataatgtccaagacgcccacggatggtgccgccatcgacggtgttggcaagctaaccaagagcagcacttttggagaagcggaggtggaagatattaccgcctggtaa

SEQ ID NO: 92464 - protein, 489 aa, Emericella nidulans
MTTEQPTARLQRVDSQPENPFSALIEDQSIVIIPTFTLESGVTLYNVPVAYTTRGTLSPSGDNALVICHALSGSADVADWWGPLLGGPGQAFDISRFFVVCLNSLGSPYGSASAVTYKDGNPEKGLYGPEFPLTTVRDDVRIHKMVLDDLGIKQIAAVVGGSMGGMLTLEYAYFGKDYVRAIVPIATSARHSAWCISWGEAQRQSIYSDPKYENGYYSFDEPPAAGLGAARMSALLTYRSRNSFESRFGRNVPDPSKRQNINGTERLPTPPNEHWAIHNDGHKGNWSGRNSPAPEKPAEKTEVQYMDPQFSGTKTFSKSVSTTDGNAQKRPATYFSAQSYLRYQGDKFVKRFDANCYIAITRKLDTHDVSRHRARPDSENPVREALSQIQQPALVLGIESDGLFTFEEQKEIAEGIPDSRLKRIDSPEGHDAFLLQFEQVNQYILEFFREVLPDIMSKTPTDGAAIDGVGKLTKSSTFGEAEVEDITAW

SEQ ID NO: 92465 - DNA, 1461 bp, Saccharomyces pastorianus
  CDS (1)..(1461)
atgtctcacactgcaaaatcgaaaacgctccaagagctggatattgaggatattaaggagaccaaccctttacttaatctggtccaaggacaaagaattgttcaggtcccggaactggtgttagagtctggtgtggtgttaaataactttcccattgcttataagacatggggcacactgaacgaagcctgcgataatgttctggtcatctgtcatgccctgacaggttctgcggacgtcgcagactggtggggcccacttctgggcaacgatctagcattcgacccatcgagattttttatcatatgtctgaactctatgggctctccttacggctcgttttcaccattgacgataaatgagcagaccggcactcgatatggtcccgagtttccattgtgcactgtgcgtgacgacgtcagggcccacagaatcgttctagattctttaggtgtgaaatcaatagcgtgcgttatcggcggatccatgggagggatgttgagcttggagtggactgccatgtacggtaatgaatacgtgaaaaacatggttgctctagcgacttcggcaagacactctgcctggtgcatatcgtggtcggaggctcaaagacagtcgatatactcagaccccaactacctggatggttactacccagtggaagagcaaccggtagctgggttgtcagctgcacgtatgtctgcattgttgacatatcgaactagaaacagtttcgaaaacaaattttccaggagatctccctcgatagcccagcaacaaaaggcccaaaaagcagaagtgcgtaaaccctccactgtcagcgagcattccttacaaatacacaacgacggttacaaatgtaaagccaatggtgccattgctggcatctcaggacagaagcgccaaagcgtggtctctactacatcgtcttcggactcattaacttcacaatcatcgatgacttcggtaagctccgtcaccggtgaagtgaaggacatcaagcctgctcaaacatatttctctgcacaaagctacttgaggtaccaaggtactaaattcatcaacaggtttgacgccaattgttacattgccattacgcgtaagctggacacgcacgacctagccagagacagggtggaagacatcacgaaggtactttccgccatcgagcagccttcgctgatcatcggtatccaatctgatgggcttttcacatactccgaacaagaattcttggctgaatacataccgaattcgcaactggagaaaatcgagtctccagaaggccacgatgcctttttgttggaattcaagctgataaacaaactaattgtgaacttcttgaaaaccaactgcaagaatatcatggatgccaaaccaaggacttggggaggagatgttggtaacgacgaaacgaaaacatcagtcttcggcgaggcggaggaagttaccaactggtag

SEQ ID NO: 92466 - protein, 486 aa, Saccharomyces pastorianus
MSHTAKSKTLQELDIEDIKETNPLLNLVQGQRIVQVPELVLESGVVLNNFPIAYKTWGTLNEACDNVLVICHALTGSADVADWWGPLLGNDLAFDPSRFFIICLNSMGSPYGSFSPLTINEQTGTRYGPEFPLCTVRDDVRAHRIVLDSLGVKSIACVIGGSMGGMLSLEWTAMYGNEYVKNMVALATSARHSAWCISWSEAQRQSIYSDPNYLDGYYPVEEQPVAGLSAARMSALLTYRTRNSFENKFSRRSPSIAQQQKAQKAEVRKPSTVSEHSLQIHNDGYKCKANGAIAGISGQKRQSVVSTTSSSDSLTSQSSMTSVSSVTGEVKDIKPAQTYFSAQSYLRYQGTKFINRFDANCYIAITRKLDTHDLARDRVEDITKVLSAIEQPSLIIGIQSDGLFTYSEQEFLAEYIPNSQLEKIESPEGHDAFLLEFKLINKLIVNFLKTNCKNIMDAKPRTWGGDVGNDETKTSVFGEAEEVTNW

SEQ ID NO: 92467 - DNA, 1470 bp, Schizosaccharomyces pombe
  CDS (1)..(1470)
atggaatctcaatctccgattgaatcaattgtctttactgactcctgtcatccgtctcagcaagaaaataaatttgttcagcttatttcagatcaaaaaattgcaattgttcccaaatttacgttggagtgtggcgacatcctttacgatgttcccgttgccttcaagacttggggtactttgaataaagaaggaaacaattgtcttcttctttgtcatgctttaagtggttctgctgatgctggagattggtggggtcctttactcggtcctggtcgtgcgtttgatccatcacatttctttatcgtatgccttaattctcttggtagcccatacggaagcgcctctcctgttacatggaacgctgagactcatagtgtttatgggccagaatttcctttagcaaccatacgtgatgatgtaaacatccataaacttattttacaaagattgggtgtaaagcaaattgctatggcagtaggtggctccatgggtggtatgctggttttggagtgggcatttgataaggaatttgtgcgatcaattgttcccatttctacctctcttcgtcattccgcgtggtgcattagctggtctgaagcgcaacgccagagtatatattctgaccctaagtttaatgatggatactacggcatagacgatcagcctgtaagtggccttggagctgctcgtatgtctgccttgttgacatatcgctccaaatgttctttcgaacgtcgctttgcccgtactgttcctgatgcgtctcgtcacccctatccagatcgtttacccactcctctcacgcccagtaatgcacattgggtcgttcacaacgaaggaaaccgtaatcgccgtgaacgaccttgtcgatccaatggatcatcacctacttctgaaagtgctttaaattcccccgcctcttctgtctcgtctttaccttctttaggtgcctctcagactacagacagttcttcccttaaccagagttcgttattaagacgtcctgctaatacttacttctctgcgcaatcgtatttacgttaccaagcgaagaagtttgtaagtcgctttgatgctaattgttacatttcgattactaaaaagttggacacccatgatattactcgtggacgcggttcagactctcctaaggaagtcatgaaggatttgtctttacccgtactcgtactcggtattgaaagcgatggtcttttcacatttgacgaacaagttgaaattgccaaatcttttcccaatgctaccttggaaaaaattatttcggccgaaggccacgacggttttttgcttgagtttactcaagtaaactcacatattcaaaaattccaaaaggaacatttaattgatatcatgtctcaaactaattcctttgagcgacttgattcccaagttaatgataccaaccgcgaaagcgtttttggagaaatggaagacataacctcctggtaa

SEQ ID NO: 92468 - protein, 489 aa, Schizosaccharomyces pombe
MESQSPIESIVFTDSCHPSQQENKFVQLISDQKIAIVPKFTLECGDILYDVPVAFKTWGTLNKEGNNCLLLCHALSGSADAGDWWGPLLGPGRAFDPSHFFIVCLNSLGSPYGSASPVTWNAETHSVYGPEFPLATIRDDVNIHKLILQRLGVKQIAMAVGGSMGGMLVLEWAFDKEFVRSIVPISTSLRHSAWCISWSEAQRQSIYSDPKFNDGYYGIDDQPVSGLGAARMSALLTYRSKCSFERRFARTVPDASRHPYPDRLPTPLTPSNAHWVVHNEGNRNRRERPCRSNGSSPTSESALNSPASSVSSLPSLGASQTTDSSSLNQSSLLRRPANTYFSAQSYLRYQAKKFVSRFDANCYISITKKLDTHDITRGRGSDSPKEVMKDLSLPVLVLGIESDGLFTFDEQVEIAKSFPNATLEKIISAEGHDGFLLEFTQVNSHIQKFQKEHLIDIMSQTNSFERLDSQVNDTNRESVFGEMEDITSW

SEQ ID NO: 92469 - DNA, 1080 bp, Anabaena variabilis
  CDS (1)..(1080): transl_table=11
atgaactaccaggacttcatttcagaacaaactgagtattatcatttaccagtgccatttgagttagaaggcggcggggttttaactggggttcaggtcgcttatcggacttggggaaagttaaactcagcaggtgataatggagtactgatttgtcatgctttaactggttctgctgatgctgacgaatggtgggaaggtttgttgggtgcaaacaaagcactagatagcgatcgcgattttattatatgcagtaatattttgggcagttgctacggtacaacaggagcaacgagcatcaatccccaaactggaatcccttacggtgcatcatttccagcaattacaattcgggatatggtgcgcttacaagctgcactgattcaacatctgggaattaaatctttacagttagttattggtggctcactgggtgggatgcaggtactagagtgggcgttactatatccagaaattgtacaagcgatcgcacccattgctacttccggtagacactcagcttggtgtatcggcttgagtgaagcccaaagacaagctatttatgctgatcccaactggaaggggggtaactacacaaaagaacaaccacccagccaaggcttagcggtagcacggatgatggcgatgagtgcttatcgttcttggcaaagctttacagcacgttttggaagacaatatgatgctgtggccgatcaatttgcgatcgctagttatctacaacatcatggtcaaaagctagtgcagagatttgatgctaacacttacatcactctcacccaagcgatggatagccatgatgttgctcaaggtcgagactataaatctgttttgcaaagcattaaacaacctgctttagttgtggctattgattctgatattctttatccgccgacagaacaacaagaactcgcagatttcattcctgatgctcaactaggttggctacaatccagttatggtcacgatgcttttttaattgatatagccaccctcagtcagctagtgattaactttcgacaatctttaagtttaaaaaccttttctgatgtgacaacctag

SEQ ID NO: 92470 - protein, 359 aa, Anabaena variabilis
MNYQDFISEQTEYYHLPVPFELEGGGVLTGVQVAYRTWGKLNSAGDNGVLICHALTGSADADEWWEGLLGANKALDSDRDFIICSNILGSCYGTTGATSINPQTGIPYGASFPAITIRDMVRLQAALIQHLGIKSLQLVIGGSLGGMQVLEWALLYPEIVQAIAPIATSGRHSAWCIGLSEAQRQAIYADPNWKGGNYTKEQPPSQGLAVARMMAMSAYRSWQSFTARFGRQYDAVADQFAIASYLQHHGQKLVQRFDANTYITLTQAMDSHDVAQGRDYKSVLQSIKQPALVVAIDSDILYPPTEQQELADFIPDAQLGWLQSSYGHDAFLIDIATLSQLVINFRQSLSLKTFSDVTT

SEQ ID NO: 92471 - DNA, 1248 bp, Bordetella pertussis
  CDS (1)..(1248): transl_table=11
atgaccaatcctgtcctgaatccggcgttgcctgccatggccgccgcccctgtcgccgccacgccttcggccgtgggttccgccggcatcgttgctcctgtattcctgcgtttcgacgaaccgctgccgctggccagcggccagaccctcaatggctacgaactggccatcgagacctacggcacgctcaatgcgcagcgcaccaacgcggttctggtctgccacgcgctcaatgcctcgcaccatgtggccggcgtgtccgccgacaaccccaaggatgtcggctggtgggacaacatggtggggcccggcaagccggtagacaccaatcgttacttcgtcatcggcgtcaacaacctgggctcgtgcttcggctcgaccgggccggccagcatcaatccggccaccggccgcccctggggcgccgcgttcccggtcctgaccgtggaagactgggtgcgcgcccaggcgcgcgtggcggatcatttcggcatcgagcgcttcgccgcggtcatgggcggttcgctgggcggcatgcaggccctgagctgggccatcacctgcccgcagcgggtggccaattgcgtggtcgtcgccagcacgccgcgcctgtcggcgcagaacatcggtttcaacgaggtggcgcggcgcgccatcatcaccgaccccgatttccatggcggcgactactacgcgcacggcacggtgccggggcgcggcctgtcggtggcccgcatgatcggccatatcacctacctgtccgacgacgacatggccgagaaattcggccgcacgcgccgcgagccggccgccgacggcgcctatcgctatggctacgatgtcgaattcgaggtcgagtcctacctgcgctaccagggcgagaaattctcgcgctatttcgacgccaatacctatttgctgatcacccgcgcgctggattatttcgacccggcgcgcgccaccggtggcgacctggcgcgcgcgctggcgccggccacggccgatttcctgctggtttcgttctcgaccgactggcgttttccgcccgagcgttcgcgcgaaatggtgcgcgcgctgctcaagaacggcagcccggtcacctatgccgagatcgacgcgccgcacggccacgacgccttcctgctggatgacgcgcgctatcacgcggtagtgcgcggctactacgaacggattgcgcgcgaactgggcctgaacggcgccgtcgcgccggagggaaattccgcatga

SEQ ID NO: 92472 - protein, 415 aa, Bordetella pertussis
MTNPVLNPALPAMAAAPVAATPSAVGSAGIVAPVFLRFDEPLPLASGQTLNGYELAIETYGTLNAQRTNAVLVCHALNASHHVAGVSADNPKDVGWWDNMVGPGKPVDTNRYFVIGVNNLGSCFGSTGPASINPATGRPWGAAFPVLTVEDWVRAQARVADHFGIERFAAVMGGSLGGMQALSWAITCPQRVANCVVVASTPRLSAQNIGFNEVARRAIITDPDFHGGDYYAHGTVPGRGLSVARMIGHITYLSDDDMAEKFGRTRREPAADGAYRYGYDVEFEVESYLRYQGEKFSRYFDANTYLLITRALDYFDPARATGGDLARALAPATADFLLVSFSTDWRFPPERSREMVRALLKNGSPVTYAEIDAPHGHDAFLLDDARYHAVVRGYYERIARELGLNGAVAPEGNSA

SEQ ID NO: 92473 - DNA, 1140 bp, Carboxydothermus hydrogenoformans
  CDS (1)..(1140): transl_table=11
atgaacggctcggttggtattgtggaaaccaagaaggttacttttccggaaataactttagaatgcggcgaaaaaattgctccggtaacggtagcctatgagacttacggcgaactgaacgagcggggagataacgcgattttgattttacatgctctaacaggagatgcccatgtagcgggaaaacaccggccggaagacaaagtggccggctggtgggaccccatggtgggaccgggaaggccttttgacaccaataaatactttattgtttgctccaacgttttagggggatgctacgggactaccgggccttcttcaattaaccccgctaccgggaggccctggggcatgagctttcccattatcaccattagagacatggttaatcttcagtacaagctggtgcgtcacttagggattacgaaaatcctggcggcggtgggcggctccatggggggcatgcaggccttagagtgggcttacatgtatcccgagatgttaaaaagcgtggtggccattgctaccagcgccaggctttccccctttggtatagcatttaatgcggttggccgggaagccatcatgaccgaccccgagtggcgtggtggaaattattacgggtttgagggcccaaaaagaggattggctttggctaggatgattggcatcattacctacaaaagcgatatttcctggcagtaccgttttgggcgaacccacacttatgaaacggaccaggagcttttcagtcatacttcccgctttgaaattgaaaattacctttactatcaaggggataaattagtaaagcggtttgatgccaatacttatttgtatctcttaaaggctatggatttgcatgacataagccgcggaaggggtcgctaccgggaaattttaaaggaactgaaaacgcccctgttagctattggcattgacaccgattttctttacccaacctatcagcaaaaggaaattgtagaagcattgaaggaagccaaaaaagaggcttattactgggaactttcctctcctcacggccacgatgcttttttaattgagttttccaaaatggcgccaatcttaagtaactttttggagtatgtggctggccggagggcgacaattaacttttaa

SEQ ID NO: 92474 - protein, 379 aa, Carboxydothermus hydrogenoformans
MNGSVGIVETKKVTFPEITLECGEKIAPVTVAYETYGELNERGDNAILILHALTGDAHVAGKHRPEDKVAGWWDPMVGPGRPFDTNKYFIVCSNVLGGCYGTTGPSSINPATGRPWGMSFPIITIRDMVNLQYKLVRHLGITKILAAVGGSMGGMQALEWAYMYPEMLKSVVAIATSARLSPFGIAFNAVGREAIMTDPEWRGGNYYGFEGPKRGLALARMIGIITYKSDISWQYRFGRTHTYETDQELFSHTSRFEIENYLYYQGDKLVKRFDANTYLYLLKAMDLHDISRGRGRYREILKELKTPLLAIGIDTDFLYPTYQQKEIVEALKEAKKEAYYWELSSPHGHDAFLIEFSKMAPILSNFLEYVAGRRATINF

SEQ ID NO: 92475 - DNA, 1149 bp, Caulobacter crescentus
  CDS (1)..(1149): transl_table=11
atggctgcgctcgatccgatcacgcccgccggcgggggaacctggcggtttcctgcgaatgaacctctgcggctggactccggaggcgtcatcgaaggtctggaaatcgcctaccagacctacggccagctgaacgcggacaagtccaacgccgtcctgatctgccacgccctgacgggcgaccagcatgtggcctcgccccaccccaccaccggcaagcccggctggtggcaacgccttgttggtcccggtaagccgctggatcccgcgcggcacttcatcatctgctcgaacgtgatcggcggctgcatgggctcgacgggcccggcctcgatcaatccggccacgggcaagacctatggcctgtcgttcccagtcatcaccatcgccgatatggtgcgggcccaggccatgctggtctctgcgctcggggtcgagaccctgttcgccgtcgtcggcggctcgatgggcggcatgcaggtccagcaatgggccgtggactatcccgagcggatgttcagcgccgtggtgctggcctcggcctcgcgccactcggcccagaacatcgcgttccacgaggtgggccgccaggcgatcatggccgatcccgactggcgcggcggcgcctatgccgagcacggcgtgcggcccgagaagggcctggccgtggcgcggatggccgcgcacatcacctatctgtccgagcccgccctgcagcggaagttcggccgcgagctacagcgcgacggcctctcctggggctttgacgccgacttccaggtcgagagctatctacgccaccaggggtccagcttcgtcgaccggttcgacgccaacagctatctctacatcacccgggccatggactatttcgacatcgccgccagccatggcggggtgctggccaaggcgttcacccgagcgcggaatgtgcgcttctgcgtgctgagcttctccagcgactggctctatccgaccgccgagaaccgccacctggtccgcgccctgaccgccgccggggcccgcgcggccttcgccgagatcgagagcgacaagggccatgacgccttcctgctggacgagccggtgatggacgccgcgctggaaggcttcctggcctcggccgaacgcgatcgggggctggtttga

SEQ ID NO: 92476 - protein, 382 aa, Caulobacter crescentus
MAALDPITPAGGGTWRFPANEPLRLDSGGVIEGLEIAYQTYGQLNADKSNAVLICHALTGDQHVASPHPTTGKPGWWQRLVGPGKPLDPARHFIICSNVIGGCMGSTGPASINPATGKTYGLSFPVITIADMVRAQAMLVSALGVETLFAVVGGSMGGMQVQQWAVDYPERMFSAVVLASASRHSAQNIAFHEVGRQAIMADPDWRGGAYAEHGVRPEKGLAVARMAAHITYLSEPALQRKFGRELQRDGLSWGFDADFQVESYLRHQGSSFVDRFDANSYLYITRAMDYFDIAASHGGVLAKAFTRARNVRFCVLSFSSDWLYPTAENRHLVRALTAAGARAAFAEIESDKGHDAFLLDEPVMDAALEGFLASAERDRGLV

SEQ ID NO: 92477 - DNA, 1071 bp, Chlorobium tepidum
  CDS (1)..(1071): transl_table=11
atgacccggatggaccatagatcgatcatttccgacactacacaatattttgaatcgaacgagccgttacagctcgaactgggaggggagctgcccggagtgagggtcgcttaccgtacctggggtacgctaaacgcagagaaaagcaacgtgattctggtctgccacgcgctgaccggcaacgccgacgccgacagctggtggtgcggcatgttcggtgagggacgggcgttcgacgagactcgggacttcatcgtatgcagcaacgtgcttggaagctgctacggaacgaccgggccgatgtcggtgaatccgctgagtggcaggcactacggtcccgattttccgcgcattaccattcgcgacatggtgaatgttcagcgattattgcttcgttcgctcggcatcgaccggatccggctcatcgttggtgcatcgcttggcgggatgcaggtgctcgaatggggcgcaatgtatcccgaaatggccggggcgctgatgccgatgggcgtttcgggtcgtcattcggcgtggtgcatcgcgcagagcgaggcgcagcggcaggctatcgccgccgatgcggagtggcaagatggctggtatgatccggaggtgcagccacgcaaaggacttgccgccgcgcggatgatggcgatgtgcacctaccgctgcttcgagaactaccagcaacgctttggccgcaagcagcgcgaggacggcttgttcgaagccgaaagctacgtgcgtcaccagggcgacaagctggttgggcgctttgatgcaaacacctatatcacgctcaccagagcgatggacatgcacgacctcgggcgcggacgcgactcctacgaagcggcgctcggagcgctgaagatgccggtcgagattctctccatcgactcggacgtgctctatcccaggcaggagcaggaggaacttgcccgcctcattcccggctcacgcctgcttttccttgacgaaccctatggccacgacgcctttcttatcgacaccgagaccgtcagccgcatggtctgcgagttcaagaggcagttgatagttgacaattga

SEQ ID NO: 92478 - protein, 356 aa, Chlorobium tepidum
MTRMDHRSIISDTTQYFESNEPLQLELGGELPGVRVAYRTWGTLNAEKSNVILVCHALTGNADADSWWCGMFGEGRAFDETRDFIVCSNVLGSCYGTTGPMSVNPLSGRHYGPDFPRITIRDMVNVQRLLLRSLGIDRIRLIVGASLGGMQVLEWGAMYPEMAGALMPMGVSGRHSAWCIAQSEAQRQAIAADAEWQDGWYDPEVQPRKGLAAARMMAMCTYRCFENYQQRFGRKQREDGLFEAESYVRHQGDKLVGRFDANTYITLTRAMDMHDLGRGRDSYEAALGALKMPVEILSIDSDVLYPRQEQEELARLIPGSRLLFLDEPYGHDAFLIDTETVSRMVCEFKRQLIVDN

SEQ ID NO: 92479 - DNA, 1260 bp, Desulfotalea psychrophila; identical to SEQ ID NO: 92409
  CDS (88)..(1260): transl_table=11

SEQ ID NO: 92480 - protein, 390 aa, Desulfotalea psychrophila
MEKEIKDHKSVGIVEKQFFTCAQVPSPLILENGAKLGPITIAYETYGNLSARKDNAILINHAFSGDSHVAGHYATDGPKEKPGWWDFLVGPGKGIDTDKYFIICSNILGSCNGTTGPASKNSETGEAYALDFPMVTIGDMVATQKLLIDHLGIPKLLAVIGGSVGGMQTLEWAIRYPEMMHSVIPIATTMRHSALAIAFNEIARQAIMTDPHWNRGKYYGQAHPDTGLAVARMVGHVTYLSDEAMRRKFGRNLQEKENLSYGFDADFQVESYLRYQGNKFVHRFDANSLLYITKASDYFDIVERISTSGPETELTAPQQKYLVISYSSDWLYPTYQARDLVKALKRSGRNVSFSEIESDCGHDAFLIPDDRLEQLMRGFLAGIYTGIAEI

SEQ ID NO: 92481 - DNA, 1110 bp, Geobacter metallireducens
  CDS (1)..(1110): transl_table=11
atgtccgtcggcatcgtacaggaacaatcagtaaccttcgacacggaactccggctggagagcggccgcattctcggccccatcaccctcgcctacgagacctacggcgagctgaacgccgaccgctccaacgcgatcctggtggcccacgcctggaccggaaacgcccatctggcggggaaaaacagcgaggaggacacaaagccgggatggtgggacgccatcgtcggccccggccggctcctggacaccgaccggtgcttcgtcatctgctccaacgtcatcggctcctgctacggctccaccggccccgcctccatcaacccgaaaaccggcaagcgctacaacctcacctttcccgtcatcaccgtccgcgacatggtcagggcccaggccctcctcctcgaccacctgggaatcgaccggctcctcaccgtcctcggcgggagcatgggggggatgcaggccctggagtgggccacccagttcccggaccggatccgctccgccatcgccctggccaccacgagccgcccgtcgccccaggccatttccctcaacgccgttgcccgctgggccatcttcaacgaccccacgtggaagaagggggaataccgcaagaaccccaaggacggcctggccctggcccgggggatcggccacatcacctttctctccgacgagtccatgtggcagaagttcggccgccgcttcaacgcccgggacggcctcttcgacttcttcggccagttcgaggtggagcgctacctctcctacaacggctacaacttcgtggaccgcttcgacaccaactccttcctctacctggccaaggccctggacctctacgacacggcctgggggtacgaatccctggaggaggcgttttcccgggtaaaggcgccgatccagttcttcgccttcacctccgactggctctaccccccctaccagaccgaggagatggcgaccatcctccgctccctcggcaagccggtcgaataccacctgatcgaatcggcctacggccacgacgccttcctcctggaacacgagaccttcgcgccgatggtgcgggaattcctcgacaaggtggaacgttcggagtag

SEQ ID NO: 92482 - protein, 369 aa, Geobacter metallireducens
MSVGIVQEQSVTFDTELRLESGRILGPITLAYETYGELNADRSNAILVAHAWTGNAHLAGKNSEEDTKPGWWDAIVGPGRLLDTDRCFVICSNVIGSCYGSTGPASINPKTGKRYNLTFPVITVRDMVRAQALLLDHLGIDRLLTVLGGSMGGMQALEWATQFPDRIRSAIALATTSRPSPQAISLNAVARWAIFNDPTWKKGEYRKNPKDGLALARGIGHITFLSDESMWQKFGRRFNARDGLFDFFGQFEVERYLSYNGYNFVDRFDTNSFLYLAKALDLYDTAWGYESLEEAFSRVKAPIQFFAFTSDWLYPPYQTEEMATILRSLGKPVEYHLIESAYGHDAFLLEHETFAPMVREFLDKVERSE

SEQ ID NO: 92483 - DNA, 1191 bp, Gluconobacter oxydans
  CDS (1)..(1191): transl_table=11
atggacatcagcgcgtcaccgagtatcgcggatgggccggtctacacacatcagaccgtgcggctggacagcggtctcgatctggaatgtggcgtgcatctggcgccgctggaggtcgcctactgcacctacggcacgctctcaccagcacgggataatgcgatcctggtctgtcatgccctgacgggggaccagtacctggcggaacgcaatcccctgaccggcaaacctggctggtggagcaggatggttgggccggggcttccgatcgatacggatcgttatttcgtcgtgtgctccaacgtccttggcggctgcatgggcacgacgggaccgcgatcgatctgtgctgagacgggaaaggcgtgggacagtgagtttccgccaatcacgatgcatgacatcgtggccgcgcaggcgaaactgatcgatcatctgggcatagaccgtcttttcgcggtcatcggcggttcgatgggcggaatgcaggcgctgacctgggcggcggatttcccggaccgcgtgttcgctgccatgccgatcgcaacgtcgcccttccattcggcccagaacatcgcattcaatgaagtcagccggcaggccatctttgccgatccggactggcatgatggccattacagggatttcggtgccattcctgcccgcggactgggggtggcgcgcatgatggcgcatatcacctatctgtccgaggaagctctcagccgcaaattcggacggcgggtccggcatgacgcggcaacagcggtgcccgcgtccagcagtccgtcgctgttcggggaaatgttcgaagtggagagctatctgcgccaccagggctcatcgttcgtgcggcgctttgatgccaattcgtatctgacgatcacccgggcgatggattatttcgatctggccgcagaacatgacggtgatctggccaacccgttccggaaatcgcagacccgtttctgtgtcgtgtcgttcagctcggactggctgttcccgacgtcacagtcccgccttctggtgcgggcactcaaccgggcaggggcgaacgtctctttcgtggaaatcgagagcgaccgcgggcatgacgcctttctgctggaggagccggacttcgaccggaccatccggggtttcatcgcaggtgcggccgaacatgcggcccttaaggcgggagaacgctga

SEQ ID NO: 92484 - protein, 396 aa, Gluconobacter oxydans
MDISASPSIADGPVYTHQTVRLDSGLDLECGVHLAPLEVAYCTYGTLSPARDNAILVCHALTGDQYLAERNPLTGKPGWWSRMVGPGLPIDTDRYFVVCSNVLGGCMGTTGPRSICAETGKAWDSEFPPITMHDIVAAQAKLIDHLGIDRLFAVIGGSMGGMQALTWAADFPDRVFAAMPIATSPFHSAQNIAFNEVSRQAIFADPDWHDGHYRDFGAIPARGLGVARMMAHITYLSEEALSRKFGRRVRHDAATAVPASSSPSLFGEMFEVESYLRHQGSSFVRRFDANSYLTITRAMDYFDLAAEHDGDLANPFRKSQTRFCVVSFSSDWLFPTSQSRLLVRALNRAGANVSFVEIESDRGHDAFLLEEPDFDRTIRGFIAGAAEHAALKAGER

SEQ ID NO: 92485 - DNA, 1209 bp, Haloarcula marismortui
  CDS (1)..(1209): transl_table=11
atgaacgtcgaacacaacactgtctcgcttggcgagttcgagtttgactgcggggaaacgattccggagctggaaatcacctacgaagcctacggggagtttgacggcgacaacgcggtgctggtctgtcacgcgctgaccggcagcgcccacgtcgccggccgcgaccgagtcgacagcgccgatcaggcccgcgcctggtgggacgatatcgttgggccgggcaaagccatcgacaccacggagtactacgtcgtctgtgcaaacgtaccgggctcgtgctacgggtcgacgggaccgaaaagcgagaacccggagacgggcgagccctacggcacggacttcccgccggtcaccgtcacggactggaccgaggcccagcgcgccctgcttgacgaactcgggattccccacctccacgccgtcgtcggcggcagcgtcggtggcatgaacgtcatcgagtgggccaaacgccacccggaccacgtcgaccgcatcgttcccatcgccgcggccgcgcgactggacacgcagtgcctctcgctcgacgccatcgcccgccgggccatcacgaccgacccgaactggaagcagggccactactacggcgaggacgacgagccgccaagcgacggcctcgcgctggcccgccaactgggccacgtgatgtacctctcgaaggcgtcgatggagcgccgcttcggccgccgcgccgccggtcgggacgccgtccgcacgttccccaccgacgccgcgggcgcgttcttcccgtaccgcgacgtggagtcgtatctcgactacaacgccgagaagttcaccgagcgcttcgacgccaacagctacctctacctgacgcgggcgatggacaactacgacctcgccgccgggttcgagtccgatgcggacgcgctggcggccttcgacggcgacgcgctggtgatgtcctttaccgccgactggcacttcaccacccagcaggcggaggcgctagccgactcgctccgggcggccgacgcgaacgtcgcccaccacgtcatcgactccgaccacggccacgacgcgttcctcgtcgaaccagacaacgttgggccgccgctcgcggacttccttgacgcgggcgtcgacggtaacgccgtcaccgactccgttgtcgaggatagtcaggagagcaatttcgcacccgtccacaacagcctgttctcgcagtag

SEQ ID NO: 92486 - protein, 402 aa, Haloarcula marismortui
MNVEHNTVSLGEFEFDCGETIPELEITYEAYGEFDGDNAVLVCHALTGSAHVAGRDRVDSADQARAWWDDIVGPGKAIDTTEYYVVCANVPGSCYGSTGPKSENPETGEPYGTDFPPVTVTDWTEAQRALLDELGIPHLHAVVGGSVGGMNVIEWAKRHPDHVDRIVPIAAAARLDTQCLSLDAIARRAITTDPNWKQGHYYGEDDEPPSDGLALARQLGHVMYLSKASMERRFGRRAAGRDAVRTFPTDAAGAFFPYRDVESYLDYNAEKFTERFDANSYLYLTRAMDNYDLAAGFESDADALAAFDGDALVMSFTADWHFTTQQAEALADSLRAADANVAHHVIDSDHGHDAFLVEPDNVGPPLADFLDAGVDGNAVTDSVVEDSQESNFAPVHNSLFSQ

SEQ ID NO: 92487 - DNA, 1209 bp, Leifsonia xyli subsp
  CDS (1)..(1209): transl_table=11
atggactggcagacgacgtcggccgacacggccccctcgagtttcatcaccgaggagcaggaccggtcgctgttcgggaagccgcccgcgagcggagcctggaaggagtccgacccggtcggcgggagacgcttcgccggcatcggggcgttcggcttcgagagcggcgagagcctcccgttcgtgcgcatcgcctacgagacctggggcgagctgtcccccgctcgcgacaacgccgtgctcgttctgcacgctctcaccggcgacagccacgcggtcggcgcagccggccccgggcaccggacgtccggctggtggcagggcatcatcggcccgggaaaagcgatcgacaccgaccgctggttcgtggccgtcccgaacatgctgggcggctgccaggggacgaccggcccgacctccatcgccccggacggggccgagtggggagcgcgcttcccgttcacgacgatccgcgatcaagtgaaagcgcaggccgccttcgccgacgcgctcgggatcgggcgctgggccgccgtcgtcggtggctcgatgggtggaatgcaggcactggagtgggctgtcggattccccgagcgtgtcgaacggctcgccgtgatcgccgcaccgccgcactccaccgccgaccagatcgcgttcaactccgtgcagctgggggccatccgcaccgatccgctgttccacggcggctcctactacgacgagaaggacggcgagggcccgcaccaggggctcgccctcgcccggcggatggccctgatcacctaccgaagcctgtccgagctgaacgaccggttcgagcgcacctggcagagcggcatcagcccgctgggcgacgggggccggttcgccgtagagtcgtacctcgacttccacgggaacaagttcacccgccgcttcgacgccaacagctacctgaccctggtgcaggcgatgaactcgcacgatgtcggccacgacggcagcggcctggcggcggctctctcccgggtgacggcgacgacgctggtcgtcgggatcgacagcgaccggctcttcccggtggacgggcaagagctcatcgcctcccacctgccggcggcacttgacggtagagttcctctcgtggtccgatcgcacttcggccacgacggattcctgatcgaggacgatctcatcggcgggcagctgaggaggttgttcgcggcctga

SEQ ID NO: 92488 - protein, 402 aa, Leifsonia xyli subsp
MDWQTTSADTAPSSFITEEQDRSLFGKPPASGAWKESDPVGGRRFAGIGAFGFESGESLPFVRIAYETWGELSPARDNAVLVLHALTGDSHAVGAAGPGHRTSGWWQGIIGPGKAIDTDRWFVAVPNMLGGCQGTTGPTSIAPDGAEWGARFPFTTIRDQVKAQAAFADALGIGRWAAVVGGSMGGMQALEWAVGFPERVERLAVIAAPPHSTADQIAFNSVQLGAIRTDPLFHGGSYYDEKDGEGPHQGLALARRMALITYRSLSELNDRFERTWQSGISPLGDGGRFAVESYLDFHGNKFTRRFDANSYLTLVQAMNSHDVGHDGSGLAAALSRVTATTLVVGIDSDRLFPVDGQELIASHLPAALDGRVPLVVRSHFGHDGFLIEDDLIGGQLRRLFAA

SEQ ID NO: 92489 - DNA, 1101 bp, Leptospira interrogans serogroup Icterohaemorrhagiae serovar
  CDS (1)..(1101): transl_table=11
atgaatgaaactggatctatcggaatcattgaaacgaaatacgcagaattcaaagaactcattttgaacaacggatctgttttatctccggttgtaattgcctacgaaacttatggtaccctttcttcttctaaaaataacgctatcttaatctgtcacgctttgtctggagacgctcacgcggcaggttatcactctgggtcagataaaaaaccgggttggtgggacgattatatcggacccggaaaatcctttgataccaatcaatattttattatctgctccaatgtaatcggaggttgtaaaggttcttctggtcccctttcgattcatccagaaacctctactccctatggttctcgttttccttttgtttccattcaagacatggtgaaagcacaaaaacttttagttgaatctttaggaattgaaaaacttttctgtgtcgctggcggttctatgggcggaatgcaagccttagaatggagtattgcttatcccaattcactttccaattgtatcgtaatggcttctactgcagaacattctgcaatgcagatagcttttaacgaagtaggaagacaagcaatcttatctgatccaaattggaaaaatggtctctatgatgaaaattcacctcgtaaaggtttggcacttgccagaatggtaggacatatcacttatctttcggacgataagatgcgggaaaaattcggcagaaaccctcctagaggaaacatactttccaccgattttgctgttggaagttatctaatctatcaaggagaaagttttgtggatcgtttcgacgcaaactcttatatctacgttacaaaagccttggatcattacagccttggaaaagggaaagaattgaccgctgctctttctaatgcaacttgtagatttttagtagtatcttatagttccgattggttataccctcctgctcagtccagagaaattgtaaagtctttagaagccgccgacaaacgagtgttctacgtagaacttcagtccggtgaaggtcacgattcttttcttttaaaaaatccaaaacaaattgaaattctaaaaggatttttagaaaacccaaattaa

SEQ ID NO: 92490 - protein, 366 aa, Leptospira interrogans serogroup Icterohaemorrhagiae serovar
MNETGSIGIIETKYAEFKELILNNGSVLSPVVIAYETYGTLSSSKNNAILICHALSGDAHAAGYHSGSDKKPGWWDDYIGPGKSFDTNQYFIICSNVIGGCKGSSGPLSIHPETSTPYGSRFPFVSIQDMVKAQKLLVESLGIEKLFCVAGGSMGGMQALEWSIAYPNSLSNCIVMASTAEHSAMQIAFNEVGRQAILSDPNWKNGLYDENSPRKGLALARMVGHITYLSDDKMREKFGRNPPRGNILSTDFAVGSYLIYQGESFVDRFDANSYIYVTKALDHYSLGKGKELTAALSNATCRFLVVSYSSDWLYPPAQSREIVKSLEAADKRVFYVELQSGEGHDSFLLKNPKQIEILKGFLENPN

SEQ ID NO: 92491 - DNA, 1140 bp, Leptospira meyeri
  CDS (1)..(1140): transl_table=11
atgcctacctccgaacagaacgagttttcccacggatccgtaggtgtcgtatatactcagagcattcgatttgagtctttgactctagaggggggtgaaaccatcactcctcttgaaattgcctacgaaacgtatggcactctcaatgaaaaaaaagacaatgccattctagtttgccatgcgctttcgggagatgctcatgcagcaggtttccatgaaggagacaaacgtcctggctggtgggattattatattggaccgggcaaatcctttgataccaatcgttactttatcatttcttccaacgtaattggtggttgtaagggttccagtggaccacttaccatcaatgggaaaaatggaaaaccattccaatccacttttccctttgtctccataggagatatggtgaatgctcaagaaaaattaatcagccattttggaattcataaactatttgctgttgccggtggttcgatgggtggaatgcaagccttacaatggtcagtcgcatacccagatcggctcaaaaattgtatcgtgatggcatcttcttccgaacattctgcacaacaaattgcctttaatgaagtgggaagacaagccattctttctgatcccaattggaaccaaggtttgtacacccaggaaaacagaccgtcaaagggacttgctcttgctcgaatgatgggtcatatcacttacttaagcgatgaaatgatgagagaaaaatttggtcgtaaaccacccaaaggaaatatccaatccacagactttgcggtaggaagttatctaatctaccaaggcgaatcctttgtcgatcggtttgatgcaaactcatatatttatgttacaaaagcattggatcattttagtttaggtacaggaaaagaacttacaaaggtattggcaaaagtgagatgccggtttttggtagtggcttatacttccgattggttgtatccaccgtatcaatctgaagaaattgtgaaatctttggaagtgaatgctgttcccgttagttttgtagaactcaacaatccagcaggacgacatgatagttttttgttaccaagtgagcaacaagactcgatcctaagagattttttaagttctacggacgaaggagttttcctttga

SEQ ID NO: 92492 - protein, 379 aa, Leptospira meyeri
MPTSEQNEFSHGSVGVVYTQSIRFESLTLEGGETITPLEIAYETYGTLNEKKDNAILVCHALSGDAHAAGFHEGDKRPGWWDYYIGPGKSFDTNRYFIISSNVIGGCKGSSGPLTINGKNGKPFQSTFPFVSIGDMVNAQEKLISHFGIHKLFAVAGGSMGGMQALQWSVAYPDRLKNCIVMASSSEHSAQQIAFNEVGRQAILSDPNWNQGLYTQENRPSKGLALARMMGHITYLSDEMMREKFGRKPPKGNIQSTDFAVGSYLIYQGESFVDRFDANSYIYVTKALDHFSLGTGKELTKVLAKVRCRFLVVAYTSDWLYPPYQSEEIVKSLEVNAVPVSFVELNNPAGRHDSFLLPSEQQDSILRDFLSSTDEGVFL

SEQ ID NO: 92493 - DNA, 1125 bp, Moorella thermoacetica
  CDS (1)..(1125): transl_table=11
atggatggagtcggtattgtaacaaccaggttttatgaatggtcgcaatgcctccacctggaaagcggggcccagctgggctcccttaccatagcctatgagacctatggggaactgaacgcggccggaaataacgccatcctggtcctccacgcccttaccggtaatgcccatatcgccggccgaaattttccggacgagaggtatcccggctggtgggaccccctggtagggccgggccgggccctggacaccaggcgctatttcattgtctgtgccaacgtcctgggaagctgctatggtaccaccgggccggccagcattaatccagccaccggcaagccctacgggatggattttccggccatcactatccgcgatatggtacgggcacaaaaaatcctccttgactatctgggggtcaagcgcctggtggcggccatcggtggttccatgggcgggatgcaggtcctggagtggggttttctttatcctcagatgctggacgccattattcccattgccacctgcggccggactactcccatgcagattgcctttcaccacgtgcagcgggaagccatttacgccgaccccgactggcagggaggcaattattacggcactgccgggccccggcggggactggccctggcccggcagatcgggattattacttataaaagcgacccctcctggaacatgaaatttggccgcaacctggtggacccccggaaatacttccaactggaagggcagttcgaagtagagagctacctggcctaccaggggaggaagctggtagatcgtttcgacgccaactcttacctgtaccttaccaaagcagtagacctccacgatgtgagccagggacggggaagctataatgaagtctggcgggatttcccctgcccctgcctgggtataggcatatcaagcgattttcttttccctccctatcaggtgcaggagattgtccggatgattaacgacggcggcggccatgcccgttacgcagagattgattccccctatggccacgacgcctttttaatcgagtttaaccagctggcagccattatccagccgtttctgaaagagttgcgcccggacctggccgcttga

SEQ ID NO: 92494 - protein, 374 aa, Moorella thermoacetica
MDGVGIVTTRFYEWSQCLHLESGAQLGSLTIAYETYGELNAAGNNAILVLHALTGNAHIAGRNFPDERYPGWWDPLVGPGRALDTRRYFIVCANVLGSCYGTTGPASINPATGKPYGMDFPAITIRDMVRAQKILLDYLGVKRLVAAIGGSMGGMQVLEWGFLYPQMLDAIIPIATCGRTTPMQIAFHHVQREAIYADPDWQGGNYYGTAGPRRGLALARQIGIITYKSDPSWNMKFGRNLVDPRKYFQLEGQFEVESYLAYQGRKLVDRFDANSYLYLTKAVDLHDVSQGRGSYNEVWRDFPCPCLGIGISSDFLFPPYQVQEIVRMINDGGGHARYAEIDSPYGHDAFLIEFNQLAAIIQPFLKELRPDLAA

SEQ ID NO: 92495 - DNA, 1170 bp, Rhizobium loti
  CDS (1)..(1170): transl_table=11
atggccgctctgcgcgcaggaaagaccaacaacgaggccgaccagccgtcgagcccggtgttgcgcttcggggcggacaagccgctcaagctcgacgccggcacgcttttgtcgccgttccagatcgcctatcagacctacggcacgctgaacgatgcccgctccaatgccatcctcgtctgccatgcgctgaccggcgaccagcatgtcgccaacaccaatccggtgaccggcaagccgggatggtgggaagtgctgatcggccccggcaggatcatcgacaccaaccgtttcttcgtcatctgctccaacgtcatcggcggttgtctgggctccaccggcccggcctcgaccaaccccgccaccggcaagccctacgggctcgacctgccggtcatcaccatccgcgatatggtgcgcgcgcagcagatgctgatcgatcatttcggcatcgagaaactgttctgcgtgctcggcggctcgatgggcggaatgcaggtgctggaatgggcgtcgagctaccccgagcgcgtcttttcggcactgccgatcgccaccggcgcgcgccattcctcgcagaacatcgccttccacgaggtcggccggcaggctgtcatggccgatccggactggcacggcggcaaatatttcgaaaacggcaaacgcccggaaaagggcctggcggtagcgcgcatggccgcccacataacctatctgtcggaagccgccctgcaccggaaattcggccgcaatctgcaggatcgcgaggcgctgaccttcggcttcgacgccgacttccagatcgaaagctatctgcgccaccaaggcatgaccttcgtcgaccgcttcgacgccaattcctatctctacatgacgcggtcgatggactatttcgacctcgccgccgatcatggcgggcggctggcggatgcctttgccggcaccaaaacccgcttctgcctggtgtccttcacctcggattggttgtttccgaccgaagagagccgctcgatcgtgcacgcgctcaacgccgccggcgcgtccgtgtccttcgtcgaaatcgagaccgaccgcggccacgatgccttcctgctcgacgagccggaactgttcgccgccatcaacggcttcatcggctccgcggcgcgggcgagagggctaagcgcatga

SEQ ID NO: 92496 - protein, 389 aa, Rhizobium loti
MAALRAGKTNNEADQPSSPVLRFGADKPLKLDAGTLLSPFQIAYQTYGTLNDARSNAILVCHALTGDQHVANTNPVTGKPGWWEVLIGPGRIIDTNRFFVICSNVIGGCLGSTGPASTNPATGKPYGLDLPVITIRDMVRAQQMLIDHFGIEKLFCVLGGSMGGMQVLEWASSYPERVFSALPIATGARHSSQNIAFHEVGRQAVMADPDWHGGKYFENGKRPEKGLAVARMAAHITYLSEAALHRKFGRNLQDREALTFGFDADFQIESYLRHQGMTFVDRFDANSYLYMTRSMDYFDLAADHGGRLADAFAGTKTRFCLVSFTSDWLFPTEESRSIVHALNAAGASVSFVEIETDRGHDAFLLDEPELFAAINGFIGSAARARGLSA

SEQ ID NO: 92497 - DNA, 1140 bp, Thermobifida fusca
  CDS (1)..(1140): transl_table=11
gtgagtcacgacaccacccctccccttcccgcgaccggcgcgtggcgggaaggggaccctccgggcgaccggcgctgggtcgaactgtccgaacctctgccgctggagaccgggggtgaacttcccggggtccgcctggcctacgagacgtggggcagtctcaacgaggaccgctccaacgcggtcctcgtgctgcacgccctcaccggcgacagccacgtcgtaggcccggaaggccccgggcaccccagcccaggctggtgggaaggcatcatcggccccgggctggcactcgacaccgaccggtacttcgtggtcgcccccaacgtgctgggcggctgccaaggcagcaccgggccgtcgtcgaccgcgcccgacggcaggccgtgggggtcccggttcccgaggatcaccatccgcgacacggtgcgcgccgagttcgccctgctgcgcgaattcggcatccactcgtgggccgcggtcctcggcgggtccatgggcgggatgcgtgccctcgaatgggcggccacctacccggagcgggtgcgtcgcctcctgctgctggccagccctgcggccagctccgcacagcagatcgcctgggccgccccccagttgcacgccatccggtctgatccgtactggcacggtggcgactactacgaccgtcccggtccgggaccggtcaccggcatggggatcgcccgccgtatcgcgcacatcacctaccggggtgccaccgagttcgacgaacggttcggccgcaacccccaagacggggaagacccgatggccgggggccggttcgctgtcgagtcgtacctggaccaccacgcggtcaaactcgcccgccggttcgacgcgggcagctacgtcgtgctcacccaagccatgaacacccacgacgtgggtcggggccgcggcggggtggcgcaggcgctgcgccgggtcaccgcccgcaccatggtggccggggtgagcagcgacttcctgtaccccctcgcccagcagcaggagctcgccgacggtattcccggggccgacgaagtccgcgtcatcgaatcagcctcgggccacgacgggttcctcaccgagatcaaccaagtgtcggtcctcatcaaagaactgctggcgcagtaa

SEQ ID NO: 92498 - protein, 379 aa, Thermobifida fusca
MSHDTTPPLPATGAWREGDPPGDRRWVELSEPLPLETGGELPGVRLAYETWGSLNEDRSNAVLVLHALTGDSHVVGPEGPGHPSPGWWEGIIGPGLALDTDRYFVVAPNVLGGCQGSTGPSSTAPDGRPWGSRFPRITIRDTVRAEFALLREFGIHSWAAVLGGSMGGMRALEWAATYPERVRRLLLLASPAASSAQQIAWAAPQLHAIRSDPYWHGGDYYDRPGPGPVTGMGIARRIAHITYRGATEFDERFGRNPQDGEDPMAGGRFAVESYLDHHAVKLARRFDAGSYVVLTQAMNTHDVGRGRGGVAQALRRVTARTMVAGVSSDFLYPLAQQQELADGIPGADEVRVIESASGHDGFLTEINQVSVLIKELLAQ

SEQ ID NO: 92499 - DNA, 1143 bp, Thermus thermophilus
  CDS (1)..(1143): transl_table=11
atgagcgagatcgccctcgaggcctggggggagcacgaggccctcctcctcaagcccccccgctcccccctctccatccccccgcccaagccccgcaccgccgtcctcttccccaggcgggaggggttctacacggagctcggggggtacctccccgaggtgcgcctccgctttgagacctacgggaccctctcccgcaggcgggataacgccgtcctcgtcttccacgccctcacggggagcgcccacctggcggggacctacgacgaggaaacctttagaagcctctcccccctggagcaggccttcggccgggaagggtggtgggacagcctggtggggcccgggcggatcctggaccccgccctctactacgtggtctccgccaaccacctgggaagctgctacggctccaccggccccctctccctagacccccacacgggccgcccctacgggagggacttccctccccttaccatccgcgacctggcccgggcccaggcgaggcttctggaccatctgggggtggagaaggccatcgtcatcggggggagcctcggggggatggtggccctggagttcgccctcatgtacccggagagggtgaagaagctcgtggtcctggcggcccccgcacggcacggcccctgggcccgggccttcaaccacctctcccgccaggccatcctccaagaccccgagtaccagaagggcaaccctgcccccaagggcatggccctcgcccggggaatcgccatgatgagctaccgggcccccgaggggtttgaggcccgctggggcgcggagcccgagctcggggaaacctacctggactaccagggggagaagttcctccggcgcttccacgccgagagctacctcgtcctctcccgggccatggacacccacgacgtgggccggggccggggcggggtggaggaggccctgaagcgcctcagggccatcccctccctcttcgtgggcattgacaccgacctcctctaccccgcctgggaggtgaggcaggcggccaaggcggcgggggcccgctaccgggagatcaaaagcccccacgggcacgacgccttcctcatagagaccgaccaggtggaggagatcctggacgccttcctcccgtag

SEQ ID NO: 92500 - protein, 380 aa, Thermus thermophilus
MSEIALEAWGEHEALLLKPPRSPLSIPPPKPRTAVLFPRREGFYTELGGYLPEVRLRFETYGTLSRRRDNAVLVFHALTGSAHLAGTYDEETFRSLSPLEQAFGREGWWDSLVGPGRILDPALYYVVSANHLGSCYGSTGPLSLDPHTGRPYGRDFPPLTIRDLARAQARLLDHLGVEKAIVIGGSLGGMVALEFALMYPERVKKLVVLAAPARHGPWARAFNHLSRQAILQDPEYQKGNPAPKGMALARGIAMMSYRAPEGFEARWGAEPELGETYLDYQGEKFLRRFHAESYLVLSRAMDTHDVGRGRGGVEEALKRLRAIPSLFVGIDTDLLYPAWEVRQAAKAAGARYREIKSPHGHDAFLIETDQVEEILDAFLP

SEQ ID NO: 92501 - DNA, 1122 bp, Zymomonas mobilis
  CDS (1)..(1122): transl_table=11
atgaataacgacagacgctttggccttaaacggcatattactttaccgggggaactggctcttgatgggggcagcctactcaccggaattgaaattgcttatgaaacctatggccacctcaatgcagatgcttccaatgcgatccttatctgccacccgttaacggctgaccaatttgcggcatccgaccacccgattaccggcaaaccgggctggtggtcgcggatgattggcaaaggcaaacccatcgaccccgaacgctattgcattatttgttccaatgttcttggctcttgtctgggatcaacggggccttccagctttacgcccggaacagaaacaccttatgcaatgaattttccggtgattactattcgggatatggtgcgggcgcaggctaaattactcgattatctcggtatccggcaattaaaggccgtgatcggcggttcaatgggcggaatgcaagctttggaatgggcatcaacctatcccgatcgggtaaaatcagtcgttattattgcgtcaacagctcgtcactcagcacagaatatcgcttttcatgaagtcggtcggcaagctatcatggcggatccgaaatggcgccaaggtaactattacgaagaaaaagacccaccggttgccggtttggcggttgcccgtatggcggcacatattacctatttgtccgaatccggtcttaccgcccgtttcggacggcgcttacaatcgcgacaggaaaagagcttcggttttgatgccgattttcagattgaaagctatcttagacatcaaggcatccgctttgttgaacgctttgatgccaattcctatctctacatcacccgagcgaccgactatttcgatcttgcagaggagcatggtgggaaattggccaatgcgttcagaggcaccaaaagccgcttttgcgtcatcagcttcgatagtgattggctataccccacctcagaatcacgggttatcgtccatgcccttaatgcggcaggggcagccgtcagctttatggaactatctaacccgaacggccacgactctttcttgttggatgcgccagaccttcaccgaacggttcatggctttttagaaggtgaccgcgcataa

SEQ ID NO: 92502 - protein, 373 aa, Zymomonas mobilis
MNNDRRFGLKRHITLPGELALDGGSLLTGIEIAYETYGHLNADASNAILICHPLTADQFAASDHPITGKPGWWSRMIGKGKPIDPERYCIICSNVLGSCLGSTGPSSFTPGTETPYAMNFPVITIRDMVRAQAKLLDYLGIRQLKAVIGGSMGGMQALEWASTYPDRVKSVVIIASTARHSAQNIAFHEVGRQAIMADPKWRQGNYYEEKDPPVAGLAVARMAAHITYLSESGLTARFGRRLQSRQEKSFGFDADFQIESYLRHQGIRFVERFDANSYLYITRATDYFDLAEEHGGKLANAFRGTKSRFCVISFDSDWLYPTSESRVIVHALNAAGAAVSFMELSNPNGHDSFLLDAPDLHRTVHGFLEGDRA

SEQ ID NO: 92503 - DNA, 26 bp, Artificial sequence
  primer
atgtcgcatactttaaaatcgaaaac

SEQ ID NO: 92504 - DNA, 23 bp, Artificial sequence
  primer
ctaccagttggtaacttcttcgg

SEQ ID NO: 92505 - protein, 460 aa, Artificial sequence
  consensus sequence
  Variant (2)..(3): Xaa in position 2 to 3 is any amino acid
  Variant (5)..(6): Xaa in position 5 to 6 is any amino acid
  Variant (8)..(12): Xaa in position 8 to 12 is any amino acid
  Variant (15)..(15): Xaa in position 15 is any amino acid
  Variant (17)..(17): Xaa in position 17 is any amino acid
  Variant (19)..(19): Xaa in position 19 is any amino acid
  Variant (21)..(23): Xaa in position 21 to 23 is any amino acid
  Variant (24)..(28): Xaa in position 24 to 28 is any or no amino acid
  Variant (30)..(33): Xaa in position 30 to 33 is any amino acid
  Variant (38)..(38): Xaa in position 38 is any amino acid
  Variant (40)..(45): Xaa in position 40 to 45 is any amino acid
  Variant (46)..(66): Xaa in position 46 to 66 is any or no amino acid
  Variant (69)..(72): Xaa in position 69 to 72 is any amino acid
  Variant (74)..(74): Xaa in position 74 is any amino acid
  Variant (75)..(75): Xaa in position 75 is any or no amino acid
  Variant (77)..(79): Xaa in position 77 to 79 is any amino acid
  Variant (80)..(81): Xaa in position 80 to 81 is any or no amino acid
  Variant (83)..(89): Xaa in position 83 to 89 is any amino acid
  Variant (91)..(91): Xaa in position 91 is any amino acid
  Variant (93)..(94): Xaa in position 93 to 94 is any amino acid
  Variant (96)..(98): Xaa in position 96 to 98 is any amino acid
  Variant (100)..(102): Xaa in position 100 to 102 is any amino acid
  Variant (104)..(112): Xaa in position 104 to 112 is any amino acid
  Variant (113)..(117): Xaa in position 113 to 117 is any or no amino acid
  Variant (120)..(121): Xaa in position 120 to 121 is any amino acid
  Variant (124)..(125): Xaa in position 124 to 125 is any amino acid
  Variant (126)..(126): Xaa in position 126 is any or no amino acid
  Variant (128)..(129): Xaa in position 128 to 129 is any amino acid
  Variant (131)..(131): Xaa in position 131 is any amino acid
  Variant (133)..(141): Xaa in position 133 to 141 is any amino acid
  Variant (144)..(148): Xaa in position 144 to 148 is any amino acid
  Variant (149)..(149): Xaa in position 149 is any or no amino acid
  Variant (151)..(151): Xaa in position 151 is any amino acid
  Variant (155)..(155): Xaa in position 155 is any amino acid
  Variant (159)..(160): Xaa in position 159 to 160 is any amino acid
  Variant (162)..(162): Xaa in position 162 is any amino acid
  Variant (164)..(176): Xaa in position 164 to 176 is any amino acid
  Variant (177)..(181): Xaa in position 177 to 181 is any or no amino acid
  Variant (183)..(186): Xaa in position 183 to 186 is any amino acid
  Variant (187)..(187): Xaa in position 187 is any or no amino acid
  Variant (189)..(191): Xaa in position 189 to 191 is any amino acid
  Variant (193)..(198): Xaa in position 193 to 198 is any amino acid
  Variant (200)..(201): Xaa in position 200 to 201 is any amino acid
  Variant (203)..(204): Xaa in position 203 to 204 is any amino acid
  Variant (207)..(210): Xaa in position 207 to 210 is any amino acid
  Variant (212)..(212): Xaa in position 212 is any amino acid
  Variant (214)..(215): Xaa in position 214 to 215 is any amino acid
  Variant (216)..(221): Xaa in position 216 to 221 is any or no amino acid
  Variant (223)..(224): Xaa in position 223 to 224 is any amino acid
  Variant (227)..(228): Xaa in position 227 to 228 is any amino acid
  Variant (232)..(235): Xaa in position 232 to 235 is any amino acid
  Variant (238)..(246): Xaa in position 238 to 246 is any amino acid
  Variant (248)..(248): Xaa in position 248 is any amino acid
  Variant (250)..(254): Xaa in position 250 to 254 is any amino acid
  Variant (255)..(352): Xaa in position 255 to 352 is any or no amino acid
  Variant (354)..(354): Xaa in position 354 is any amino acid
  Variant (355)..(356): Xaa in position 355 to 356 is any or no amino acid
  Variant (360)..(361): Xaa in position 360 to 361 is any amino acid
  Variant (364)..(365): Xaa in position 364 to 365 is any amino acid
  Variant (367)..(368): Xaa in position 367 to 368 is any amino acid
  Variant (374)..(374): Xaa in position 374 is any amino acid
  Variant (376)..(378): Xaa in position 376 to 378 is any amino acid
  Variant (380)..(382): Xaa in position 380 to 382 is any amino acid
  Variant (384)..(385): Xaa in position 384 to 385 is any amino acid
  Variant (387)..(409): Xaa in position 387 to 409 is any amino acid
  Variant (410)..(420): Xaa in position 410 to 420 is any or no amino acid
  Variant (423)..(423): Xaa in position 423 is any amino acid
  Variant (425)..(445): Xaa in position 425 to 445 is any amino acid
  Variant (446)..(450): Xaa in position 446 to 450 is any or no amino acid
  Variant (452)..(453): Xaa in position 452 to 453 is any amino acid
  Variant (455)..(455): Xaa in position 455 is any amino acid
LXXGXXLXXXXXAYXTXGXLXXXXXXXXNXXXXCHALXGXXXXXXXXXXXXXXXXXXXXXXXXXXXWWXXXXGXXGXXXXXDXXXXXXXCXNXXGXXXGXXXPXXXXXXXXXXXXXXYGXXFPXXXTXXDXVXXXXXXXXXLGXXXXXXVXGGSXGGMXXLXWXXXXXXXXXXXXXXXXXXAXXXXXSXXXIXXXXXXRXXIXXDPXXXXGXYXXXXXXXXPXXGLXXARMXXXXTYXXXXXXXXXFXRXXXXXXXXXXXXXXXXXXXXXXXXXXXXXXXXXXXXXXXXXXXXXXXXXXXXXXXXXXXXXXXXXXXXXXXXXXXXXXXXXXXXXXXXXXXXXXXXXXXXXXXFXXXSYLXXQGXXFXXRFDANXYXXXTXXXDXXDXXXXXXXXXXXXXXXXXXXXXXXXXXXXXXXXXXSDXLXXXXXXXXXXXXXXXXXXXXXXXXXXSXXGXHDAFL

SEQ ID NO: 92506 - protein, 13 aa, Artificial sequence
  protein pattern
  Variant (2)..(2): Xaa in position 2 is Ala or Gly
  Variant (4)..(4): Xaa in position 4 is Ile, Leu, Met or Val
  Variant (8)..(8): Xaa in position 8 is any amino acid
  Variant (9)..(9): Xaa in position 9 is Ala, Ser, Thr or Val
  Variant (11)..(12): Xaa in position 11 to 12 is any amino acid
  Variant (13)..(13): Xaa in position 13 is Ala, Cys, Gly, Ser or Thr
GXSXGGMXXLXXX

SEQ ID NO: 92507 - protein, 12 aa, Artificial sequence
  protein pattern
  Variant (2)..(2): Xaa in position 2 is Ala, Cys or Val
  Variant (3)..(3): Xaa in position 3 is Ile, Leu, Met or Val
  Variant (4)..(4): Xaa in position 4 is Leu, Met or Val
  Variant (5)..(5): Xaa in position 5 is Ile, Leu or Val
  Variant (6)..(6): Xaa in position 6 is any amino acid
  Variant (10)..(10): Xaa in position 10 is Ser or Thr
  Variant (12)..(12): Xaa in position 12 is Asp, Asn or Ser
NXXXXXHALXGX

SEQ ID NO: 92508 - protein, 29 aa, Artificial sequence
  protein pattern
  Variant (2)..(3): Xaa in position 2 to 3 is any amino acid
  Variant (6)..(6): Xaa in position 6 is Ala, Gly or Ser
  Variant (7)..(7): Xaa in position 7 is any amino acid
  Variant (9)..(9): Xaa in position 9 is any or no amino acid
  Variant (12)..(25): Xaa in position 12 to 25 is any amino acid
  Variant (26)..(26): Xaa in position 26 is any or no amino acid
  Variant (28)..(28): Xaa in position 28 is Ala, Glu, Gly or Ser
PXXGLXXAXRMXXXXXXXXXXXXXXXFXR

SEQ ID NO: 92509 - protein, 9 aa, Artificial sequence
  protein pattern
  Variant (2)..(3): Xaa in position 2 to 3 is any amino acid
  Variant (7)..(7): Xaa in position 7 is Ala or Gly
SXXGHDXFL

SEQ ID NO: 92510 - DNA, 2580 bp, Saccharomyces cerevisiae
  CDS (1)..(2580)
atgtcatcatcctcaagttcatcagagtcatcgcctaatttatcgcggtcaaactcactggctaacacgatggtttccatgaaaacagaagaccatacgggattgtacgaccataggcagcaccctgactcactgccggtccgtcaccaacctccaacattgaagaacaaggaaattgctaagtccactaaaccttctattcctaaggagcagaagagtgcaacgagatacaacagccatgtggatgtgggaagcgtacccagtaggggccgcatggattttgaagatgaagggcagggtatggatgaaacggttgctcatcatcaattgagggcatctgccattttaacttctaacgcgaggccttccagactagcccactccatgccacatcaaaggcagctttatgtggaaagtaatatacacacaccaccaaaggatgtaggtgtaaagagagactatactatgtcatcttctactgcatcatcaggtaacaaatccaagctgagcgcatcttcctcggcaagtcctattacgaaggttagaaaatcttcgctggtcagtcctgttcttgagatcccacacgaatcgaaatctgatacacactccaagctggctaaacccaagaagaggacatattctaccacatctgcgcattcatctatcaatcccgcagttttactgacgaaaagcacatcccaaaaatcggatgcagatgatgatacattggaaagaaaaccagtacgtatgaatactagagcttcttttgatagtgacgtatcacaggcgtcgagagattctcaagagacggaagaagatgtttgtttccctatgccaccacaattgcataccagagttaacggtatagatttcgatgaactggaagagtacgctcagtttgcaaacgcggagaagagtcaatttttggcaagtctgcaagtgcccaacgaacagaagtacagtaacgtttctcaggatatcgggtttaccagctctacttccacttcgggatcatcagctgccctaaaatatacaccaagagtttcgcagactggtgaaaagagcgagagtaccaatgaaacagaaatccatgaaaagaaggaagacgagcatgagaaaatcaagcctagtttacaccctggtatatctttcggtaaaaataaagttgaaggggaagagaatgaaaacattccatccaatgacccggcgtattgctcttaccagggtacagactttcaaattcctaatagattttcttttttctgttccgaatctgatgaaaccgttcatgctagtgatatcccttccttagtgtctgagggacaaacattctatgaattattcaggggaggtgagccaacatggtggttagattgtagttgtccaactgatgatgaaatgcgttgcatagcaaaggcgtttggtatccatccattgactgcagaagatatcagaatgcaagaaacacgtgaaaaggtggaacttttcaaatcgtattacttcgtttgtttccatacctttgaaaatgataaagaatcagaggatttcctggaacctattaacgtttacattgttgtctgtaggtcaggtgttttaacattccattttggcccaatatctcattgtgctaatgtcagaaggcgtgtaagacagttacgtgactatgtcaatgtcaattcagattggttatgttatgctttaatcgatgacattactgatagtttcgctcctgtaattcaatctattgaatatgaagcagatgcaatcgaagattctgtgttcatggctcgtgacatggattttgcagcaatgttacaaagaattggtgaaagtaggcgtaagacaatgacgttgatgagacttcttagtggtaaggctgatgttatcaaaatgtttgccaaaagatgccaagatgaagctaatggtattggaccggcactaacatctcaaataaatattgctaacttacaggcaaggcaggataacgccagtcatatcaaaaataatagttcgacaactgtaccaaataattatgcgcccaccacatcacaaccgaggggggatatcgccctatacttgggtgatattcaagatcatttgttgacaatgtttcaaaatttgctggcgtacgaaaaaattttttctagatcccatacaaactacttagctcaactgcaagtggaatcatttaattctaataataaagtgacagaaatgttgggtaaagtcaccatgataggtacaatgctagttccattaaatgttatcactggtcttttcggtatgaatgttaaagttccgggggagaattccagtatcgcgtggtggtttgggatattgggtgtgctgcttttgctggccgtccttggttggttcttggccagctattggattaaaagaatagaccctcctgcaacacttaacgaggccgctgaaagtggagccaaatcggttatttcgagcttcttgccaaaaagaaacaagagattcaatgatcgttccaaaaatataaatgtaagagccggtccttcaaacaaatcagttgcaagtcttcctagtagatatagccgctacgactga

SEQ ID NO: 92511 - protein, 859 aa, Saccharomyces cerevisiae
MSSSSSSSESSPNLSRSNSLANTMVSMKTEDHTGLYDHRQHPDSLPVRHQPPTLKNKEIAKSTKPSIPKEQKSATRYNSHVDVGSVPSRGRMDFEDEGQGMDETVAHHQLRASAILTSNARPSRLAHSMPHQRQLYVESNIHTPPKDVGVKRDYTMSSSTASSGNKSKLSASSSASPITKVRKSSLVSPVLEIPHESKSDTHSKLAKPKKRTYSTTSAHSSINPAVLLTKSTSQKSDADDDTLERKPVRMNTRASFDSDVSQASRDSQETEEDVCFPMPPQLHTRVNGIDFDELEEYAQFANAEKSQFLASLQVPNEQKYSNVSQDIGFTSSTSTSGSSAALKYTPRVSQTGEKSESTNETEIHEKKEDEHEKIKPSLHPGISFGKNKVEGEENENIPSNDPAYCSYQGTDFQIPNRFSFFCSESDETVHASDIPSLVSEGQTFYELFRGGEPTWWLDCSCPTDDEMRCIAKAFGIHPLTAEDIRMQETREKVELFKSYYFVCFHTFENDKESEDFLEPINVYIVVCRSGVLTFHFGPISHCANVRRRVRQLRDYVNVNSDWLCYALIDDITDSFAPVIQSIEYEADAIEDSVFMARDMDFAAMLQRIGESRRKTMTLMRLLSGKADVIKMFAKRCQDEANGIGPALTSQINIANLQARQDNASHIKNNSSTTVPNNYAPTTSQPRGDIALYLGDIQDHLLTMFQNLLAYEKIFSRSHTNYLAQLQVESFNSNNKVTEMLGKVTMIGTMLVPLNVITGLFGMNVKVPGENSSIAWWFGILGVLLLLAVLGWFLASYWIKRIDPPATLNEAAESGAKSVISSFLPKRNKRFNDRSKNINVRAGPSNKSVASLPSRYSRYD

SEQ ID NO: 92512 - DNA, 2412 bp, Candida glabrata CBS 138
  CDS (1)..(2412)
atgtcttcttctagtgaatcggagccgcactctccgcagctttcgcacacttctgtggcagagtctatggtttccatgaacactgaggatcacaatgagttgtatgaccacaggcagcacattagtgttcctccgcggttaggccaggattctcctgggagttccaatcttaatgcgaggcatatgatgcttgatgatagagctaatgaagattttggttttatgaacattgaaggggcagactctgattgcgagccactggggaaggaccaccacaaattaaggtctacagctttacaaaattctaatgcgagaccttctagattggcccacacagttaaccaccaggaagttgtccaacctgcgacaatcacaaccgacaatagtgagttgaagaagaatgtctcagcaatttcggcttctccaccaacaaagactcgaagacagtccaatacattttcacttacagacaagaaaccgctaaagaggaccatgtcaaggcataactccgtgaattctgctgtgtcatcttcaaataggcttaacttggctgctgtttcgagaagcatttcccacaagtcggtagatgatgataacctcaaacgtaagattacgagggcatcgtttagtagcgacaattctcaggcatccagagagtctcaagagaccgaggaagatgtttgcttccctatgcctccacagttacatagccgtgttaatggcatagactttgacgaactagaggaatttgcagagcaagtcaacgaacagaaaaagctatgtgaaatttccttgagtgcacagaagagtggctcaaacggaattcaagcctctggctcttcatcatccgctaattcttatatgtcagaagcagctctcaaatatactccaaaacatttaagaaaagacctctctcctcccaaatctgagtcccttaacagtaactcatccaattctcctgattctaaccaaccccaaggtgtctcatttggtaataacaagattgaaggtgaagatgagccatacgaagaaaaaccccaagcttatacccaaactcccgaaaaccaattctacggagacgggagttttaaagctcctgacagattttctttcttctcatcagaaatggaagaaacgatacatgccacagatatagcaaacttagtgacaccagggcagtcattctttgacctcttcaggggcggagagccaacgtggtggctagattgtagctatcctactgatgatgaaatgagatgtcttgcaaaggcttttggcatccatcctttgactgctgaagatattagaatgcaagaaactcgtgagaaagtggagttatttaagtcctactattttgtttgtttccatacatttgaaaatgataacgaatctgaagatttcctagagccaatcaatgtatatgtggttgtatttagatcaggtgttttgacatttcactttggacccatttcacattgtgctaatgttagaagacgtgtgagacagctgcgagattatgtcgacgtgaactctgactggctttgttatgctctgattgatgatattaccgatagttttgctccagttattagatcgatagagctagaagcggactcaattgaagactccgtgtttatggcaagagacttggattttgctgcgatgttacaaaggatcggtgaaagtaggcgcaaaacgatgactttaatgagattactaagtggcaaagcagatgtcatcaaaatgttcgccaagagatgtcaagatgaggctaatggtatcggtcctgcattgacgtctgaggtcaacatagcaaatctaacttcaagcagtgaccctaatgtcaaatatatgcagaaattgcaaatgaatacacaaccaagaggtgatatcgcgctgtatctaggtgacatccaggatcatttactgacaatgtatcaaaacttatcagcttatgaaaagattttttctagatcacataccaactacttagcacaacttcaagtggaatccttcaactccaacaacaaagtcacagaaatgcttggtaaagtgactatgataggtactgtattagtaccactgaacctaataactggtcttttcggtatgaacgtcaaagttccagggcaggacaccagtattgcatggtggtttggcattcttggcgtgatgatcggaattgcaatttgtttatggttcctcgcatcactatggatcaaaagtcttgtccccccagctaccttaaacgaggccgctgaaagtggagccaagtcaattctctctagtttcatcccccggggacctaaaaacgagaatgacccaaaatactcgcgaggcagatcaaaatacggaggcccctccaaccgttcgatagcaagtctgccaagcaaatacagcagatatgattaa

SEQ ID NO: 92513 - protein, 803 aa, Candida glabrata CBS 138
MSSSSESEPHSPQLSHTSVAESMVSMNTEDHNELYDHRQHISVPPRLGQDSPGSSNLNARHMMLDDRANEDFGFMNIEGADSDCEPLGKDHHKLRSTALQNSNARPSRLAHTVNHQEVVQPATITTDNSELKKNVSAISASPPTKTRRQSNTFSLTDKKPLKRTMSRHNSVNSAVSSSNRLNLAAVSRSISHKSVDDDNLKRKITRASFSSDNSQASRESQETEEDVCFPMPPQLHSRVNGIDFDELEEFAEQVNEQKKLCEISLSAQKSGSNGIQASGSSSSANSYMSEAALKYTPKHLRKDLSPPKSESLNSNSSNSPDSNQPQGVSFGNNKIEGEDEPYEEKPQAYTQTPENQFYGDGSFKAPDRFSFFSSEMEETIHATDIANLVTPGQSFFDLFRGGEPTWWLDCSYPTDDEMRCLAKAFGIHPLTAEDIRMQETREKVELFKSYYFVCFHTFENDNESEDFLEPINVYVVVFRSGVLTFHFGPISHCANVRRRVRQLRDYVDVNSDWLCYALIDDITDSFAPVIRSIELEADSIEDSVFMARDLDFAAMLQRIGESRRKTMTLMRLLSGKADVIKMFAKRCQDEANGIGPALTSEVNIANLTSSSDPNVKYMQKLQMNTQPRGDIALYLGDIQDHLLTMYQNLSAYEKIFSRSHTNYLAQLQVESFNSNNKVTEMLGKVTMIGTVLVPLNLITGLFGMNVKVPGQDTSIAWWFGILGVMIGIAICLWFLASLWIKSLVPPATLNEAAESGAKSILSSFIPRGPKNENDPKYSRGRSKYGGPSNRSIASLPSKYSRYD

SEQ ID NO: 92514 - DNA, 2337 bp, Kluyveromyces lactis NRRL Y-1140
  CDS (1)..(2337)
atgtctgatgataaatcagttgattccggagaacacgagatttctcgtactacttcagcagcacattctttggcgtcattgaaaactgaagagcatactaagttgtatgatcatagacagcaacatgactacgtttctcataatcctgggccggctgcaccggctgcagctgcgcgtaatcccatgcagggtccaaacttgggatcgtactcgaattcactaggagttacgggctcaggttcccgcgaaggagcagcaggattaactggagtatctggtataaactttgatggtgattccgatgatgatcttagccttccaaaccctggctccaatacgtatgttcctatcggtccttcaaactcaagcaagcttgggaagctgaaagtgcctggttcccattctgccgcacattatagcaaatcctattctgatggctctcaacctcattcaagacgcgggtcgcattcattaggtattccattgatcaagaagaaatcgagatcttcatccaatacttccatcaaagggaaccctctaacaagaacagtctcctctaagtctcagagctctcaaaaatcgagagaactgagacgtcgtcttacaagaaatgcctccatcgatagtgataattcacaagtgtcacacctgtctcaagagacggaagaagatgtgtgtttccctattcaaaaaagggaacatacacgcattaacggtattgatttcgatgaattagaagaatttacggcacaagaaaaagccataaacaacagccatctatattcccaccctgctgtgacgactcagaatacttttggtcaacattcaggtaaaccaccatcttcaacagattcgtccacctcttcatcatccgcagctctcaagtatactcctagaccagaagctgttgcccaagggatctctttcggtaataataaagttgagccggatgagtatgacgaagatgatatcaaaaagatgaactcaaattacacttctacggttcctccaataccagaacagacaactccatttgatgcacccaatagatttgcctattttagttctgacgtatctgaaactttgcatgctccagacctctcgtcactagtgaagccttatcaatcatttagacaattattcaatgatggtgctcctacctggtggttggactgcagttgccctacagatgaggaaatgaggtgcttgaccaaaacatttggaattcatcccttgacatcagaagatatcagaatgcaagaaactcgtgaaaaagtggaacttttcaaaaactattatttcatctgtttccatacgttcgaaaatgatatggaatcggaggactttttagagcccattaacgtctatatggttgtttttgcgaacggtattctaactttccactttaacccaatctcacattgtgccaatgtcagaagacgtgtgagacaacttagagattatgtcggcgtaaactcagattggatatgttacgccttagtagatgatatcacagatagttttgcacctgttattcaatcaatcgaatatgaagcagatgcaatagaagattcagtgtttatgaccagagacatgaatttcgctgtaatgcttcagagaattggtgaaggaagaaggaaaacaatgacactaatgagattactcagcggtaaagcagatgttatcaaaatgtttgccaaaagatgccaggacgatatcaatggcatcggccctgcgttaacttctcaagtgaatattgcaaaccttcaattcaagatgcccccagacagcgctccttctatcgaaaaaagacaacaacctagagccgatattgcaatgtaccttggtgatattcaagatcatatcgttaccatgttccaaaatttgtcatcttatgaaaagatcttttccagatcccatgccaattacttggcacagcttcaagtggaatctttcaattctaacaataaagtcacagaaatgttgggtaaggttaccatgatcggtaccatgcttgttcccctcaatgttatcaccggtttatttggtatgaatgttcgtgtccctggtcaacctgatggtgaaggtactttcggctggtttttcggtatcttgggtttcatatttttgttcgcagcgggatccctagtattctcgtcgtactggctttccagaataaaccccccaaccacattgaacgaggcggcaacgtctggtaccaaatctattataaacttcaagagtagatcattgaagaatccccaatttaatcaaccgactaaatccaataagtcgatgctcagtttctccaccaacaaaatgggaagatatgaataa

SEQ ID NO: 92515 - protein, 778 aa, Kluyveromyces lactis NRRL Y-1140
MSDDKSVDSGEHEISRTTSAAHSLASLKTEEHTKLYDHRQQHDYVSHNPGPAAPAAAARNPMQGPNLGSYSNSLGVTGSGSREGAAGLTGVSGINFDGDSDDDLSLPNPGSNTYVPIGPSNSSKLGKLKVPGSHSAAHYSKSYSDGSQPHSRRGSHSLGIPLIKKKSRSSSNTSIKGNPLTRTVSSKSQSSQKSRELRRRLTRNASIDSDNSQVSHLSQETEEDVCFPIQKREHTRINGIDFDELEEFTAQEKAINNSHLYSHPAVTTQNTFGQHSGKPPSSTDSSTSSSSAALKYTPRPEAVAQGISFGNNKVEPDEYDEDDIKKMNSNYTSTVPPIPEQTTPFDAPNRFAYFSSDVSETLHAPDLSSLVKPYQSFRQLFNDGAPTWWLDCSCPTDEEMRCLTKTFGIHPLTSEDIRMQETREKVELFKNYYFICFHTFENDMESEDFLEPINVYMVVFANGILTFHFNPISHCANVRRRVRQLRDYVGVNSDWICYALVDDITDSFAPVIQSIEYEADAIEDSVFMTRDMNFAVMLQRIGEGRRKTMTLMRLLSGKADVIKMFAKRCQDDINGIGPALTSQVNIANLQFKMPPDSAPSIEKRQQPRADIAMYLGDIQDHIVTMFQNLSSYEKIFSRSHANYLAQLQVESFNSNNKVTEMLGKVTMIGTMLVPLNVITGLFGMNVRVPGQPDGEGTFGWFFGILGFIFLFAAGSLVFSSYWLSRINPPTTLNEAATSGTKSIINFKSRSLKNPQFNQPTKSNKSMLSFSTNKMGRYE

SEQ ID NO: 92516 - DNA, 2811 bp, Debaryomyces hansenii CBS767
  CDS (1)..(2811)
atgtccgataacgaaagtttccgctcagtctcaccatccagagaaattctccatagggctgctaatacgggagaagtgttgaatgatcaccggaaccaattaccatcgttgcctattcgtgggacaggtggtggtatgggacagtcatcagcagtaagcgatgacgacgatgacgattatcaatcgtcacggtctatgcaagatgcccagtatcaacagagccagcagcaacaaccacagccatttcatccacagttacagggtagtagaagtgtcgatgaaagccaatttcccaaagcgaaacagcaaggtccatcacaaccttacagaagctccaaaaatgcgtatatgaataacttgagaagggacttctatttgaagaatgacgacgacgataatgagcgtttctatgttccgagtaagaacccacagccactacaaagttcttcgattccagtaggcagaggctcaggtgggatgactggtgctcctaaacagagtagggggcgttttagatcacagtcattttcaggacaggctaaatctgatggccaggatgaagttagaagacatcaatcgattgcggcggcgcctccattcggagggattttgatgaagtctgacaatccaccttccaaaaagagcaaaagaagcaactcgatgatcaatgatacattagaggcggaccttgctgcaccaatgacgaaatcgaagacaaacgaaagtatgacttctgaagcccaaaacaacaataaaagggaaagaagaccatcccgtacttcaatagatagcgaggccgattcgcatgcgtcgaggtcttcacaggagacagaagaagatgtttgctttcctatgttgcgtgaacacgttcgtgttaagggtattgattttgatgaaattgaagagttcattagagatgagaaagagaatgaaatgcatttaaaagaggaacaacagatgatcgcagaaagaacagccatgagggttgatactggacatgggagtgcgcgcgatgtaggtcccagtaaaaatgccttgaaatatactccgtcaaacatattaggaaaggcttcgttcggaaagtttggtagaaagaatacctatgcaggcgacataatgtcttcatctggtattaatatttcggagagggcacaatcagattcttctaccgttacagatgattctgcctctaggagatacaacgaaaagattttgggagacgatgatatttcgaccgaaaatgttaagtttggtggtacaagaatcaacgataatgattcggcattgcctgaaaggttttcattcttttgttccgaatcagaagaaacaatacatgctcctgatattccttcgttggtcaaacctgggcagagtgtaagcgatttgttcagaaatggtgaaggtacatggtggcttgattgtgtttgccctactgatgctgaaatgaaaatggttgctaaagcatttggtattcatcctttgacagctgaagatattcgtatgcaagaaacccgtgaaaaggtggaattattcagaaactattattttgtttgtttccatacttttgaaggtgatcaggaatcagaggattacttggagccgattaacttttatattgttgttttcagagagggtgtattgtcgtttcatttttcgcctattttacatccagccaatgtcagaagaagagtccgtcaattaagagattacgttgatgtcagtgccgattggatctgttatgcgttaattgatgacattacagatggattcgcccctgttattactggtgtcgaatatgaagctgatgcaatcgaagattctgtatttgctgctagacaagttggttttagtaccatgatacaaaggattggtgagtcaagaagaaaggtaatgaccttgatgagattattgtccggaaaagcggacgttatcaaaatgtttgctaaaagatgtcaagatgaggctgccaataaccaaataaatatattccaggcacatcccaacatgaacggaatgggtaattattattcacaaacaagcggtaatgcttcgcaaagccatacacatagtggatcatacacacatggttacaataacgaaagcccttacccacaaggttataacaataattcaaacccacagggctataacaataattcaaacccacaaggttataacaataattcaaacccacaaggttatagcaataatccaaacccacaaggatataatcaaggcggcccaggtgtaacgtttggcccaggtccaggtgtatctaacaacatgattgatccgggtgcattttatatgaagactcagccagatagaactcaaccaagggctgacatagcgctctatttgggcgatattcaagatcacgttgttactatgttccaaaatttagttgcttacgaaaagatttttagtaggtcccattcaaactatttggcacaattacaagttgaatcctttaattctaattataaggttactgctatgttatctaatgtcacaatgataggtacggtctttttcccattgaatgtgatcactgggttatttggtatgaacgtcgttgttccaggtcaaggtgatgatcacccaggtcttggctggttcttcggtattgttggggttatgtgtgctatagttattgttgctgtagtttctgcacgtatttggatcctgagagtcacggaaagaacctatgatgaggaaaacacaaaaaaatccattaaaagctatgggttaaaaacgagaacaaaagaagctgcaaaatcgattatcagcttcccaaataagtacgattaa

SEQ ID NO: 92517 - protein, 936 aa, Debaryomyces hansenii CBS767
MSDNESFRSVSPSREILHRAANTGEVLNDHRNQLPSLPIRGTGGGMGQSSAVSDDDDDDYQSSRSMQDAQYQQSQQQQPQPFHPQLQGSRSVDESQFPKAKQQGPSQPYRSSKNAYMNNLRRDFYLKNDDDDNERFYVPSKNPQPLQSSSIPVGRGSGGMTGAPKQSRGRFRSQSFSGQAKSDGQDEVRRHQSIAAAPPFGGILMKSDNPPSKKSKRSNSMINDTLEADLAAPMTKSKTNESMTSEAQNNNKRERRPSRTSIDSEADSHASRSSQETEEDVCFPMLREHVRVKGIDFDEIEEFIRDEKENEMHLKEEQQMIAERTAMRVDTGHGSARDVGPSKNALKYTPSNILGKASFGKFGRKNTYAGDIMSSSGINISERAQSDSSTVTDDSASRRYNEKILGDDDISTENVKFGGTRINDNDSALPERFSFFCSESEETIHAPDIPSLVKPGQSVSDLFRNGEGTWWLDCVCPTDAEMKMVAKAFGIHPLTAEDIRMQETREKVELFRNYYFVCFHTFEGDQESEDYLEPINFYIVVFREGVLSFHFSPILHPANVRRRVRQLRDYVDVSADWICYALIDDITDGFAPVITGVEYEADAIEDSVFAARQVGFSTMIQRIGESRRKVMTLMRLLSGKADVIKMFAKRCQDEAANNQINIFQAHPNMNGMGNYYSQTSGNASQSHTHSGSYTHGYNNESPYPQGYNNNSNPQGYNNNSNPQGYNNNSNPQGYSNNPNPQGYNQGGPGVTFGPGPGVSNNMIDPGAFYMKTQPDRTQPRADIALYLGDIQDHVVTMFQNLVAYEKIFSRSHSNYLAQLQVESFNSNYKVTAMLSNVTMIGTVFFPLNVITGLFGMNVVVPGQGDDHPGLGWFFGIVGVMCAIVIVAVVSARIWILRVTERTYDEENTKKSIKSYGLKTRTKEAAKSIISFPNKYD

SEQ ID NO: 92518 - DNA, 2799 bp, Candida albicans SC5314
  CDS (1)..(2799): transl_table=12
atgtccgatagtgaaagttattatcaaaattcaactactaatcaacctattcctagatctgatgaagtattggatgatcatagaaatcaaatcactaatgattgtgccattagtgatagtgaagatgagttggaattaaaaccagaattagaatcagaagttgcaaaaagcgaaaaacaacaacaacaacaacaacaacatcatcaagagattacatcagataatgctaaaccattgactcgtaaatctggttcttcaattaagaaaaaatctaatcttaccgataaagatagaattaccaaccctatgagtttatctggtggtgatgatactattaacagcggtcacaaaaatcgtaattataacatgagttcattacgtaaagatttttatttaaaagataatactgacgacaattctactaataatcatactcatcttgcaattccaattccaattccaattccaaccccaattattactaatgctaataaatcaagaagaaaatctcaattggaaaatttacctccattaattaaaaagaaaactattggtcgtaataattctaataattttgaaaatgatttagttagtcccatgacaaaaatgaaaactaatgatagtgaagatattactaatactagcaccactgctaatcatatgaaacttggtattggtgctacaacccttggtgttggaactggtactaccgccactgccactgccactgccactgctgctgctggtagaagaccatctcgttcatctattgatagtgaagctgattctcatgcatcaagatcatctcaagaaactgaagaagatgtttgttttcctatggttggtgatcatattagagttaatggaattgattttgatgaaattgatgaatttattagagaagaaagagaagaagcttatttacaaaaacaaatgattgctaaaaatattctgcgtattgatgaatttcaaaatctttccaaaaataatactactagtggtgcatctcgtcatccatatcatcatcacagtaataataataaaaaaaataatggtggtgatggtagtggtggttctagtatggcagcattaaaatatactccaaaaaatattttaaagaaaacattatcaagatttgaatttactcatgaaaattcttcatcttcagaagaaatttatgaattgaagactaaacaacaaccaccttacaaatatgatgatcaattatcattaacttcatctacatcttctacttctggatctggatctggatctgggcaggtgaaatttggtggagcaagaatttctgatgggattaatggaggttcattacctgatagattttcacttttccattctgaatcagaagaaactattcatgcccccgatattccatcattagtatcaccaggtcaatctgttcgagatttatttagaaatggtgaagaaacttggtggttagattgtacctgtcctactgattcggaaatgaaaatgttggccaaagcatttggtattcatcctttaactgctgaagatattcgaatgcaagaaactcgtgaaaaagttgaattatttaaaagttattattttgtttgtttccatacttttgaagctgataaagaatctgaagattatttagaaccgataaatgtttatattgttgttttccatgatggtatattaacgttccatttttcaccaatttctcatccagcaaatgttagaagaagagttcgtcaattgagagattatgtcgatgttagtgctgattggttatgttatgccttaatcgatgaaattaccgatggttttgcccccgtgattcatggaattgaatatgaagctgatgccattgaagatgccgttttcactgctagagatactgattttagtagtatgttacaaagaattggtgaatcaagaagaaaagtcatgactttaatgagattattatcaggtaaagctgatgtcattaaaatgtttgctaaaagatgtcaagaagaagctaattcttcttctggttattatcaacgtcaatataacttacaacaacaacaacaacaacaggccccaccaccaccaccacctaaccctattattacttcaccaattaattcaactttgaatcttaatagtttaggaacttcaactggtggaggagtaggagtaggaggaattaattttggtcccaatccaactggaaataatactaatactaatactaacactactggttcaccttcaccacctcaacaacaacaacatggtatcactaacaaatctttccccatccctgatgcacgtccaagagctgatattgcattatatttaggtgatattcaagatcatataatcaccatgtttcaaaatttattagcctatgaaaaaattttcagtcgttcacattcaaattatttagctcaattacaagttgaatcattcaattccaataataaaatcaccgaaatgttttctaaaattactttgattgggacaatgttagttccattaaatttagtcacgggactttttggtatgaatgtaagagtccctggtgaaggtgggaaaaatttaggttggtttttcggaattgttggagtattaatatttataattattggatcatttatatttgctcaatggtggttgaaaaaattgaataattcaattgaaggacaaaataatggtaatcgaccaatttttaatcattcatcaagaagatcaattagaagtttaggtttaaaaaaacatggtggtaataaatcaattattagtttccccaataaatatgaataa

SEQ ID NO: 92519 - protein, 932 aa, Candida albicans SC5314
MSDSESYYQNSTTNQPIPRSDEVLDDHRNQITNDCAISDSEDELELKPELESEVAKSEKQQQQQQQHHQEITSDNAKPLTRKSGSSIKKKSNLTDKDRITNPMSLSGGDDTINSGHKNRNYNMSSLRKDFYLKDNTDDNSTNNHTHLAIPIPIPIPTPIITNANKSRRKSQLENLPPLIKKKTIGRNNSNNFENDLVSPMTKMKTNDSEDITNTSTTANHMKLGIGATTLGVGTGTTATATATATAAAGRRPSRSSIDSEADSHASRSSQETEEDVCFPMVGDHIRVNGIDFDEIDEFIREEREEAYLQKQMIAKNISRIDEFQNLSKNNTTSGASRHPYHHHSNNNKKNNGGDGSGGSSMAALKYTPKNILKKTLSRFEFTHENSSSSEEIYELKTKQQPPYKYDDQLSLTSSTSSTSGSGSGSGQVKFGGARISDGINGGSLPDRFSLFHSESEETIHAPDIPSLVSPGQSVRDLFRNGEETWWLDCTCPTDSEMKMLAKAFGIHPLTAEDIRMQETREKVELFKSYYFVCFHTFEADKESEDYLEPINVYIVVFHDGILTFHFSPISHPANVRRRVRQLRDYVDVSADWLCYALIDEITDGFAPVIHGIEYEADAIEDAVFTARDTDFSSMLQRIGESRRKVMTLMRLLSGKADVIKMFAKRCQEEANSSSGYYQRQYNLQQQQQQQAPPPPPPNPIITSPINSTLNLNSLGTSTGGGVGVGGINFGPNPTGNNTNTNTNTTGSPSPPQQQQHGITNKSFPIPDARPRADIALYLGDIQDHIITMFQNLLAYEKIFSRSHSNYLAQLQVESFNSNNKITEMFSKITLIGTMLVPLNLVTGLFGMNVRVPGEGGKNLGWFFGIVGVLIFIIIGSFIFAQWWLKKLNNSIEGQNNGNRPIFNHSSRRSIRSLGLKKHGGNKSIISFPNKYE

SEQ ID NO: 92520 - DNA, 2790 bp, Candida albicans SC5314
  CDS (1)..(2790): transl_table=12
atgtccgatagtgaaagttattatcaaaattcaactactaatcaacctattcctagatctgatgaagtattggatgatcatagaaatcaaatcactaatgattgtgccattagtgatagtgaagatgagttggaattaaaaccagaattagaatcagaagttgtaaaaagcgaaaaacaacaacaacaacatcatcaagagattacatcagataatgctaaaccattgactcgtaaatctggttcttcaattaagaaaaaatctaatcttaccgataaagatagaattaccaaccctatgagtttatctggtggtgatgatactattaacagcggtcacaaaaatcgtaattataacatgagttcattacgtaaagatttttatttaaaagataatactgacgacaattctactaataatcatactcatcttgcaattccaattccaattccaattccaaccccaattattactaatgctaataaatcaagaagaaaatctcaattggaaaatttacctccattaattaaaaagaaaactattggtcgtaataattctaataattttgaaaatgatttagttagtcccatgacaaaaatgaaaactaatgatagtgaagatattactaatactactagcaccactgctaatcatatgaaacttggtattggtgctacaacccttggtgttggaactggtactaccgccactgccactgccactgctactgctggtggtggtggtagaagaccatctcgttcatctattgatagtgaagctgattctcatgcatcaagatcatctcaagaaactgaagaagatgtttgttttcctatggttggtgatcatattagagttaatggaattgattttgatgaaattgatgaatttattagagaagaaagagaagaagcttatttacaaaaacaaatgattgctaaaaatattctgcgtattgatgaatttcaaaatctttccaaaactaatactactagtggtgcatctcgtcatccatatcatcatcacagtaataataataaaaaaaataatggtggtgatggtagtagtggttctagtatggcagcattaaaatatactccaaaaaatattttaaagaaaacattatcaagatttgaatttactcatgaaaattcttcatcttcagaagaaatttatgaattgaagactaaacaacaaccaccttacaaatatgatgatcaattatcattaacttcatctacatcttctacttctggatctggatctgggcaggtgaaatttggtggagcaagaatttctgatgggattaatggaggttcattacctgatagattttcacttttccattctgaatcagaagaaactattcatgcccccgatattccatcattagtatcaccaggtcaatctgttcgagatttatttagaaatggtgaagaaacttggtggttagattgtacttgtcctactgattcggaaatgaaaatgttggccaaagcatttggtattcatcctttaactgccgaagatattcgaatgcaagaaactcgtgaaaaagttgaattatttaaaagttattattttgtttgtttccatacttttgaagctgataaagaatctgaagattatttagaaccgataaatgtttatattgttgttttccatgatggtatattaacgttccatttttcaccaatttctcatccagcaaatgttagaagaagagttcgtcaattgagagattatgtcgatgttagtgctgattggttatgttatgccttaatcgatgaaattaccgatggttttgcccccgtgattcatggaattgaatatgaagctgatgccattgaagatgccgttttcactgctagagatactgattttagtagtatgttacaaagaattggtgaatcaagaagaaaagtcatgactttaatgagattattatcaggtaaagctgatgtcattaaaatgtttgctaaaagatgtcaagaagaagctaattcttcttctggttattatcaacgtcaatataacttacaacaacaacaacaacaacaggccccaccaccaccaccacctaaccctattattacttcaccaattaattcaactttgaatcttaatagtttaggaacttcaactggtggaggagtaggagtaggaggaattaattttggtcccaatccaactggaaataatactaatactaatactaacactactggttcaccttcaccacctcaacaacaacaacatggtatcactaacaaatctttccccatccctgatgcacgtccaagagctgatattgcattatatttaggtgatattcaagatcatataatcaccatgtttcaaaatttattagcctatgaaaaaattttcagtcgttcacattcaaattatttagctcaattacaagttgaatcattcaattccaataataaaatcaccgaaatgttttctaaaattactttgattgggacaatgttagttccattaaatttagtcacgggactttttggtatgaatgtaagagtccctggtgaaggtgggaaaaatttaggttggtttttcggaattgttggagtattaatatttataattattggatcatttatatttgctcaatggtggttgaaaaaattgaataattcaattgaaggacaaaataatggtaatcgaccaatttttaatcattcatcaagaagatcaattagaagtttaggtttaaaaaaacatggtggtaataaatcaattattagtttccccaataaatatgaataa

SEQ ID NO: 92521 - protein, 929 aa, Candida albicans SC5314
MSDSESYYQNSTTNQPIPRSDEVLDDHRNQITNDCAISDSEDELELKPELESEVVKSEKQQQQHHQEITSDNAKPLTRKSGSSIKKKSNLTDKDRITNPMSLSGGDDTINSGHKNRNYNMSSLRKDFYLKDNTDDNSTNNHTHLAIPIPIPIPTPIITNANKSRRKSQLENLPPLIKKKTIGRNNSNNFENDLVSPMTKMKTNDSEDITNTTSTTANHMKLGIGATTLGVGTGTTATATATATAGGGGRRPSRSSIDSEADSHASRSSQETEEDVCFPMVGDHIRVNGIDFDEIDEFIREEREEAYLQKQMIAKNISRIDEFQNLSKTNTTSGASRHPYHHHSNNNKKNNGGDGSSGSSMAALKYTPKNILKKTLSRFEFTHENSSSSEEIYELKTKQQPPYKYDDQLSLTSSTSSTSGSGSGQVKFGGARISDGINGGSLPDRFSLFHSESEETIHAPDIPSLVSPGQSVRDLFRNGEETWWLDCTCPTDSEMKMLAKAFGIHPLTAEDIRMQETREKVELFKSYYFVCFHTFEADKESEDYLEPINVYIVVFHDGILTFHFSPISHPANVRRRVRQLRDYVDVSADWLCYALIDEITDGFAPVIHGIEYEADAIEDAVFTARDTDFSSMLQRIGESRRKVMTLMRLLSGKADVIKMFAKRCQEEANSSSGYYQRQYNLQQQQQQQAPPPPPPNPIITSPINSTLNLNSLGTSTGGGVGVGGINFGPNPTGNNTNTNTNTTGSPSPPQQQQHGITNKSFPIPDARPRADIALYLGDIQDHIITMFQNLLAYEKIFSRSHSNYLAQLQVESFNSNNKITEMFSKITLIGTMLVPLNLVTGLFGMNVRVPGEGGKNLGWFFGIVGVLIFIIIGSFIFAQWWLKKLNNSIEGQNNGNRPIFNHSSRRSIRSLGLKKHGGNKSIISFPNKYE

SEQ ID NO: 92522 - DNA, 2271 bp, Aspergillus oryzae
  CDS (1)..(2271)
atgtctgaatcacccaagtcagaaaagtacatgtttttaagcaggttcagcacgccagtgcctgaactggatgaccatcggtttcaattggatccacctcgtatcgaagctacccccgatatgacgcttagtcggcagaataccacaccgcagaatctgaatatggagacgccacagcgttcagatctgctccaagttcagcaagttcaggatgctcttcgagaagcggggccattctctcgggactttgagcaagcaatagcagacgatgatcgatcagttaaggatgtcaatggtttaggacgacgcttctcccttgatccaaccggaaatattcgtcagggtcgtgcctttagccgtacgcatcaggatatcgcaaatatgtcgagggattcgtcggtttcagctagatcaacatctccgcccaattcagtcgaagcttttgcagacccacggcgccgggagcgtgccaacactctggagagtcatgcagcgccagacttggaagctatcctacagcgtacggtgtctggtggcacacatcctcgccgcccaaccttcagtaatgcaagtgccattagacctcaaccaggtgatatccaattagattcgcctgaggatacatgtgcccccccctttgaacaattgggcagaattccggtgattgactatgaagagttggaggagtttgtggctcttaatcagaagacgaagcctatcacaacgcggcgcaagcacagccttagctcacagagcaagaagtctcgtgttttctacgatcttcgtccgaacgcccagaagtccgaagcccatgaagcgaagcgctcatcgagtgttgagcgctcatcagatgacattattggactcgacttgaaagacagcgagaaagtcttcgcggatgctgtcaacgaaaaacaattagttgaaaatctcagaaatgagaatgagccgactcggttcggcttcttctcgtccgagtcacagagtactgtacatgctgcggaactgggcgacttagttttccctggggacacctttcgagacctcttccaacttggcccggaaggaggcgtttggtggctcgatgttttgaatcccactgaagccgaagttggtgctctttcgagagccttctcaattcacccactgacgacagaagatattttaacccaggaagctcgagagaaagttgagctattcaagcaatactattttgtgtgcttccggactttttaccagatagacaagacaagcgagcgcttcatggagcccgtcaacttttacatgatcgttttccgcgatggtgtgttatcgttctcttttaccgagaatccccatgcttcgaatgtccggagaagaatcggaaagctccgtgactatgtgtcacttagtagtgactggatttgctatgccatgattgacgacattgtggatagttttggccctgtaatccgcgaaattgaggtcgagtccgaggcgattgaagatctcgtcttcatcgcacgtatggatgattttgagtcattcttgccacgaattggtggcttgcgcaaaaaggtcatgagcttgatgcgcctcttgggcggtaaggcggatgttattcgaggtttctctaaacgttgcaacgaacagtactcagtaacaccgcgtggtgacattggcctttacctgggagatattcaagatcatgtagtgaccatgatgtctaacctggctcattttgagaagatgctcagcagatcacacaccaactatcttgcgcagctgaacgtcacaaacctagttttgggcaaccacgtcaacaagatcctcagcaaggtgactctcattgccaccatgttagttcctatgaaccttatctgtggtctattcggccatgccgcagatctcacttctctggcccctgaaatccatagtaacttgactattaatgacggtgactcacatttctccttcccattggggtcttacaatggtctagtgattgaagacgatgtggatgacgctggagatttgcgaggtctagatattgtccgcagggctcctactggggtctcatccctaggcaataatcaatatcaaaagggcgaagttaaattaggcgaaacccagtggtggtacttctcaaagaactctgtaaaagacaagaataccaataagacatccgagggaccaactagcgaccaatcgaagccttcgcgcacgatccggctttcctgtactttgtggattcggacacgcacagtgcgctcttcaccacgggcaacctaa

SEQ ID NO: 92523 - protein, 756 aa, Aspergillus oryzae
MSESPKSEKYMFLSRFSTPVPELDDHRFQLDPPRIEATPDMTLSRQNTTPQNLNMETPQRSDLLQVQQVQDALREAGPFSRDFEQAIADDDRSVKDVNGLGRRFSLDPTGNIRQGRAFSRTHQDIANMSRDSSVSARSTSPPNSVEAFADPRRRERANTLESHAAPDLEAILQRTVSGGTHPRRPTFSNASAIRPQPGDIQLDSPEDTCAPPFEQLGRIPVIDYEELEEFVALNQKTKPITTRRKHSLSSQSKKSRVFYDLRPNAQKSEAHEAKRSSSVERSSDDIIGLDLKDSEKVFADAVNEKQLVENLRNENEPTRFGFFSSESQSTVHAAELGDLVFPGDTFRDLFQLGPEGGVWWLDVLNPTEAEVGALSRAFSIHPLTTEDILTQEAREKVELFKQYYFVCFRTFYQIDKTSERFMEPVNFYMIVFRDGVLSFSFTENPHASNVRRRIGKLRDYVSLSSDWICYAMIDDIVDSFGPVIREIEVESEAIEDLVFIARMDDFESFLPRIGGLRKKVMSLMRLLGGKADVIRGFSKRCNEQYSVTPRGDIGLYLGDIQDHVVTMMSNLAHFEKMLSRSHTNYLAQLNVTNLVLGNHVNKILSKVTLIATMLVPMNLICGLFGHAADLTSLAPEIHSNLTINDGDSHFSFPLGSYNGLVIEDDVDDAGDLRGLDIVRRAPTGVSSLGNNQYQKGEVKLGETQWWYFSKNSVKDKNTNKTSEGPTSDQSKPSRTIRLSCTLWIRTRTVRSSPRAT

SEQ ID NO: 92524 - DNA, 2577 bp, Saccharomyces cerevisiae
  CDS (1)..(2577)
atgtcgtccttatccacttcatttgattcatcgtcagatttaccaaggtcaaaatccgttgacaatacggcggcttccatgaagacaggcaagtacccaaaattagagaactataggcagtattctgatgcacaaccaatacgtcacgaagcgcttgcattgaaagtggacgaaacgaaagattctagacacaaatttagttcctctaacggggagaatagtggagtggaaaatggaggctatgtggagaaaacgaatatatccacaagtggccgcatggattttgaaggtgaagcagaagcagaagcagtgaaacgttaccagttaagatctttcgcgcttttaagttctaatgcgaggccatccaggctagcaaagtctgaaactcaccaaaagcagattcatgtagagagcatcgctccctctttgccaaagaatgcggctttagagagaggccatgatacggcgttacctgccggtacgtcaagtaacagatgcaacttagaagcctcctcctcggcaagaacttttacaagcgctcgtaaggcttcgctagttagcgcaatctttgaaacatcggctgaatcagagcatggtacgcatcccaaacaggcgaaacttaagagaagaacctattctacaatatcgacacattcatcagtcaatcctacaacgttgttgacaagaactgcatcgcaaaagtccgatatgggaaatgacacacgaagaattaaaccgttacgtatggatagcagggtatctttccatagtgagatatcgcaagcatccagggattctcaagaaacagaagaagacgtttgttttccaatgtttcgactattacatacaagagttaatggtgttgattttgatgagttggaagaatatgcccagatttcaaatgctgaaagaaatctgtctttggcgaaccatcaaaggcacagtgaacgaacatacaatcataccgaccaagatactggatttactaactctgcttccacttcaggatcctcagcagctctgaaatatacacctgaaatttcacggactcttgaaaaaaattgcagcgttaatgagatgtacgtatctgaaaacaatgaatctgtgagggaagatgataaacctgatctacaccctgacgtaacatttggtagaaataagattgaaggtgaaaaagaaggaaatgattcgagttatagccgggcgtattataccctccaaaatacagaatatcaaattcctagtagattttcgttcttccgctctgaatctgatgaaactgtgcatgctagtgatatcccttctttgatatccgagggacagacgttttatgagttattcaagggaggcgatccaacgtggtggttggattgcagttgtccaactgatgatgaaatgcgttgcatagcaaaaacatttggaatccatcctttgaccgcggaagatatcaggatgcaagaaacgcgtgaaaaggtagagcttttcaaatcctattactttgtctgtttccatacatttgaaaatgataaagaatcggagaattatcttgaacctataaatgtttacatcgttgtttttaggtcaggtgtcttgacttttcattttgacccaatatcacactgtgccaatgtaagaagacgtgtaagacaattacgtgactatgtcagtgtcaattcagattggttatgttatgctttaatcgatgatatcacagatagttttgctccggttattcaatccatcgagtatgaagctgattcgattgatgattcagtgtttatgacccgtgatatggattttgcagccatgttacaaaggattggtgaaagtaggcgtaagacaatgacgctgatgagactcttgagcggtaaagcagatgttatcaaaatgttcgccaaaagatgtcaagatgaaactaatggtattgggccagtgcttaaatctcaaactaacatggtgaacttacaagcggaacaagagaatgtgaaccagaataatagtaataaccaaataagcttatcaaatagctatatgcaaacaacatcacaaccaaggggagatattgctttatacttaggtgatattcaggatcatttgttgacgatgtttcaaaatttattggcgtacgaaaagattttttctagatcacatgcaaactacctggcccaattacaagtggaatcatttaactctaataataaagttacagaaatgttgggtaaagttactatgttaggtacaatgttagttccattaaatgttattactggtctgttcggtatgaatgtaaaagttccaggaagaaatggaagtattgcgtggtggtatggaattttgggggtactgcttttactagctgtcataagctggtttttagctagctattggatcaaaaaaatagacccacctgcaacgctcaacgaagccgcaggtagtggggccaaatcagtcatatctagttttttaccgaaaagagataaaagatttaacgatgattctaaaaatggcaatgcgagagttggcgttcgaaggaaatcaactgtcagtctacccagtagatatagccgttacaattaa

SEQ ID NO: 92525 - protein, 858 aa, Saccharomyces cerevisiae
MSSLSTSFDSSSDLPRSKSVDNTAASMKTGKYPKLENYRQYSDAQPIRHEALALKVDETKDSRHKFSSSNGENSGVENGGYVEKTNISTSGRMDFEGEAEAEAVKRYQLRSFALLSSNARPSRLAKSETHQKQIHVESIAPSLPKNAALERGHDTALPAGTSSNRCNLEASSSARTFTSARKASLVSAIFETSAESEHGTHPKQAKLKRRTYSTISTHSSVNPTTLLTRTASQKSDMGNDTRRIKPLRMDSRVSFHSEISQASRDSQETEEDVCFPMFRLLHTRVNGVDFDELEEYAQISNAERNLSLANHQRHSERTYNHTDQDTGFTNSASTSGSSAALKYTPEISRTLEKNCSVNEMYVSENNESVREDDKPDLHPDVTFGRNKIEGEKEGNDSSYSRAYYTLQNTEYQIPSRFSFFRSESDETVHASDIPSLISEGQTFYELFKGGDPTWWLDCSCPTDDEMRCIAKTFGIHPLTAEDIRMQETREKVELFKSYYFVCFHTFENDKESENYLEPINVYIVVFRSGVLTFHFDPISHCANVRRRVRQLRDYVSVNSDWLCYALIDDITDSFAPVIQSIEYEADSIDDSVFMTRDMDFAAMLQRIGESRRKTMTLMRLLSGKADVIKMFAKRCQDETNGIGPVLKSQTNMVNLQAEQENVNQNNSNNQISLSNSYMQTTSQPRGDIALYLGDIQDHLLTMFQNLLAYEKIFSRSHANYLAQLQVESFNSNNKVTEMLGKVTMLGTMLVPLNVITGLFGMNVKVPGRNGSIAWWYGILGVLLLLAVISWFLASYWIKKIDPPATLNEAAGSGAKSVISSFLPKRDKRFNDDSKNGNARVGVRRKSTVSLPSRYSRYN

SEQ ID NO: 92526 - DNA, 25 bp, Artificial sequence
  primer
atgtcatcatcctcaagttcatcag

SEQ ID NO: 92527 - DNA, 24 bp, Artificial sequence
  primer
tcagtcgtagcggctatatctact

SEQ ID NO: 92528 - protein, 1004 aa, Artificial sequence
  consensus sequence
  Variant (3)..(187): Xaa in position 3 to 187 is any amino acid
  Variant (188)..(260): Xaa in position 188 to 260 is any or no amino acid
  Variant (262)..(263): Xaa in position 262 to 263 is any amino acid
  Variant (265)..(266): Xaa in position 265 to 266 is any amino acid
  Variant (267)..(267): Xaa in position 267 is any or no amino acid
  Variant (269)..(270): Xaa in position 269 to 270 is any amino acid
  Variant (272)..(273): Xaa in position 272 to 273 is any amino acid
  Variant (285)..(288): Xaa in position 285 to 288 is any amino acid
  Variant (289)..(289): Xaa in position 289 is any or no amino acid
  Variant (291)..(291): Xaa in position 291 is any amino acid
  Variant (293)..(294): Xaa in position 293 to 294 is any amino acid
  Variant (301)..(302): Xaa in position 301 to 302 is any amino acid
  Variant (304)..(340): Xaa in position 304 to 340 is any amino acid
  Variant (341)..(365): Xaa in position 341 to 365 is any or no amino acid
  Variant (367)..(368): Xaa in position 367 to 368 is any amino acid
  Variant (375)..(423): Xaa in position 375 to 423 is any amino acid
  Variant (424)..(453): Xaa in position 424 to 453 is any or no amino acid
  Variant (455)..(455): Xaa in position 455 is any amino acid
  Variant (458)..(459): Xaa in position 458 to 459 is any amino acid
  Variant (461)..(461): Xaa in position 461 is any amino acid
  Variant (464)..(465): Xaa in position 464 to 465 is any amino acid
  Variant (468)..(468): Xaa in position 468 is any amino acid
  Variant (471)..(471): Xaa in position 471 is any amino acid
  Variant (473)..(475): Xaa in position 473 to 475 is any amino acid
  Variant (478)..(479): Xaa in position 478 to 479 is any amino acid
  Variant (482)..(485): Xaa in position 482 to 485 is any amino acid
  Variant (488)..(489): Xaa in position 488 to 489 is any amino acid
  Variant (491)..(492): Xaa in position 491 to 492 is any amino acid
  Variant (493)..(494): Xaa in position 493 to 494 is any or no amino acid
  Variant (501)..(502): Xaa in position 501 to 502 is any amino acid
  Variant (506)..(506): Xaa in position 506 is any amino acid
  Variant (509)..(512): Xaa in position 509 to 512 is any amino acid
  Variant (514)..(514): Xaa in position 514 is any amino acid
  Variant (522)..(522): Xaa in position 522 is any amino acid
  Variant (539)..(539): Xaa in position 539 is any amino acid
  Variant (550)..(550): Xaa in position 550 is any amino acid
  Variant (551)..(551): Xaa in position 551 is any or no amino acid
  Variant (553)..(553): Xaa in position 553 is any amino acid
  Variant (557)..(558): Xaa in position 557 to 558 is any amino acid
  Variant (564)..(564): Xaa in position 564 is any amino acid
  Variant (566)..(566): Xaa in position 566 is any amino acid
  Variant (570)..(571): Xaa in position 570 to 571 is any amino acid
  Variant (573)..(573): Xaa in position 573 is any amino acid
  Variant (575)..(575): Xaa in position 575 is any amino acid
  Variant (579)..(579): Xaa in position 579 is any amino acid
  Variant (582)..(582): Xaa in position 582 is any amino acid
  Variant (584)..(584): Xaa in position 584 is any amino acid
  Variant (599)..(599): Xaa in position 599 is any amino acid
  Variant (601)..(602): Xaa in position 601 to 602 is any amino acid
  Variant (605)..(605): Xaa in position 605 is any amino acid
  Variant (612)..(612): Xaa in position 612 is any amino acid
  Variant (616)..(616): Xaa in position 616 is any amino acid
  Variant (622)..(623): Xaa in position 622 to 623 is any amino acid
  Variant (626)..(626): Xaa in position 626 is any amino acid
  Variant (630)..(630): Xaa in position 630 is any amino acid
  Variant (634)..(634): Xaa in position 634 is any amino acid
  Variant (637)..(638): Xaa in position 637 to 638 is any amino acid
  Variant (640)..(642): Xaa in position 640 to 642 is any amino acid
  Variant (644)..(645): Xaa in position 644 to 645 is any amino acid
  Variant (653)..(653): Xaa in position 653 is any amino acid
  Variant (657)..(657): Xaa in position 657 is any amino acid
  Variant (680)..(685): Xaa in position 680 to 685 is any amino acid
  Variant (686)..(734): Xaa in position 686 to 734 is any or no amino acid
  Variant (736)..(756): Xaa in position 736 to 756 is any amino acid
  Variant (757)..(805): Xaa in position 757 to 805 is any or no amino acid
  Variant (808)..(808): Xaa in position 808 is any amino acid
  Variant (821)..(822): Xaa in position 821 to 822 is any amino acid
  Variant (825)..(825): Xaa in position 825 is any amino acid
  Variant (829)..(830): Xaa in position 829 to 830 is any amino acid
  Variant (840)..(840): Xaa in position 840 is any amino acid
  Variant (857)..(857): Xaa in position 857 is any amino acid
  Variant (859)..(859): Xaa in position 859 is any amino acid
  Variant (861)..(862): Xaa in position 861 to 862 is any amino acid
  Variant (864)..(864): Xaa in position 864 is any amino acid
  Variant (866)..(866): Xaa in position 866 is any amino acid
  Variant (870)..(870): Xaa in position 870 is any amino acid
  Variant (876)..(877): Xaa in position 876 to 877 is any amino acid
  Variant (883)..(889): Xaa in position 883 to 889 is any amino acid
  Variant (893)..(893): Xaa in position 893 is any amino acid
  Variant (897)..(902): Xaa in position 897 to 902 is any amino acid
  Variant (903)..(905): Xaa in position 903 to 905 is any or no amino acid
  Variant (907)..(908): Xaa in position 907 to 908 is any amino acid
  Variant (911)..(911): Xaa in position 911 is any amino acid
  Variant (913)..(927): Xaa in position 913 to 927 is any amino acid
  Variant (929)..(960): Xaa in position 929 to 960 is any amino acid
  Variant (961)..(991): Xaa in position 961 to 991 is any or no amino acid
  Variant (993)..(994): Xaa in position 993 to 994 is any amino acid
  Variant (996)..(999): Xaa in position 996 to 999 is any amino acid
  Variant (1000)..(1003): Xaa in position 1000 to 1003 is any or no amino acid
MSXXXXXXXXXXXXXXXXXXXXXXXXXXXXXXXXXXXXXXXXXXXXXXXXXXXXXXXXXXXXXXXXXXXXXXXXXXXXXXXXXXXXXXXXXXXXXXXXXXXXXXXXXXXXXXXXXXXXXXXXXXXXXXXXXXXXXXXXXXXXXXXXXXXXXXXXXXXXXXXXXXXXXXXXXXXXXXXXXXXXXXXXXXXXXXXXXXXXXXXXXXXXXXXXXXXXXXXXXXXXXXXXXXXXXXXXXXXXXXXXXXXXXXXXXXXXXXXXXXSXXSXXXSXXSXXSQETEEDVCFPXXXXXHXRXXGIDFDEXXEXXXXXXXXXXXXXXXXXXXXXXXXXXXXXXXXXXXXXXXXXXXXXXXXXXXXXXXXXXXXXXSXXALKYTPXXXXXXXXXXXXXXXXXXXXXXXXXXXXXXXXXXXXXXXXXXXXXXXXXXXXXXXXXXXXXXXXXXXXXXXXXXXXXXXPXRFXXFXSEXXETXHAXDXXXLVXXGQXXXXLFXXGXXXXTWWLDCXXPTDXEMXXXXKXFGIHPLTXEDIRMQETREKVELFKXYYFVCFHTFEXXDXESEXXLEPINXYXVVFXXGXLXFHFXPIXHXANVRRRVRQLRDYVXVXXDWXCYALIDXITDXFAPVIXXIEXEADXIEDXVFXXRXXXFXXMLQRIGEXRRKXMTLMRLLSGKADVIKMFAKRCQXXXXXXXXXXXXXXXXXXXXXXXXXXXXXXXXXXXXXXXXXXXXXXXXXXXXXXXNXXXXXXXXXXXXXXXXXXXXXXXXXXXXXXXXXXXXXXXXXXXXXXXXXXXXXXXXXXXXXXXXXXXXXXPRXDIALYLGDIQDHXXTMXQNLXXYEKIFSRSHXNYLAQLQVESFNSNNKXTXMXXKXTXIGTXLVPLNXXTGLFGXXXXXXXMNVXVPGXXXXXXXXXWXXGIXGXXXXXXXXXXXXXXXWXXXXXXXXXXXXXXXXXXXXXXXXXXXXXXXXXXXXXXXXXXXXXXXXXXXXXXXXXXXXXXXSXXSXXXXXXXXY

SEQ ID NO: 92529 - protein, 57 aa, Artificial sequence
  protein pattern
  Variant (7)..(7): Xaa in position 7 is Ser, Thr or Val
  Variant (8)..(8): Xaa in position 8 is any amino acid
  Variant (12)..(12): Xaa in position 12 is Ala, Asp, Glu or Ser
  Variant (15)..(15): Xaa in position 15 is Lys or Arg
  Variant (16)..(16): Xaa in position 16 is any amino acid
  Variant (17)..(17): Xaa in position 17 is Ile, Leu or Val
  Variant (18)..(18): Xaa in position 18 is Ala or Thr
  Variant (20)..(20): Xaa in position 20 is Ala or Thr
  Variant (28)..(28): Xaa in position 28 is Ala or Ser
  Variant (44)..(44): Xaa in position 44 is Lys or Arg
  Variant (45)..(45): Xaa in position 45 is Asn or Ser
  Variant (49)..(49): Xaa in position 49 is Ile or Val
  Variant (56)..(56): Xaa in position 56 is Ala, Gly or Asn
TWWLDCXXPTDXEMXXXXKXFGIHPLTXEDIRMQETREKVELFXXYYFXCFHTFEXD

SEQ ID NO: 92530 - protein, 59 aa, Artificial sequence
  protein pattern
  Variant (2)..(3): Xaa in position 2 to 3 is any amino acid
  Variant (5)..(5): Xaa in position 5 is Ile, Met or Val
  Variant (8)..(9): Xaa in position 8 to 9 is any amino acid
  Variant (10)..(10): Xaa in position 10 is Asp, Glu, Asn or Ser
  Variant (12)..(12): Xaa in position 12 is Ile or Val
  Variant (14)..(14): Xaa in position 14 is Ser or Thr
  Variant (18)..(18): Xaa in position 18 is Asp, Gly, Asn or Ser
  Variant (21)..(21): Xaa in position 21 is any amino acid
  Variant (23)..(23): Xaa in position 23 is Cys or Pro
  Variant (38)..(38): Xaa in position 38 is Asp, Gly, Asn or Ser
  Variant (40)..(40): Xaa in position 40 is Asn or Ser
  Variant (41)..(41): Xaa in position 41 is Ala or Ser
  Variant (44)..(44): Xaa in position 44 is Ile or Leu
  Variant (49)..(49): Xaa in position 49 is Ile or Val
  Variant (51)..(51): Xaa in position 51 is Asp or Glu
  Variant (55)..(55): Xaa in position 55 is Gly or Ser
IXXYXVVXXXGXLXFHFXPIXHXANVRRRVRQLRDYVXVXXDWXCYALXDXITDXFAPV

SEQ ID NO: 92531 - protein, 62 aa, Artificial sequence
  protein pattern
  Variant (3)..(3): Xaa in position 3 is Ala or Gly
  Variant (7)..(8): Xaa in position 7 to 8 is any or no amino acid
  Variant (10)..(11): Xaa in position 10 to 11 is any or no amino acid
  Variant (18)..(19): Xaa in position 18 to 19 is Ile, Leu or Val
  Variant (22)..(22): Xaa in position 22 is Phe or Tyr
  Variant (26)..(26): Xaa in position 26 is any amino acid
  Variant (27)..(27): Xaa in position 27 is Ala or Ser
  Variant (37)..(37): Xaa in position 37 is Ala, Ser or Thr
  Variant (52)..(52): Xaa in position 52 is any amino acid
  Variant (54)..(54): Xaa in position 54 is Ile or Val
  Variant (56)..(56): Xaa in position 56 is Ala or Glu
  Variant (58)..(58): Xaa in position 58 is Phe or Leu
  Variant (59)..(59): Xaa in position 59 is Gly or Ser
  Variant (60)..(60): Xaa in position 60 is any amino acid
  Variant (61)..(61): Xaa in position 61 is Ile or Val
PRXDIAXXLXXGDIQDHXXTMXQNLXXYEKIFSRSHXNYLAQLQVESFNSNXKXTXMXXXXT

SEQ ID NO: 92532 - protein, 60 aa, Artificial sequence
  protein pattern
  Variant (2)..(4): Xaa in position 2 to 4 is any amino acid
  Variant (6)..(6): Xaa in position 6 is any amino acid
  Variant (10)..(10): Xaa in position 10 is Ala or Ser
  Variant (12)..(12): Xaa in position 12 is Asp or Glu
  Variant (14)..(14): Xaa in position 14 is Ala or Ser
  Variant (17)..(17): Xaa in position 17 is any amino acid
  Variant (18)..(18): Xaa in position 18 is Ala or Thr
  Variant (20)..(20): Xaa in position 20 is Asp or Gln
  Variant (21)..(21): Xaa in position 21 is any amino acid
  Variant (22)..(22): Xaa in position 22 is Asp, Gly or Asn
  Variant (24)..(24): Xaa in position 24 is Ala or Ser
  Variant (25)..(25): Xaa in position 25 is Ala, Ser, Thr or Val
  Variant (27)..(27): Xaa in position 27 is Ile or Leu
  Variant (33)..(33): Xaa in position 33 is Gly or Ser
  Variant (37)..(37): Xaa in position 37 is Thr or Val
  Variant (60)..(60): Xaa in position 60 is Asp or Glu
IXXXEXEADXIXDXVFXXRXXXFXXMXQRIGEXRRKXMTLMRLLSGKADVIKMFAKRCQX

SEQ ID NO: 92533 - protein, 23 aa, Artificial sequence
  protein pattern
  Variant (3)..(3): Xaa in position 3 is Met or Val
  Variant (4)..(4): Xaa in position 4 is Phe or Leu
  Variant (5)..(5): Xaa in position 5 is Phe or Val
  Variant (9)..(9): Xaa in position 9 is Leu or Val
  Variant (10)..(10): Xaa in position 10 is Ile or Val
  Variant (19)..(19): Xaa in position 19 is any amino acid
  Variant (23)..(23): Xaa in position 23 is Glu, Gln or Arg
GTXXXPLNXXTGLFGMNVXVPGX

SEQ ID NO: 92534 - protein, 26 aa, Artificial sequence
  protein pattern
  Variant (2)..(3): Xaa in position 2 to 3 is any or no amino acid
  Variant (5)..(5): Xaa in position 5 is any amino acid
  Variant (8)..(8): Xaa in position 8 is any amino acid
  Variant (9)..(9): Xaa in position 9 is Asp, Glu or Gln
  Variant (10)..(10): Xaa in position 10 is Glu or Ser
  Variant (12)..(12): Xaa in position 12 is Ile or Val
  Variant (15)..(15): Xaa in position 15 is Ala, Pro, Ser or Thr
  Variant (16)..(16): Xaa in position 16 is Asp or Glu
  Variant (17)..(17): Xaa in position 17 is Ile or Leu
  Variant (18)..(18): Xaa in position 18 is Ala, Gly or Pro
  Variant (19)..(19): Xaa in position 19 is Asp, Asn or Ser
  Variant (21)..(21): Xaa in position 21 is Ile or Val
  Variant (22)..(22): Xaa in position 22 is any amino acid
  Variant (23)..(23): Xaa in position 23 is Glu or Pro
  Variant (25)..(25): Xaa in position 25 is Asp or Gln
  Variant (26)..(26): Xaa in position 26 is Ser or Thr
FXXFXSEXXXTXHAXXXXXLXXXGXX

SEQ ID NO: 92535 - protein, 21 aa, Artificial sequence
  protein pattern
  Variant (2)..(2): Xaa in position 2 is Asp, Glu or His
  Variant (3)..(3): Xaa in position 3 is any amino acid
  Variant (5)..(5): Xaa in position 5 is any amino acid
  Variant (6)..(6): Xaa in position 6 is any or no amino acid
  Variant (8)..(9): Xaa in position 8 to 9 is any or no amino acid
  Variant (21)..(21): Xaa in position 21 is Ile or Met
SXXSXXSXXSQETEEDVCFPX

SEQ ID NO: 92536 - protein, 21 aa, Artificial sequence
  protein pattern
  Variant (2)..(2): Xaa in position 2 is any amino acid
  Variant (4)..(4): Xaa in position 4 is Ile or Val
  Variant (5)..(5): Xaa in position 5 is any amino acid
  Variant (7)..(7): Xaa in position 7 is Ile or Val
  Variant (12)..(12): Xaa in position 12 is Ile or Leu
  Variant (13)..(13): Xaa in position 13 is Asp or Glu
  Variant (15)..(15): Xaa in position 15 is Phe or Tyr
  Variant (16)..(20): Xaa in position 16 to 20 is any amino acid
  Variant (21)..(21): Xaa in position 21 is Ala or Glu
HXRXXGXDFDEXXEXXXXXXX

SEQ ID NO: 92537 - protein, 20 aa, Artificial sequence
  protein pattern
  Variant (2)..(2): Xaa in position 2 is any amino acid
  Variant (3)..(3): Xaa in position 3 is any or no amino acid
  Variant (6)..(6): Xaa in position 6 is Leu or Val
  Variant (8)..(8): Xaa in position 8 is Phe or Val
  Variant (9)..(9): Xaa in position 9 is Ile, Leu or Met
  Variant (10)..(11): Xaa in position 10 to 11 is any amino acid
  Variant (12)..(12): Xaa in position 12 is Phe, Ile or Leu
  Variant (13)..(14): Xaa in position 13 to 14 is Ala, Ile or Val
  Variant (15)..(17): Xaa in position 15 to 17 is any amino acid
  Variant (18)..(18): Xaa in position 18 is Phe, Ile or Val
  Variant (19)..(19): Xaa in position 19 is any amino acid
  Variant (20)..(20): Xaa in position 20 is Ala or Ser
WXXGIXGXXXXXXXXXXXXX

SEQ ID NO: 92538 - protein, 9 aa, Artificial sequence
  protein pattern
  Variant (2)..(2): Xaa in position 2 is any amino acid
  Variant (3)..(3): Xaa in position 3 is Ala or Asn
SXXALKYTP

SEQ ID NO: 92539 - protein, 7 aa, Artificial sequence
  protein pattern
  Variant (4)..(4): Xaa in position 4 is Asp or Asn
  Variant (5)..(5): Xaa in position 5 is Phe or Tyr
ESEXXLE

SEQ ID NO: 92540 - DNA, 1338 bp, Saccharomyces cerevisiae
  CDS (1)..(1338)
atgtcccatgacggaaaagaagaacctggtattgccaaaaagataaactcagtagatgatattattatcaaatgtcaatgctgggtccaaaaaaatgatgaagaacgattagctgaaattttatccataaacacaagaaaagcaccaccaaaattctatgttcactatgttaattacaacaagcgtttagatgagtggattaccactgacagaataaacctggataaagaagtactatatccgaaactaaaggctactgatgaagataataagaaacaaaaaaagaagaaggcaacaaatactagtgaaacgccacaagactctctgcaagatggtgtagatggtttctcaagagaaaatacggatgttatggacttagataatctaaatgtacagggaataaaagatgagaacatatcacacgaggatgagataaaaaagcttagaacctccggctctatgacacaaaatccacatgaggtggctcgagttagaaatctcaatcgaatcattatggggaaatatgaaatagaaccatggtacttttctccatatcctattgaattaactgatgaagattttatatatatcgacgatttcacgttgcagtattttggatctaagaaacaatacgaacgctacaggaagaaatgtacattaagacatccgccaggaaatgaaatctacagagacgattatgtttcattctttgaaatcgatggtagaaagcaaaggacttggtgtcgaaacttgtgtttactttccaaacttttcctagatcacaaaacattatactatgacgttgatccgtttttgttttattgcatgacgagacgagatgagttgggtcaccatctggtgggatatttttccaaggaaaaagaatccgcggatggttacaatgttgcatgtatcttaacactaccacaataccaaaggatgggatatggtaagttattgattgaattttcgtatgaattgtcgaaaaaggaaaacaaagttggttctcccgagaaacctttgtctgatttgggtctcttatcctatagagcctattggtcggacactctcataacgctattagtggaacaccagaaggaaattactatagacgaaataagctccatgacttcgatgaccactacagatatattacacacagcaaagacactgaatatcctgcgatattacaagggtcagcatattattttcctgaatgaagatattttagataggtacaatcgacttaaagccaaaaagagaaggacaatagaccctaatagactcatatggaaaccaccggtatttactgcctctcagttacgctttgcctggtaa

SEQ ID NO: 92541 - protein, 445 aa, Saccharomyces cerevisiae
MSHDGKEEPGIAKKINSVDDIIIKCQCWVQKNDEERLAEILSINTRKAPPKFYVHYVNYNKRLDEWITTDRINLDKEVLYPKLKATDEDNKKQKKKKATNTSETPQDSLQDGVDGFSRENTDVMDLDNLNVQGIKDENISHEDEIKKLRTSGSMTQNPHEVARVRNLNRIIMGKYEIEPWYFSPYPIELTDEDFIYIDDFTLQYFGSKKQYERYRKKCTLRHPPGNEIYRDDYVSFFEIDGRKQRTWCRNLCLLSKLFLDHKTLYYDVDPFLFYCMTRRDELGHHLVGYFSKEKESADGYNVACILTLPQYQRMGYGKLLIEFSYELSKKENKVGSPEKPLSDLGLLSYRAYWSDTLITLLVEHQKEITIDEISSMTSMTTTDILHTAKTLNILRYYKGQHIIFLNEDILDRYNRLKAKKRRTIDPNRLIWKPPVFTASQLRFAW

SEQ ID NO: 92542 - DNA, 1539 bp, Ciona intestinalis
  CDS (1)..(1539)
atgaaaactcgcggcaaatccgacaattcaaacgcggggtccgattcaaaaagcagggatataaacgaggaggtgaaaacgaaaacaaaatgtgtcacgccgaagaaatcgaatcctctcgggatgacagagcatgagatgttgttggcgctcgatgaaactggtgggaggctacgtaaacggaagttcgctcagtcgtaccacgtcgatatgaaacaatgtccggtgtcagggtgcgactcacgaggacacctaatgggaagatttgagcgtcattttacgcttgctgcttgccccatatatcacaacctgaccccggaaagatgtagagcaaaccatgaagccaacgaaaggttgaggaaggatcaagcagaggatgctgggagggatcaagtcatcgttcatcacaacacaaggaaccaaacagaagtagaagcaactccaagccaagctaagtatcggaagagagtccagagaagcagggagcaacattcatcctctgagcatcggaagagcgatccagagcatcaagcagagcatggagtgaaggaacctcttcttaaccacgtcgcttccgaatacgacctcaacttgttccggcaggcacaagcactggcatccgaagggttggagcacgaactggaacgtttgcatgaatcgggtttgttgtcgcaagatggttcgaacccggatcgaagaatcaaagttattgagatcggtcgttacgagatggatacttggtattcctcgccctaccctgaagaatatgttcaacttcctaagttgtatatttgtgaattctgcttgaaatatatgaagagttcaaccattctgagaaggcatatggctaagtgtgtatggagacatcccccaggggacgagatttatagaaaaggaacgatttctgtgtttgaggttgacggtaagaagaataagatatacagccagaacttatgcctgctggcaaagttatttcttgaccataaaacactttattatgacgtcgaaccgtttctattctatgtgatgacggaggctgatttgacgggctgtcacatggtgggttatttctcaaaggagaaaaattctttcctgaattacaacgtgtcgtgtattttaaccatgccacaacacatgaggaaagggtatggaaagatgatgatagacttcagttatttactctcaagaaaagaaggaaaaactggatctccagaacgaccgttgtcggaccttggacttctgtcttatagaagttattggacagatattattattagttatttatcaaagctggatgcggctgctgacttggtgattcgagatatcagccaagaaaccgcagtccaccccgctgacatagtaagcactttacaagccctgcagatgcttaagtattggaagggaaaacatattatattaaagaagcaggatattattgaagattggttgagaaaacaaacaaagaagccggccgagttttcgtctcgtgcgattgattcaaaatgtttgaaatggtctcctacacgccagaaagaataa

SEQ ID NO: 92543 - protein, 512 aa, Ciona intestinalis
MKTRGKSDNSNAGSDSKSRDINEEVKTKTKCVTPKKSNPLGMTEHEMLLALDETGGRLRKRKFAQSYHVDMKQCPVSGCDSRGHLMGRFERHFTLAACPIYHNLTPERCRANHEANERLRKDQAEDAGRDQVIVHHNTRNQTEVEATPSQAKYRKRVQRSREQHSSSEHRKSDPEHQAEHGVKEPLLNHVASEYDLNLFRQAQALASEGLEHELERLHESGLLSQDGSNPDRRIKVIEIGRYEMDTWYSSPYPEEYVQLPKLYICEFCLKYMKSSTILRRHMAKCVWRHPPGDEIYRKGTISVFEVDGKKNKIYSQNLCLLAKLFLDHKTLYYDVEPFLFYVMTEADLTGCHMVGYFSKEKNSFLNYNVSCILTMPQHMRKGYGKMMIDFSYLLSRKEGKTGSPERPLSDLGLLSYRSYWTDIIISYLSKLDAAADLVIRDISQETAVHPADIVSTLQALQMLKYWKGKHIILKKQDIIEDWLRKQTKKPAEFSSRAIDSKCLKWSPTRQKE

SEQ ID NO: 92544 - DNA, 1329 bp, Bombyx mori
  CDS (1)..(1329)
atggcaaaaggtgataaagaattagagaagccaatagtgaataatgagttgcctaatcctgagtgtagaagtactgataatgaagactccgagtcggtcccagaacagcctttggacataggagaacattatttagtgcggcgatcggatgagtcatggcacccggctgagattatacagtcgcgatacagtacagcggaatcttgttacgaatattatgtccattatgtcggatatgatagaagactcgacgaatgggtgtcccgccaccgggttatgtcagataggttcgacgtatgcgagcagtcgaacaataacataaactgcgaccacctgctcacggacaaatccggccggaaaataacaaggaatcaaaaacgtaaacatgacgaaataaaccatgtgcagaaaacttacgccgaaatggatccaacgaccgccgcgcttgaaaaggaacatgaagctattactaaagttaaatacatagacaggatacaaattggaaaatatgaaatcgatacttggtattttagtccgtatcctgatgaatatggtaaacaatcaaaattgtggttatgtgaatactgtttgaagtatatgagaatggaaaaaacataccggtaccatctcagtgaatgcacagcacgccaaccccagggtaacgaaatatacagaaaaggtacaatagctatttttgaagcagatggcaaagaacataaaatatattgtcagaatttgtgtttattagccaaattatttttagatcacaaaaccctttattttgatatagaacagtttttattttatatattgtgtgaagttgacaagcaaggagctcaccttgtaggatatttttcaaaagaaaaggattcacctgaaggcaataatgtggcatgtatattgactctacctccatatcagagacaggggtatggtaaactcctgatagcttttagttatgaactctcaaggctcgaacaagttgttggaagtccagagaagcctttatcagatttaggcaagttaagttacagatcgtactggtcatatgttttattagaagtgttaagtgctagtagaggtacattaagtatcaaggatttaagtcagatgacaggaatatcacaaacggacatcatttcaactttacagtcaatgaacatggtgaagtactggaaaggacagcatgttatttgtgttacacctaaaatagttgctgaacaattagcaagcccgcactttaaaaaaccacggttgtcaatagatccttcagcactgagatggacgccccctagtaaacaggggaactctgccaaagccaaaaagtag

SEQ ID NO: 92545 - protein, 442 aa, Bombyx mori
MAKGDKELEKPIVNNELPNPECRSTDNEDSESVPEQPLDIGEHYLVRRSDESWHPAEIIQSRYSTAESCYEYYVHYVGYDRRLDEWVSRHRVMSDRFDVCEQSNNNINCDHLLTDKSGRKITRNQKRKHDEINHVQKTYAEMDPTTAALEKEHEAITKVKYIDRIQIGKYEIDTWYFSPYPDEYGKQSKLWLCEYCLKYMRMEKTYRYHLSECTARQPQGNEIYRKGTIAIFEADGKEHKIYCQNLCLLAKLFLDHKTLYFDIEQFLFYILCEVDKQGAHLVGYFSKEKDSPEGNNVACILTLPPYQRQGYGKLLIAFSYELSRLEQVVGSPEKPLSDLGKLSYRSYWSYVLLEVLSASRGTLSIKDLSQMTGISQTDIISTLQSMNMVKYWKGQHVICVTPKIVAEQLASPHFKKPRLSIDPSALRWTPPSKQGNSAKAKK

SEQ ID NO: 92546 - DNA, 1134 bp, Encephalitozoon cuniculi GB-M1
  CDS (1)..(1134)
atgagactcgaggatgtttgtgtgggattcaaagttcccgtcaggaaggccgtagatggaggcgaggaggtattcaaagcagagattctggggaaaagagccggcaagtctggactggagttctatgtacactatgtagaactgaacaggcggctcgatgagtggatcgacggatcgatgatcgacttaggcgaccctgcccagatagaaattccaaagaagaagaagacagaaaagacaaagagtgagaagtcggaaagggtctcagagaaggagggtgagcagagggacgaggagccaaagctagaaaggccgccgcaggacgaggagttcaaaatgaagaatgttaagaagatcatgctccgcaactatcttgtggatgcctggtacttctcaccatacccaaaggcagtagcagagagtgacattgtttatatatgcgaattctgtttgtactacttcagtgcagtggacagcctggttttacatgctaggcagtgcaagctccggcatcctcccggaagggagatatatcgggacggagtcctaagcttctttgagtgtgacgggcatatccagaagaactactgcagaaacctgtcgctactatcaaagctatttctggaccataagtcactctactacgacatagacgtgtttatgttttatgtgctttgcaggctggaggacaacgggtaccagatagtgggatacttctcgaaggagaagatgtctgagcaaggatacaaccttgcatgcatcctgactctcccctttgagcaaaggaaggggtatggaaagattctcatagacttctcctacctgctcagcagaagagaaaacgtggtctccgggccggaaaagcctctgagcgatcttgggcttctcagctatagagcatactggatggaggtgattgtggaatatctttcaaagcacgacaaggcaagcattagcgagatttcccgggaaacctacatatccgaggacgatgtgatagggactctgtgtgcatacaagatgctgaggatggagggaaacgagtttattttcacatacgccgaggaccagctgcacaaggccctgagatccaggagcaggagtgtaaatgccgccctgcttaagctaggctga

SEQ ID NO: 92547 - protein, 377 aa, Encephalitozoon cuniculi GB-M1
MRLEDVCVGFKVPVRKAVDGGEEVFKAEILGKRAGKSGLEFYVHYVELNRRLDEWIDGSMIDLGDPAQIEIPKKKKTEKTKSEKSERVSEKEGEQRDEEPKLERPPQDEEFKMKNVKKIMLRNYLVDAWYFSPYPKAVAESDIVYICEFCLYYFSAVDSLVLHARQCKLRHPPGREIYRDGVLSFFECDGHIQKNYCRNLSLLSKLFLDHKSLYYDIDVFMFYVLCRLEDNGYQIVGYFSKEKMSEQGYNLACILTLPFEQRKGYGKILIDFSYLLSRRENVVSGPEKPLSDLGLLSYRAYWMEVIVEYLSKHDKASISEISRETYISEDDVIGTLCAYKMLRMEGNEFIFTYAEDQLHKALRSRSRSVNAALLKLG

SEQ ID NO: 92548 - DNA, 1266 bp, Drosophila melanogaster
  CDS (1)..(1266)
atggacaaggaaaacagatcaggtgaccatttaaagtatcagccgttgggcgatcaggacgggataagttcgaaattgccggacattccgagagccctgcaattgactaatgccaaggaatcctccgcgactcgcggtttaggccaaagtgcttctaagtccgaaatggggaaatcccagcttcagaacgattcatctcttcaaaaaaacattcaggaaactaaaaccattactggatcgtgcatcgaagctcaaagaataggggctacaccgaagaagcaattggaaggcgtcaaggaacctaatatgatttctttattacacactaatgccagtagcaatgtggatgatcgccagcgccaggagacaatagataatgaaaaaagtgatgtccagaaagagaaagaggacgcgaaagtgaaagtcataagaaacatcgaaaaggtgcaatttgggcgttacgagatcgagaccacgtcttccagtccctatcctgtaataaacgacaaggcgaccaccatttacgtttgtgaattctgcctaaaatacatgtgcttgcggaaaagttactcctaccacctatacgattgcaagaagaggtgtccgccgggcagcttgttataccgaaaagacaatatttatatctacgaggtcgatggccataaggagcagctgtattgccagtgcctctgcctaatgtcaaagctctttctggaaaacaagaaaattctttacagctcgagttcgttcttgttttatatcctgtgtttgaaggacaaggatggcgagcactttgcaggttacttcgccagggagaagactatgctgaatatcaacctgaattgcatccttgttttaccgccctatatgcgcaagggatacggaaagttgttgattgatctgagctacgagatctctcgcagggaggcatgcatcggaggtcccaagaagccgctgtcgaaagttgccagactttgttacctcagctattggggccacatcctcctcaatctgctgaggcaccactcatcaccggacctggtgaccatcgaagagctgagcaaagcgactggcttccgcgaggaggacataataagcactttagaatttatggggatgacgaagtactacaaggttgaccacatcatgttctacactacttcatcgataattgaagatcgccgtgggctcgcacagtttaaaaagccgaggttgaccattcacaggaatcgcctctcctggaagacacccacaggacgaaagtag

SEQ ID NO: 92549 - protein, 421 aa, Drosophila melanogaster
MDKENRSGDHLKYQPLGDQDGISSKLPDIPRALQLTNAKESSATRGLGQSASKSEMGKSQLQNDSSLQKNIQETKTITGSCIEAQRIGATPKKQLEGVKEPNMISLLHTNASSNVDDRQRQETIDNEKSDVQKEKEDAKVKVIRNIEKVQFGRYEIETTSSSPYPVINDKATTIYVCEFCLKYMCLRKSYSYHLYDCKKRCPPGSLLYRKDNIYIYEVDGHKEQLYCQCLCLMSKLFLENKKILYSSSSFLFYILCLKDKDGEHFAGYFAREKTMLNINLNCILVLPPYMRKGYGKLLIDLSYEISRREACIGGPKKPLSKVARLCYLSYWGHILLNLLRHHSSPDLVTIEELSKATGFREEDIISTLEFMGMTKYYKVDHIMFYTTSSIIEDRRGLAQFKKPRLTIHRNRLSWKTPTGRK

SEQ ID NO: 92550 - DNA, 1278 bp, Strongylocentrotus purpuratus
  CDS (1)..(1278)
atggccgagaatgcggacaaaccctcggcgaagggctccacaaaagcacaggaaaacaacatgaattcttcactgaaagacacggattcgaaagagaaggaatcgcctgacggtaacaacgtagcttgcattctcatcttacctccattccagaggaaaggatatggcaaattcctcatcgcattcatcaatcggcgcatggacgagtgggtcgggaaagagaaggtgaacgtccaacagcccccccaggagaggcagaagtccgagaccggagactcgctggacgactcggacagaaagatcaccaggaaccagaagagaaaacacgacgagatcaaccatgttcagaagagctttgcagaaatggatccaacgacagctgcattggaaagagagcatgaagctattaccaaagtcaagtacgtcaacagggttcagataggcaagtacgagatcgatgcttggtacttctcgcctttcccggacgactacggcaagcaagccaagctctggatctgtgaatactgccttaagtacatgagatttgagaagacctttaggaagcacctgggtgattgcttattgaagcagccttcaggtatagagatctacaggagaggctccatctcagtgtacgaagtcaacggaaaagaccacaagctgtactgccaaaacatgtgtctacttgccaagctcttcctggatcacaagacgctctactttgatgtggagccattcctcttctacatcctgacagaggtcgacagacacggcgcccatctcgttggattcttctcaaaggagaaggaatcgcctgacggtaacaacgtagcttgcattctcatcttacctccattccagaggaaaggatatggcaaattcctcatcgcattcagttatgagttgtcgaagttagagaactgtgttgggtcaccagagaaacccctatctgatcttgggaagctgagctatcgcagctactggtcttgggttctcttggagattctgagggacttcaaaggaacattgtccatcagagacctaagccaaatgacgagcatcacgcaacccgacatcatcagcaccctgcaggccctcaatatgataaagtactggaaggggcagcacgtgatctgcgtcacccccaagctggtggaggaacacctcaagagcgcccagtacaagaggcccagactcaccgtggacaccagctgtctccggtggcaggcccccaagaaacccatgctccactcaagaggacagaagatgaagaagtga

SEQ ID NO: 92551 - protein, 425 aa, Strongylocentrotus purpuratus
MAENADKPSAKGSTKAQENNMNSSLKDTDSKEKESPDGNNVACILILPPFQRKGYGKFLIAFINRRMDEWVGKEKVNVQQPPQERQKSETGDSLDDSDRKITRNQKRKHDEINHVQKSFAEMDPTTAALEREHEAITKVKYVNRVQIGKYEIDAWYFSPFPDDYGKQAKLWICEYCLKYMRFEKTFRKHLGDCLLKQPSGIEIYRRGSISVYEVNGKDHKLYCQNMCLLAKLFLDHKTLYFDVEPFLFYILTEVDRHGAHLVGFFSKEKESPDGNNVACILILPPFQRKGYGKFLIAFSYELSKLENCVGSPEKPLSDLGKLSYRSYWSWVLLEILRDFKGTLSIRDLSQMTSITQPDIISTLQALNMIKYWKGQHVICVTPKLVEEHLKSAQYKRPRLTVDTSCLRWQAPKKPMLHSRGQKMKK

SEQ ID NO: 92552 - DNA, 1482 bp, Nasonia vitripennis
  CDS (1)..(1482)
  misc_feature (1254)..(1254): n is a, g, c or t
  misc_feature (1255)..(1255): n is a, g, c or t
atggctgagcaacccgagcctcaccatcaccaccatcttcggggcaaggatcagcctacctcgccgcagcaggctaacagcggcggcgtcaagcaagacagcagcggcgccactaccgggacgagcgccaacaacgcgccgacgacgacgacgaccgcgactactacgactactacgacgacgtcgtcgacgatgcactcgaacggtggaggcaagggctcgggcgacgacgccgacagcctcgaggagttgccgctcgatgtcggcgaacactacctcgtgcgcagatccgcagacggcacctggcatcctgctgaaatcatccaaactcgatttaatgaaatcgaaagcttttatgaatattacgttcactacgaaggctacaatagaagattggatgagtgggtacccagagacagaatcatgtgtagcaggttcgatatgagtgaacgtacttggaagaacggggacaggaaccagagtatggatttgctggctgattcatcggatagaaagattactaggaatcaaaagagaagacacgatgaaattaatcatgtacaaaagacatatgctgaaatggatccaactactgctgcattagaaaaagagcacgaagccatcacaaaagtaaaatacatcgacaagatacaaataggaaagtatgaaatagatacttggtacttcagcccttatccagaagaatatggaaaacaaccaaaactttggatctgtgaatattgccttaaatatatgagattagagaaaacatacagataccacatgagtgaatgcacacatagacaacctcttggaaaagaaatttaccgaaaaggaacgcttagtatttgggaagtcgacggcaaagaacataaaatttactgccagaatctttgtcttctagcaaaattatttttagatcacaagacgctatacttcgatgttgaaccttttcttttttatattttatgtgaagttgacaaacatggagcccatctcgtcggttacttttcaaaggaaaaagaatcgcctgatggtaacaatgttgcatgtattttaacactacctccatttcaaagacaaggatatggcaaacttctaatagcctttagttatgagcttagtagaattgagcaaacggtcggaagtccagaaaaaccgttaagtgatttaggaaagctgtcttatcgaagttactggagttggatacttttagaaattctgagggattttaggggtacattgagtatttanntttacagtcaaatgactagtatatcgcaaaccgacatcatttcaactttgcaaagtatgaacatggttaagtactggaaaggtcaacacgttatatgcgtcacacccaagttagtagatgaacacatcaaaagtagccagtacaagaggccaagactcacagtagacagttcagctctgagatggggtgcgccacctcgaaagaatgtgaagcctggcaagaaataa

SEQ ID NO: 92553 - protein, 493 aa, Nasonia vitripennis
  misc_feature (418)..(418): The Xaa at location 418 stands for Stop, or Tyr.
  misc_feature (419)..(419): The Xaa at location 419 stands for Ile, Leu, Phe, or Val.
MAEQPEPHHHHHLRGKDQPTSPQQANSGGVKQDSSGATTGTSANNAPTTTTTATTTTTTTTSSTMHSNGGGKGSGDDADSLEELPLDVGEHYLVRRSADGTWHPAEIIQTRFNEIESFYEYYVHYEGYNRRLDEWVPRDRIMCSRFDMSERTWKNGDRNQSMDLLADSSDRKITRNQKRRHDEINHVQKTYAEMDPTTAALEKEHEAITKVKYIDKIQIGKYEIDTWYFSPYPEEYGKQPKLWICEYCLKYMRLEKTYRYHMSECTHRQPLGKEIYRKGTLSIWEVDGKEHKIYCQNLCLLAKLFLDHKTLYFDVEPFLFYILCEVDKHGAHLVGYFSKEKESPDGNNVACILTLPPFQRQGYGKLLIAFSYELSRIEQTVGSPEKPLSDLGKLSYRSYWSWILLEILRDFRGTLSIXXYSQMTSISQTDIISTLQSMNMVKYWKGQHVICVTPKLVDEHIKSSQYKRPRLTVDSSALRWGAPPRKNVKPGKK

SEQ ID NO: 92554 - DNA, 1374 bp, Nasonia vitripennis
  CDS (1)..(1374)
atgattgaagaacacgaggaaggggaaacagtatgtgactcggggactgcactggtagaaggatgtcgtttaaaagtgcgaatgagtggcacagacgactggcctgaggcggagatcataagcataaaagacgaaaatggcttgaggaattattacattcactatttagctttcaacaaaaggttagacgaatgggtaaccgaagaatacttagatactcgagaagttacattcccaaaacgagatggatctactgcacccgggactggagcagctactccaaaaaagttaatatctagcagaccacaaagcccgacaattgtaaataatgagctggttaacggatcagcagtgctgcaagcagcattgcaaaagaaaatggccagaaagagaaaagcaaattttctcgaaaatgaagactcccaagatggaacaacacagcaacccacagctggtccacgtccaaccggttcactggtcgcacatcatcacgatgatgtagtcacaagaatgaagaatatagaactcattgaacttggtagacacagaataaaaccatggtacttcagtccataccctcaagaaatggttaatcttaattgtatatacatttgtgaattctgcttgaaatatcgcaagagtcggaagtgtttagaaagacatttagctaaatgcaatctacgtcatccaccaggcaatgagatatatcgaaagggatcaatatcgttctttgaaatagatggaagaaaaaacaagaattatgcccaaaacctttgcttgctggcaaaattatttctcgaccataaaactctgtattatgacacggatccatttttattttatgtgatgacagaatttgacactcgaggatttcacatagtgggttatttttccaaagaaaaggagtcaacagaagattacaatgtagcttgtattcttactatgcctcagtttcagaggaaaggctatggaaaacttttgatcgaattttcttatgaactttcgaaatttgaaggaaaaacgggttctcctgaaaaaccactttcagatttaggattattatcttaccgtagctattggactcacacaatactggacattttgctcaatgtcaaacctgttggcgagaacaatgaaaagccgacaataacgataaatgaaatttgtgaactgacttcaattaaaaaggaagatgtgatctcaactttacaaaaacataacctcatcaactattataagggacaatatatcgttacattaaatagggaaataatcgatcaacacatggcagcaatggaaaaaagaaaaataagaatagatccgaaatgtttgcattggacaccaaaggattggagtattcgggcaaagtggtga

SEQ ID NO: 92555 - protein, 457 aa, Nasonia vitripennis
MIEEHEEGETVCDSGTALVEGCRLKVRMSGTDDWPEAEIISIKDENGLRNYYIHYLAFNKRLDEWVTEEYLDTREVTFPKRDGSTAPGTGAATPKKLISSRPQSPTIVNNELVNGSAVLQAALQKKMARKRKANFLENEDSQDGTTQQPTAGPRPTGSLVAHHHDDVVTRMKNIELIELGRHRIKPWYFSPYPQEMVNLNCIYICEFCLKYRKSRKCLERHLAKCNLRHPPGNEIYRKGSISFFEIDGRKNKNYAQNLCLLAKLFLDHKTLYYDTDPFLFYVMTEFDTRGFHIVGYFSKEKESTEDYNVACILTMPQFQRKGYGKLLIEFSYELSKFEGKTGSPEKPLSDLGLLSYRSYWTHTILDILLNVKPVGENNEKPTITINEICELTSIKKEDVISTLQKHNLINYYKGQYIVTLNREIIDQHMAAMEKRKIRIDPKCLHWTPKDWSIRAKW

SEQ ID NO: 92556 - DNA, 1605 bp, Magnaporthe grisea 70-15
  CDS (1)..(1605)
atgagccctcacgcaacgggagaggccgccgttggctcgggcgagccgcggcagaagagcaaggcgacggccgactcgctcatcgtaggctgcatcgccatggtggagaaggatggacaaccccggcgggccgagattttgagcatcaaggacaccaagagcggccggcagttctactgcaactttgacaacttcaacaagcgtctggacgagtgggttccgctcgcacgcatcgacctcacccatgatgttgagtggcccaatccggacaaggacaagcccaaggagaaggccaccaagaagatcgccggtgccgccgcccagtcaaagaagactgcgcagaccaagagggccgccgccgctgctgctgctgcagcccagaagaggcctgttggaaagcgggagcagtcggtcgtctccgaggctggcgccagccatccatggactgagtttgtcgagtcgcagtcgcagctcaagacaccttcgtcagaaacccccgtcaccgcaaccccagcggacgaggccgatgacaagatggcctcggccatcgctggtctaccaccggccgcggcggccaccccagccagcgtggatgatatggacgtcgacggcgatgacaaaactatcggcggcgtgggggcggacggccgtaagaaggagaggcaaccttctttcagtcgcgaggaggagattgaaaagctgcggacttccgggtccatgacgcaaaatccgaccgagatatcgcgtatccgaaacatatccaaggttcagtttggtcgatacgacctgtttccgtggtacttctcgccatatccagaggctttctcaatggaggactgcatatcgatatgtgagttctgcctgtgctactacggagatgtcaaatctttcacgcgccactgccgcaaatgcacgctccagcatccgccaggcaacgaaatctaccgggacgagtacgtttcgttctttgagattgatgggaggcgccagcggacatggtgccgtaacctatgtctactgtccaaaatgttcctcgaccacaagacactgtattacgacgttgacccctttctcttctatgtcatgacgaccaaggacgacaagggcgaccatttggttggctacttctccaaggagaaggagagtgccgacggatacaacgttgcgtgtattttgacgctacctcaataccagcgcaagggttttggtcggttgttgatccagttttcatacgagctttcaaagatcgaaggcaagctcggttcgcccgagaagccgctttcggatctgggtctgctcagttaccgacaatactggggtgagaacattttggacctgctcatcagcttccacgagcgcgatgagcgctgcagcatcgagtccatcgccgcacagctctccatgaccacgggtgacgtcgagcatactctgcaagctctcaggatgcagatttatcacaaaggagagcacaagatcgtcatacctgaaaagctactgcagcagcgtgagaagtcaaaacagaagcagaagcgcatgatcgatcccagtcgtatccagtggaagccacctgtgttcaatgcttcctctcgcacatggggctggtag

SEQ ID NO: 92557 - protein, 534 aa, Magnaporthe grisea 70-15
MSPHATGEAAVGSGEPRQKSKATADSLIVGCIAMVEKDGQPRRAEILSIKDTKSGRQFYCNFDNFNKRLDEWVPLARIDLTHDVEWPNPDKDKPKEKATKKIAGAAAQSKKTAQTKRAAAAAAAAAQKRPVGKREQSVVSEAGASHPWTEFVESQSQLKTPSSETPVTATPADEADDKMASAIAGLPPAAAATPASVDDMDVDGDDKTIGGVGADGRKKERQPSFSREEEIEKLRTSGSMTQNPTEISRIRNISKVQFGRYDLFPWYFSPYPEAFSMEDCISICEFCLCYYGDVKSFTRHCRKCTLQHPPGNEIYRDEYVSFFEIDGRRQRTWCRNLCLLSKMFLDHKTLYYDVDPFLFYVMTTKDDKGDHLVGYFSKEKESADGYNVACILTLPQYQRKGFGRLLIQFSYELSKIEGKLGSPEKPLSDLGLLSYRQYWGENILDLLISFHERDERCSIESIAAQLSMTTGDVEHTLQALRMQIYHKGEHKIVIPEKLLQQREKSKQKQKRMIDPSRIQWKPPVFNASSRTWGW

SEQ ID NO: 92558 - DNA, 1362 bp, Apis mellifera
  CDS (1)..(1362)
atgatcgaggaacacgacgagcacgaaacaatatgcgactcagtgaattcgctggtggaaggctgccgtttaccagttagaatgcatggaacggatgattggcctcttgctgaaatcatcagtgttaaagaagtacatggtgtcaagtgttattatgttcactatgtagatttcaataaacgattagatgaatgggttacggaagattgtttggacactcgaaaagtccaataccctcgtcgagatggaaccacaccaggaactggtgcagcaacgccaaaaaaacaagtacccagtagaccacctagccctagtagcctttgtaatgaaccagtcaatggttctgcagttttgcaagctgcattacaaaagaaaatgtctagaaagagaaaggccacatttatagaaaacgatgattctcaggatggtccaccgcaaacacctggtccaaggccaactggttcattagtggcgcatcatcatgatgatatagttactagaatgaaaaatgttgaattgatagaattgggtcggcatagaataagaccttggtatttcagtccatatccgcaagaaatggtacatttaccatgtatatacatttgtgaattctgtttgaaatatagaaaaagtcgaaaatgtttagagcgacatttagcaaagtgtaatttaagacatccacctggcaatgaaatatatagaaaagggtcaatatctttttttgaaattgacggtagaaaaaacaaaaattacgcacaaaatctatgtctactagcaaaattatttttggatcataaaacgctatattatgacacagatccatttttattttatataatgacaaattttgatagtagagggtaccatatagttggttacttctcgaaggagaaagaatcgtctgaagatcacaatgtagcttgtattcttacactgccaccgtatcaaagaaggggttatggaaaattattaatagaattttcatatgaattatccaaattcgaaggtaaaacaggttcacctgagaaaccattgtcggatttgggattattatcttatagaagttattgggctcatactatattggacattctattgaatgtaaagccattagtagaaaatgaaaaaccacagatcacgataagtgagatatgcgagctgacatcgattaagaaagaagacgtgatatcgacgcttcaaaatttgaatcttattaattactacaaaggacaatatattgtgacattgaatagggagattatcgagcaacacacagccgcaatggaaaagaggcaaatcagaatagatcctaagtgtcttcattggacaccaaaagactggagtgttagggcaaaatggtga

SEQ ID NO: 92559 - protein, 453 aa, Apis mellifera
MIEEHDEHETICDSVNSLVEGCRLPVRMHGTDDWPLAEIISVKEVHGVKCYYVHYVDFNKRLDEWVTEDCLDTRKVQYPRRDGTTPGTGAATPKKQVPSRPPSPSSLCNEPVNGSAVLQAALQKKMSRKRKATFIENDDSQDGPPQTPGPRPTGSLVAHHHDDIVTRMKNVELIELGRHRIRPWYFSPYPQEMVHLPCIYICEFCLKYRKSRKCLERHLAKCNLRHPPGNEIYRKGSISFFEIDGRKNKNYAQNLCLLAKLFLDHKTLYYDTDPFLFYIMTNFDSRGYHIVGYFSKEKESSEDHNVACILTLPPYQRRGYGKLLIEFSYELSKFEGKTGSPEKPLSDLGLLSYRSYWAHTILDILLNVKPLVENEKPQITISEICELTSIKKEDVISTLQNLNLINYYKGQYIVTLNREIIEQHTAAMEKRQIRIDPKCLHWTPKDWSVRAKW

SEQ ID NO: 92560 - DNA, 1368 bp, Apis mellifera
  CDS (1)..(1368)
atggccgaatcggaacaaaggaacaaagagaattgtattgtaggatcaaaagaaatgatggtgaagcaagaaaagcgtgagaatacgttgacaaatggcgggaaaggatctggggatgacgcggacagtctcgaagaattacctcttgatattggtgaacactatcttgttcgcagatctgatgattcctggcatccagcagaaattattcaaactcgatataatgagagtgaaagccattatgaatattatgttcattatgaaggacataatagaagattggatgaatgggtgcctagggatagaattatgtcaagtagatttgatatgagtgatagaagttggaaaagtggagacagaaattctggtactgatttactggcagattcatcagatcgtaagattacaagaaatcaaaaaagaagacatgacgaaattaatcacattcaaaagacatatgctgaaatggatcctacaactgctgcactagaaaaagaacatgaagcaataacaaaagtcaaatacattgataagattcaaataggaaagtatgaaattgatacttggtactttagtccatatccagaagagtatggcaaacaaccaaaactatggatttgtgaatattgtcttaaatacatgcgtcttgaaaaaacttatagatatcacatgagtgaatgtacacatagacaaccagttggcaaagaaatatatcgcaaaggcacattaagtatttgggaagtggatggtagagagcataaaatttattgtcaaaatttatgcttacttgcaaaattgtttttagatcataaaacactttattttgatgttgaaccatttcttttttatattctttgtgaagttgataaacatggggctcatttagttggttatttttcaaaggagaaagaatcacctgatggtaataatgttgcttgcattttaactttaccgccgtttcaaagacaaggatatggaaaacttttaatcgcttttagttacgaattaagcagaatagaacaaactgttggtagtcctgaaaaacccctaagtgatttaggaaaattatcatatagaagttactggagttggattcttttagaaattttgcgggattttcgaggtactcttagtataaaagatctgagtcaaatgacaagtatatcacaaacagatatcatatcgacgttacaaagtatgaacatggttaaatattggaaaggtcaacatgtaatttgtgtaacacctaaattagttgaagaacatattaaaagtagtcaatataaaagaccacggttaacagtggatagtagtgcacttagatggggagctccaccacgaaagaacgtaaaacctggcaaaaagtag

SEQ ID NO: 92561 - protein, 455 aa, Apis mellifera
MAESEQRNKENCIVGSKEMMVKQEKRENTLTNGGKGSGDDADSLEELPLDIGEHYLVRRSDDSWHPAEIIQTRYNESESHYEYYVHYEGHNRRLDEWVPRDRIMSSRFDMSDRSWKSGDRNSGTDLLADSSDRKITRNQKRRHDEINHIQKTYAEMDPTTAALEKEHEAITKVKYIDKIQIGKYEIDTWYFSPYPEEYGKQPKLWICEYCLKYMRLEKTYRYHMSECTHRQPVGKEIYRKGTLSIWEVDGREHKIYCQNLCLLAKLFLDHKTLYFDVEPFLFYILCEVDKHGAHLVGYFSKEKESPDGNNVACILTLPPFQRQGYGKLLIAFSYELSRIEQTVGSPEKPLSDLGKLSYRSYWSWILLEILRDFRGTLSIKDLSQMTSISQTDIISTLQSMNMVKYWKGQHVICVTPKLVEEHIKSSQYKRPRLTVDSSALRWGAPPRKNVKPGKK

SEQ ID NO: 92562 - DNA, 1323 bp, Strongylocentrotus purpuratus
  CDS (1)..(1323)
atggatcaaacggatgagtggcctctcggagagatcatcagtcgcaaggatacagatgatggagtcctgttttatgtccattacattgattacaacaagcgtcttgatgactgggtcacactggatagactcaacttggagaagcttcagatgccacataaagaagccaagactccacagaaggagatcctaacaccaaactgtagctccagggcctccacccctgagagggaactacctgcccttgccgcatccaccctcgctgcacctaccccgcccccagcacctgttgtggtgcatgtgaatggcaatgtacccaagaacaaaggcaatcctgttggcaggaaaagaaagctacccttccttgaaacagaggattccttggacatcttgaatgtgaatgcacccagacaaactggaagtatggtggcagataagaaccatgatgacatcatcacccgtatcaagaacattgagatgattgtccttgggcgccactgtatacgaccctggtacttctcaccataccccattgagctgaccagtaaacctaagatctacctctgtgagttttgccttaaatatgtcaggagtgtcaagtgcttggagaggcataaggcaaaatgcaagctgaggcatccacctggaaatgagatctataggaagaaccccatttcattctttgaaattgatggtcggaagaacaaggtatactcccagaacctgtgtctactagccaagctgttcctagatcataagacactgtactatgacacagatccattcctcttctatgtcatgactgagtttgacagcagaggttatcacattgtgggctacttctcaaaggaaaaagaatcaacagaagactacaatgttgcatgtattctcactctacctccgttccaaagaaaaggctttggaaaactacttatagaattcagttatgtgttgtctcagttcgaaggcaagacaggatctcctgagaaacctctatctgatctaggactactgtcctacaggagctactggtctcaggccatcttagaatgcatcctcaagttacccaagccacctgatggtgagagggctcaaatcacaatcagtgacgtctgtgaatcaaccagcatccgtaaagaggatgtgatctacaccctgtgcaacctgaacctgatcaactactacaagggtcagtacgtcatcaccttggccaaggatgtggtagatgcccaccagaaggccatgagtaagcgcaaaatccgcattgaccccaagtctctgcactggacacccaaggactggtcaaagagggggaagtggtga

SEQ ID NO: 92563 - protein, 440 aa, Strongylocentrotus purpuratus
MDQTDEWPLGEIISRKDTDDGVLFYVHYIDYNKRLDDWVTLDRLNLEKLQMPHKEAKTPQKEILTPNCSSRASTPERELPALAASTLAAPTPPPAPVVVHVNGNVPKNKGNPVGRKRKLPFLETEDSLDILNVNAPRQTGSMVADKNHDDIITRIKNIEMIVLGRHCIRPWYFSPYPIELTSKPKIYLCEFCLKYVRSVKCLERHKAKCKLRHPPGNEIYRKNPISFFEIDGRKNKVYSQNLCLLAKLFLDHKTLYYDTDPFLFYVMTEFDSRGYHIVGYFSKEKESTEDYNVACILTLPPFQRKGFGKLLIEFSYVLSQFEGKTGSPEKPLSDLGLLSYRSYWSQAILECILKLPKPPDGERAQITISDVCESTSIRKEDVIYTLCNLNLINYYKGQYVITLAKDVVDAHQKAMSKRKIRIDPKSLHWTPKDWSKRGKW

SEQ ID NO: 92564 - DNA, 1356 bp, Tribolium castaneum
  CDS (1)..(1356)
atggctgatagcaacaagccaccggagacgccttccgaaacaatgcgtaaaaaatcagaaagtgagaacaaaccgtcgcaatcacacgatgaagacaacgaaagtatggaagaacagcctctggacatcggggtgcattatttggtgcaaagatcggacgattcgtggtatcctgccgagataatccagacgagatatggtgacagtgagtacgagtattacgtgcattatgaggggcagaatcggcggctggacgaatgggtgccaagggctaggattatgaattccaggtttaatttaacggagagtggacagaaaatgcccactgacaaggtgtggaaggagcggccagtggtttctgatttattgactgacagttcggaccggaaaatcaccaggaatcagaagagaaggcacgatgaaataaaccacatccagaagacatacgcggaaatggacccaactactgcagctttagagaaggaacatgaacaaataaccaaagttaaatatattgataagatacaaattgggcggtttgagatcgacacatggtattttagcccatatcctgaggaatatggccgacagagcaaattatggatatgtgaatattgcctcaaatacatgagattagaaaaaagttacagatatcatatgagcgaatgtacatggagacaaccggttggtaaagaaatttacagaaaaggaacactttcggtttatgaagttgacggaaaagaccacaaaatttattgccagaatctttgcctcctggcgaagctgtttctagaccacaaaacactgtactttgacgttgaacctttcctcttttacattttatgcgaagttgacaagcaaggggcacacattgttggttacttctccaaagagaaagaatctccagacggaaataacgtcgcgtgtatcctcacattgcccccttatcagaggcaaggctacggcaagcttttgatagccttcagttacgagttgtcgcggcttgagggcaccgtgggcagccccgaacagccccttagtgatttgggaaaattgagttataggagttactggagttgggttttgttggagattttgagggactttcggggcactttgtcgatcaaagatttgagccaaatgactagtattacccagactgatataatttcaaccttgcaaagcatgaatatggtcaaatattggaaaggtcagcacgtgatttgtgtcacacccaaactggtagaagaacatatcagatcaagtcagtacaaaaggccgcgattgtgtgttgacagtacggcgctgcggtgggcccccagaagacacaccaacaataagttaggaaaaaaatga

SEQ ID NO: 92565 - protein, 451 aa, Tribolium castaneum
MADSNKPPETPSETMRKKSESENKPSQSHDEDNESMEEQPLDIGVHYLVQRSDDSWYPAEIIQTRYGDSEYEYYVHYEGQNRRLDEWVPRARIMNSRFNLTESGQKMPTDKVWKERPVVSDLLTDSSDRKITRNQKRRHDEINHIQKTYAEMDPTTAALEKEHEQITKVKYIDKIQIGRFEIDTWYFSPYPEEYGRQSKLWICEYCLKYMRLEKSYRYHMSECTWRQPVGKEIYRKGTLSVYEVDGKDHKIYCQNLCLLAKLFLDHKTLYFDVEPFLFYILCEVDKQGAHIVGYFSKEKESPDGNNVACILTLPPYQRQGYGKLLIAFSYELSRLEGTVGSPEQPLSDLGKLSYRSYWSWVLLEILRDFRGTLSIKDLSQMTSITQTDIISTLQSMNMVKYWKGQHVICVTPKLVEEHIRSSQYKRPRLCVDSTALRWAPRRHTNNKLGKK

SEQ ID NO: 92566 - DNA, 1380 bp, Tribolium castaneum
  CDS (1)..(1380)
atggaggaaatcgacgacagcacaatttgtgattctgtgaattcgttagtggaaggatgcaggctcccggttcacatgaccggcacttccgactggcctttggccgaaattatcagtattaaggacgtgcaaggctcgaaattgtactacgtccattacgttgattttaacaagcgtttggacgaatgggtgaccgaagaatcgctcgacactcgtaaagtccacttcccgagacgtgacggcgggagtaacactggagtctcaactccgaaaaaaattcacattgggggcggtggtgccatcggttcggtatcaaggccctcgagccctgtgacagctgcctccgaacttgtcaacggcagtgctgtcctagcagcagcgttgcaaaaacgcataaataggaaacgaaaagggccgtctcttgagagcgaagactcgcaagatgggcccacacagatgcccccagggccgaggcagtctgggagcatggtgtcgcaccatgacgatgtggtcaccaggatgaagaacatcgatatgatcgagttagggaaacacaggataaagccgtggtattttgcgccatatccgcaagaaatggtcaacttgagctgtatatacatctgcgagttttgcctcaagtaccgaaagagcaggaagtgtctagaacgccacttggtcaaatgtaatttgagacacccgcccggaaatgagatttatcgcaaggaaaacgtctcgttttttgaaattgacgggcggaaaaataaagtctacgcccagaatttgtgtttgttggcgaagctgttcctcgatcataaaacactgtattacgacacggacccgtttttgttttacgtaatgaccatttttgataatagagggtttcacattgttggctatttttcgaaagagaaggaatcaacggaagattttaacgtcgcgtgtattttaaccatgcctccgtatcagcgaaagggttacggaaaattactaatcgaatttagttatgaattatcaaagttcgaaggtaaaacgggttctcccgaaaaacctctctccgatttgggtttgctttcgtataggagttactgggcacaagctattttagaaatcttaatatcaatgaagccagtgggtgataacgagaagccacaaataacgatcaatgaaatttgtgagttgacaagtattaaaaaagaagacgtcatctcaactttacaaaacttaaacttaatcaattattacaaaggccagtatattataacgttaaatcaggaaattatgcaaagtcacaaaaaagccatggatagtagacttatccgaatcgaccccaagtgtctgcattggacacctaaagattggggcaaacgcgccaagtggtag

SEQ ID NO: 92567 - protein, 459 aa, Tribolium castaneum
MEEIDDSTICDSVNSLVEGCRLPVHMTGTSDWPLAEIISIKDVQGSKLYYVHYVDFNKRLDEWVTEESLDTRKVHFPRRDGGSNTGVSTPKKIHIGGGGAIGSVSRPSSPVTAASELVNGSAVLAAALQKRINRKRKGPSLESEDSQDGPTQMPPGPRQSGSMVSHHDDVVTRMKNIDMIELGKHRIKPWYFAPYPQEMVNLSCIYICEFCLKYRKSRKCLERHLVKCNLRHPPGNEIYRKENVSFFEIDGRKNKVYAQNLCLLAKLFLDHKTLYYDTDPFLFYVMTIFDNRGFHIVGYFSKEKESTEDFNVACILTMPPYQRKGYGKLLIEFSYELSKFEGKTGSPEKPLSDLGLLSYRSYWAQAILEILISMKPVGDNEKPQITINEICELTSIKKEDVISTLQNLNLINYYKGQYIITLNQEIMQSHKKAMDSRLIRIDPKCLHWTPKDWGKRAKW

SEQ ID NO: 92568 - DNA, 1899 bp, Aspergillus niger
  CDS (1)..(1899)
atgggcggcagggacgaggccaccgggaccccggatcccgtcgagaaggggtttgccaccctcaataccatccggatcggtgtcaaggccatggtgcagaaggatggagaactacgaaaagcagaaatcctctcgataaagcagcggaaagatgggccttctttctacgtccactatgtcgacttcaacaagcgtcttgatgaatggattgattccggaaggatagatctctcgcatgaggtcgaatggcctcagccagagaaaccagagaagaaaaagaccggccccggcaacaaagcacctagcaagaacgcccagaagcgtgccagagccgaaagtcgggacgtatcagcaacgccagatcttctgacgggaaagaacaccaatgtcggcaaagcccagcgtccgtccaaagcgggcggcaaagagaaccgcgacgagacccctgtgaacctctccatcggaggctcagaagctgtctccgcagatggaacccccaagcctgactcggatgatgtcgacatgatcgatgttggcttttccaaggatgaaaaagaagaagcgaaggcactaggtcttatgtcgcgcgaagaagaaatcgaaaggctacgcactagcggtagtatgacccagaacccgacggagattcaccgtgtgcgaaacttgacccgtctccaaatgggcaaatacgatatcgagccttggtacttctcgccatacccggcatcgttctccgatgcagacgtcgtatacattgacgagttctgcctgggatacttcgacaacaagcgcgccttcgagcgtcaccgttccaaatgcaccctcgtgcacccacccggaaacgaaatctaccgcgatgactacatttccttcttcgaagtcgacggccggcgtcaacgaacctggtgtcgcaacctctgtctgctgagcaagctcttcctcgatcacaagacactgtactacgacgtcgaccccttcctgttctactgcatgtgcagtcgagacgaaacaggctgtcatctcgtcggctacttctccaaggaaaaggactctgcggaaggctacaacctggcctgtatcttaaccctccctcaataccaacgccgcgggtacggccgtcttctcatctccttcagctacgagctcggcaagcgtgagggaaagctcggatcgcccgagaagcctctcagtgatctcggtctcctcagttatcgacaatactggcgagaaaccctcgtggagcttctcttggaaaccggccgggaatccgtcagcgagcacgacctctcaatgctgacttccatgacggagaaagacgtccacgagactttggttgttttcaatatgctcagataccataaaggaaactgggtcatagtcctaacagaccaagtagtcgaagagcacaagaagcgtctcgagaaggagaagatcaagggcgttcgcaagatcgatcccgcccggctgcaatggaaaccgcccgtcttcactgcgtcgtcccgtacctggaattgcaaagtatgggacgggagccgggaagccgggaagccgggaagattgattgataccctcatttggagtcggtggtgtaatctacaattacgcctgacggaacaacatataacgttaaagtattcgaatgcacacctcagcacaaaagctagatacacggttctgcacgttaacacaaagctcccgcaccatttaccctttcccagaatcttggctccggttccacaagctatagaaaaaaagaaagaaggggatccaatggctcaacgacgatcaccgcacagacgggatctgggaggtcaagattcgagaaaggagggggattcggaaagacgtgacatgggttggtttagacccccggagaagacagagataaagaagcattga

SEQ ID NO: 92569 - protein, 632 aa, Aspergillus niger
MGGRDEATGTPDPVEKGFATLNTIRIGVKAMVQKDGELRKAEILSIKQRKDGPSFYVHYVDFNKRLDEWIDSGRIDLSHEVEWPQPEKPEKKKTGPGNKAPSKNAQKRARAESRDVSATPDLLTGKNTNVGKAQRPSKAGGKENRDETPVNLSIGGSEAVSADGTPKPDSDDVDMIDVGFSKDEKEEAKALGLMSREEEIERLRTSGSMTQNPTEIHRVRNLTRLQMGKYDIEPWYFSPYPASFSDADVVYIDEFCLGYFDNKRAFERHRSKCTLVHPPGNEIYRDDYISFFEVDGRRQRTWCRNLCLLSKLFLDHKTLYYDVDPFLFYCMCSRDETGCHLVGYFSKEKDSAEGYNLACILTLPQYQRRGYGRLLISFSYELGKREGKLGSPEKPLSDLGLLSYRQYWRETLVELLLETGRESVSEHDLSMLTSMTEKDVHETLVVFNMLRYHKGNWVIVLTDQVVEEHKKRLEKEKIKGVRKIDPARLQWKPPVFTASSRTWNCKVWDGSREAGKPGRLIDTLIWSRWCNLQLRLTEQHITLKYSNAHLSTKARYTVLHVNTKLPHHLPFPRILAPVPQAIEKKKEGDPMAQRRSPHRRDLGGQDSRKEGDSERRDMGWFRPPEKTEIKKH

SEQ ID NO: 92570 - DNA, 1442 bp, Triticum aestivum
  CDS (33)..(1340)
tcccgatcctctccgacgacgagatgggctccatggagctgtccaccgcgccggagaacggcaccgccgcggccgccgcggcgtgcaacggcggggccgccccggcgaacggaggggtcgagaggaggctgagatcctcggccgcgtccgcgtcctgggcggcgcatctgccgctggaagtggggacgcgcgtgatgtgccggtggcgcgaccagaagccccaccccgtcaaggtcatcgggcgccggaagtccgccgcctcctcttcccccgccgactacgagtactacgtccattacaccgagttcaacaggaggttggatgagtgggttaaacttgagcaacttgatcttgatactgtcgaggctgttgttgacgagagggtagacgacaaggcaacaagtttgaagatgacacgacaccagaaacgtaaaatcgacgaaacacacgtggagcaaggtcacgaggagcttgatgctgctagtttgcgggagcatgaggagttcacaaaggtgaaaaatatagcgaagatagaacttgggaagtatgagatagatacctggtatttctctcctttcccaccagagtacaatgactctgcgaagctgttcttctgtgagttttgcctgaacttcatgaagcgcaaagaacagcttcagaggcacatgaagaagtgtgatcttaagcatcccccgggtgatgaaatctacagatgtggaactctatcgatgttcgaggttgatggcaagaagaataaggtttatggacagaacctttgctacctggccaagctattccttgatcacaaaacactctactatgatgtggatttgttcttgttccatatcctgtgtgaatgtaatgatcggggatgtcatatggtgggatatttctccaaggagaagcactctgaggaagcttacaacttggcctgcattctcactctccctccataccaaagaaagggttacggaaagttcctgattgctttctcttatgagctttctaaaaaggaaggtaaagtgggaacaccggagcgtcctctctcagatcttggtctgctcagttatagaggctattggactagagtacttctggaaattttgaagaaacataagagcaacatatctattaaggagctgagcgacatgacggcaatcaaagcggacgacatcttgagcacgctgcagagcctggacctgatccagtaccggaaagggcagcatgtcatctgtgcagacccaaaggtcctcgaccgccacctcaaggccgcggggcgggggggccttgacgtcgacgtgagcaagctgatctggacaccgtacaaggagcaaggctaagcaaagcacatctgccatgcggccatgccatgtcgaattagataagctgaccaatcgagtcgtgtatattttaggaactccttccttccccgtccctcgtgt

SEQ ID NO: 92571 - protein, 435 aa, Triticum aestivum
MELSTAPENGTAAAAAACNGGAAPANGGVERRLRSSAASASWAAHLPLEVGTRVMCRWRDQKPHPVKVIGRRKSAASSSPADYEYYVHYTEFNRRLDEWVKLEQLDLDTVEAVVDERVDDKATSLKMTRHQKRKIDETHVEQGHEELDAASLREHEEFTKVKNIAKIELGKYEIDTWYFSPFPPEYNDSAKLFFCEFCLNFMKRKEQLQRHMKKCDLKHPPGDEIYRCGTLSMFEVDGKKNKVYGQNLCYLAKLFLDHKTLYYDVDLFLFHILCECNDRGCHMVGYFSKEKHSEEAYNLACILTLPPYQRKGYGKFLIAFSYELSKKEGKVGTPERPLSDLGLLSYRGYWTRVLLEILKKHKSNISIKELSDMTAIKADDILSTLQSLDLIQYRKGQHVICADPKVLDRHLKAAGRGGLDVDVSKLIWTPYKEQG

SEQ ID NO: 92572 - DNA, 1515 bp, Zea mays
  CDS (25)..(1359)
  misc_feature (182)..(182): y is t or c
atccgctctggctccaacaacgtgatgggctccatggaagcgtcgaccgcgccggagaacggctcctccgctgccggtggcggagccggcggcacggcgtgcaacggggcgggcgccgcgtctaacggaggaggcatggagaggcggctgaggtcctcggccgcgtccgcgtcgtgggcggygcaccttcccctggaggtgggcacgcgcgtgatgtgccggtggcgcgaccagaagctccacccggtcaaggtgatcgagcgccgcaagggctccgcgtgctcttcccccgccgactacgagtactacgtccactacaccgagttcaatagaagacttgacgagtgggttaagcttgaacagcttgatcttgacactgtcgagaccgttgtcgatgagaaagtagaagataaggcaacaagcttaaagatgacacggcaccagaaacgtaaaattgatgaaacacatgtggagcaaggacatgaggagcttgatgcagccagcttgcgggaacatgaagaattcacaaaggtgaaaaatatcgcgaagatcgaactggggagatatgagatagacacatggtatttctctccttttccaccagagtataatgactgcccgaagctgtttttctgtgaattttgcctcaacttcatgaagcgcaaagaacagcttcagaggcacatgaagaagtgtgatcttaagcaccccccaggtgatgaaatctatagaagtggaactctatcaatgtttgaggttgatgggaagaagaacaaggtttatggacagaacctttgttatctggctaagctatttcttgatcacaagacattgtactatgatgttgatttgttcttgttttatgtcctctgcgaatgtgatgatcggggatgtcatatggtgggatatttctctaaggaaaaacactccgaagaatcttataatttggcttgcattctcactctccccccataccaaagaaaaggatatgggaagttcctgattgctttctcatatgaactttccaagaaggaaggtaaagttgggacaccggagcgccctctctctgatcttggtctgctcagctatagaggttattggactagagtgcttctggaaattctaaagaaacataagggaaacatatctataaaggaactaagcgacatgacggcaataaaagcagatgacatcttgagcacgctacagagcctggacctaatccagtaccgcaaagggcagcacgtcatctgcgctgacccgaaggtcctcgaccgccacctcaaggcggcggggcggggcggcctggacgtcgacgttagcaagctcatatggactccctacaaggagcaaggctaaaaggcgaactgctccgtgtctcagatttagactcgctgaccgatgcgatgcagtccctgtacatagcatctccccacagctcacttgacttgacttgactcgtgtaccgtgaaactctacttgtaactttgaacatccacatcgttgtctcctcat

SEQ ID NO: 92573 - protein, 444 aa, Zea mays
  misc_feature (53)..(53): The Xaa at location 53 stands for Ala, or Val.
MGSMEASTAPENGSSAAGGGAGGTACNGAGAASNGGGMERRLRSSAASASWAXHLPLEVGTRVMCRWRDQKLHPVKVIERRKGSACSSPADYEYYVHYTEFNRRLDEWVKLEQLDLDTVETVVDEKVEDKATSLKMTRHQKRKIDETHVEQGHEELDAASLREHEEFTKVKNIAKIELGRYEIDTWYFSPFPPEYNDCPKLFFCEFCLNFMKRKEQLQRHMKKCDLKHPPGDEIYRSGTLSMFEVDGKKNKVYGQNLCYLAKLFLDHKTLYYDVDLFLFYVLCECDDRGCHMVGYFSKEKHSEESYNLACILTLPPYQRKGYGKFLIAFSYELSKKEGKVGTPERPLSDLGLLSYRGYWTRVLLEILKKHKGNISIKELSDMTAIKADDILSTLQSLDLIQYRKGQHVICADPKVLDRHLKAAGRGGLDVDVSKLIWTPYKEQG

SEQ ID NO: 92574 - DNA, 1597 bp, Zea mays
  CDS (36)..(1370)
ggcacgagcggatccgctctggctccaacaacgtgatgggctccatggaagcgtcgaccgcgccggagaacggctcctccgctgccggtggcggagccggcggcacggcgtgcaacggggcgggcgccgcgtctaacggaggaggcatggagaggcggctgaggtcctcggccgcgtccgcgtcgtgggcggcgcaccttcccctggaggtgggcacgcgcgtgatgtgccggtggcgcgaccagaagctccacccggtcaaggtgatcgagcgccgcaagggctccgcgtgctcttcccccgccgactacgagtattacgtccactacaccgagttcaatagaagacttgacgagtgggttaagcttgatcagcttgatcttgacactgtcgagaccgttgtcgatgagaaagtagaagataaggcaacaagcttaaagatgacacggcaccagaaacgtaaaattgatgaaacacatgtggagcaaggacatgaggagcttgatgcagccagcttgcgggaacatgaagaattcacaaaggtgaaaaatatcgcgaagatcgaactggggagatatgagatagacacatggtatttctctccttttccaccagagtataatgactgcccgaagctgtttttctgtgaattttgcctcaacttcatgaagcgcaaagaacagcttcagaggcacatgaagaagtgtgatcttaagcaccccccaggtgatgaaatctatagaagtggaactctatcaatgttcgaggttgatgggaagaagaacaaggtttatggacagaacctttgttatctggctaagctatttcttgatcacaagacattgtactatgatgttgatttgttcttgttttatgtcctctgcgaatgtgatgatcggggatgtcatatggtgggatatttctctaaggaaaaacactccgaagaatcttataatttggcttgcattctcactctccccccataccaaagaaaaggatatgggaagttcctgattgctttctcatatgaactttccaagaaagaaggtaaagttgggacaccggagcgccctctctctgatcttggtctgctcagctatagaggttattggactagagtgcttctggaaattctaaagaaacataagggaaacatatctataaaggaactaagcgacatgacggcaataaaagcagatgacatattgagcacgctacagagcctggacctaatccagtaccgcaaagggcagcacgtcatctgcgctgacccgaaggtcctcgaccgccacctcaaggcggcggggcggggcggcctggacgtcgacgttagcaagctcatatggactccctacaaggagcaaggctaaaaggcgaactgctccgtgtctcagatttagactcgctgaccgatgcgatgcagtccctgtacatagcatctccccacagctcacttgacttgacttgactcgtgtaccgtgaaactctacttgtaactttgaacatccacatcgttgtctcctcatttctccttgcattaaccatgctaccttttttttaaaaaaaaaaaaaaaaaaaaaaaaaaaaaaaaaaaaaa

SEQ ID NO: 92575 - protein, 444 aa, Zea mays
MGSMEASTAPENGSSAAGGGAGGTACNGAGAASNGGGMERRLRSSAASASWAAHLPLEVGTRVMCRWRDQKLHPVKVIERRKGSACSSPADYEYYVHYTEFNRRLDEWVKLDQLDLDTVETVVDEKVEDKATSLKMTRHQKRKIDETHVEQGHEELDAASLREHEEFTKVKNIAKIELGRYEIDTWYFSPFPPEYNDCPKLFFCEFCLNFMKRKEQLQRHMKKCDLKHPPGDEIYRSGTLSMFEVDGKKNKVYGQNLCYLAKLFLDHKTLYYDVDLFLFYVLCECDDRGCHMVGYFSKEKHSEESYNLACILTLPPYQRKGYGKFLIAFSYELSKKEGKVGTPERPLSDLGLLSYRGYWTRVLLEILKKHKGNISIKELSDMTAIKADDILSTLQSLDLIQYRKGQHVICADPKVLDRHLKAAGRGGLDVDVSKLIWTPYKEQG

SEQ ID NO: 92576 - DNA, 1563 bp, Ashbya gossypii
  CDS (1)..(1563)
atggaaacacatagacggagcgacccaagattcccacccgggccttccatggaaccccagcctggtcagacagcggttctgaagctcaggatggttgttcttcacaatcctgtatatacttttcgagcatggatggatttcaccgcagcagctaattacgtagagcacgaaatttttgtaaagcatcaccagcaggcaggagtactagagcttgggcagactatcagacgaggctgttggctgctgggaagtactatggctcaagaagaggagaaagatgccggcatttccaagtatatctcgactacggatgaaatcatcatcggatgtaaatgttgggtcgaaaaggatggtgagcaaaggctggctgaaattctgtcgataaacaaccgaagacagcctcccaagttctacgtacactacgaggatttcaataaacgtctagatgagtggatactggcatccaggataaatatcgagcgagaggtaacgtttccgaagcccagggaccccgatgagaagaagaagaagaagcagaagaagagcgcaacgccgcaggccaccgacggggagaccctggagtctgccgatatcatggacctcgagaacctcaatgtgcagggcctgcgggacgaaggcataagcagggacgacgaaatcaaaaagctgcggacatctgggtcgatgacgcagaacccccacgaggtttcgcgtgttcggaatctcagcaagataattatggggaaacacgaaatagagccctggtacttctctccgtacccgatcgagctgacggatgaggacgtggtgtacatagacgatttctccctgcagtacttcggttccaagaaacagtacgctaggtaccgccagaaatgtactctgcggcacccgccgggcaacgaaatatacagggacgattacgtctcctttttcgaaatcgacgggcgcaagcagcgaacgtggtgccgcaacctatgccttctgtcaaagctgtttctggatcacaagacgttgtactacgacgtcgacccttttctcttttactgcatgacacagagagatgagcttgggcaccacctggtgggatatttctccaaagaaaaagagtctgcggacgggtacaatgtggcgtgtattctgacgctccctcagtaccagcggatggggtacggcaggctgctgattgagttttcgtatgagctctctaagaaggagaacaaggttgggtcgccggagaagccgctctctgatcttgggctgctctcctacagagcctattggtccgataccctgatcaagctgctagtcgaaaacggcaccgagatcacgatcgatgaaatcagtagcatgacatcgctcacgactacagacatactgcacacagccaaggctcttaacatactgcgatattacaagggccagcacatcttgtacctgaacgaggacgtgctgctaaggtacgagaagctgatagcgaagaaaaggcgatcgatcgaccccgagaagctgatctggaaaccgccaatctttactgcgtcccagctaaggttcgcatggtag

SEQ ID NO: 92577 - protein, 520 aa, Ashbya gossypii
METHRRSDPRFPPGPSMEPQPGQTAVLKLRMVVLHNPVYTFRAWMDFTAAANYVEHEIFVKHHQQAGVLELGQTIRRGCWLLGSTMAQEEEKDAGISKYISTTDEIIIGCKCWVEKDGEQRLAEILSINNRRQPPKFYVHYEDFNKRLDEWILASRINIEREVTFPKPRDPDEKKKKKQKKSATPQATDGETLESADIMDLENLNVQGLRDEGISRDDEIKKLRTSGSMTQNPHEVSRVRNLSKIIMGKHEIEPWYFSPYPIELTDEDVVYIDDFSLQYFGSKKQYARYRQKCTLRHPPGNEIYRDDYVSFFEIDGRKQRTWCRNLCLLSKLFLDHKTLYYDVDPFLFYCMTQRDELGHHLVGYFSKEKESADGYNVACILTLPQYQRMGYGRLLIEFSYELSKKENKVGSPEKPLSDLGLLSYRAYWSDTLIKLLVENGTEITIDEISSMTSLTTTDILHTAKALNILRYYKGQHILYLNEDVLLRYEKLIAKKRRSIDPEKLIWKPPIFTASQLRFAW

SEQ ID NO: 92578 - DNA, 1452 bp, Aspergillus fumigatus
  CDS (1)..(1452)
atgttgttgctgatgtttgctttgctacaggacggcgagttgagaaaagcagaaattctatcgatcaggcagcgtaaagatggtcctagcttctatgttcactatgtcgatttcaacaaacgtttagatgaatggattgatgcttctcgactggacctgtctcatgaagttgagtggcctcagccggagaaaccagagaagaagaagaccggtgttggtaacaaagcaccaagcaaaaatgcgcagaaacgtgcaagagccgatagtcgtgatgtctctgcaacaccagatcttctcacaggcaagaatgtgaatgttggcaaggcacaacgtccgtccaaggcaggtggtaaagagaaccgtgacggaactcctctcagtatgcccatcgtcacagcagaggccatctcaacagacggaacccctaaggcggagtctgacgatgtcgaaatggttgacgtcagcttcacggacggcaaaagcatcaaagaagaggagagagcgttgggactcatgtcgcgcgaagaagagatcgaacgactgcgaacgagcggtagtatgacacagaacccaacggaaatccatcgtgttcgtaacttgaatcgtcttcaaatgggcaaatacgacattgagccctggtacttctcgccttatcccgcttccttctcagacgctgatatcatctatatcgacgagttctgtctgagctatttcgacgacaaacgtgcctttgaacgccaccgtaccaagtgcacgcttgtccatcctcctggcaacgagatataccgcgatgactacatctcctttttcgaagttgatggccgccggcagaggacgtggtgccgtaatctttgtctgctgagcaaactcttccttgatcacaaaaccctatactacgatgtcgacccattcctcttctactgtatgtgcacgagagacgagacaggctgccatcttgtgggctacttctccaaggaaaaggactccgcggaaggctacaatttggcttgtatcttgacactacctcagtaccaacggcgtgggttcggtcggctgcttatctccttcagctatgagctcagcaagcgcgagggaaaactcggttctcctgaaaagccgctcagtgaccttggtctactgggttaccgtcaatattggcgagaaacgctcgtcgaaatactcatggaacctggacgagaaacagtcagtgagaatgaactcgctctattgacttcgatgactgaaaaagacgtccatgagaccctggtcgtcctgaacatgctgcgttactataaaggaaactgggtcatcgttctcaccgactacgtggttgaacagcacaagaagcgtcttgaaaaagagaaactgaagggagctcgcaagattgacccagcgcgccttcagtggaaacctcccgtgttcaccgcttcaagccggacatggaactggtga

SEQ ID NO: 92579 - protein, 483 aa, Aspergillus fumigatus
MLLLMFALLQDGELRKAEILSIRQRKDGPSFYVHYVDFNKRLDEWIDASRLDLSHEVEWPQPEKPEKKKTGVGNKAPSKNAQKRARADSRDVSATPDLLTGKNVNVGKAQRPSKAGGKENRDGTPLSMPIVTAEAISTDGTPKAESDDVEMVDVSFTDGKSIKEEERALGLMSREEEIERLRTSGSMTQNPTEIHRVRNLNRLQMGKYDIEPWYFSPYPASFSDADIIYIDEFCLSYFDDKRAFERHRTKCTLVHPPGNEIYRDDYISFFEVDGRRQRTWCRNLCLLSKLFLDHKTLYYDVDPFLFYCMCTRDETGCHLVGYFSKEKDSAEGYNLACILTLPQYQRRGFGRLLISFSYELSKREGKLGSPEKPLSDLGLLGYRQYWRETLVEILMEPGRETVSENELALLTSMTEKDVHETLVVLNMLRYYKGNWVIVLTDYVVEQHKKRLEKEKLKGARKIDPARLQWKPPVFTASSRTWNW

SEQ ID NO: 92580 - DNA, 1521 bp, Aspergillus oryzae
  CDS (1)..(1521)
atgggcgtcagagattcccatggggaggcaaccgcgacgccggaccccgttgagaaggggttcgccaccctcaacaccattcgaatcggtgttaaggccatggttcagaaggatggagaattgagaaaagctgaaattttgtctatcagacagcgcaaagatggtccaagcttttacgtccattatgtcgatttcaataaacgtctcgacgagtggatcgattccacaaggattgatttatctcacgaggttgaatggccgcagcctgaaaaaccagagaagaagaaagcaggtcctggtaataaagcaccgagcaagaatgctcagaagcgtgcaagagccggaagccgcgaggtttcggcaaccccagatctcttgacaggcaaaaacaccaatattggcaaagcacagcgtccgtctaaggcaggcgggaaagagaaccgtgacgagacgcctgcaaatttgtcagttctagattcggaagccatttctgcagacgtgacccctaagcctgaaatggaagatgttgatatgatcggcgtcagtttcacggataccaaggaagagcatgaacaaggtaaaatgtcacgcgaagaggaaatcgaacgattgcgtacaagcggaagtatgacccaaaatcccacggaaattcaccgtgtgcgtaacttgaatcgtctacaaatgggcaagtttgacattgagccgtggtacttctctccttatcctgcctcgttctcggatgtcgatatggtctacattgatgaattctgcttgagttatttcgacaacaaacgcgctttcgagcgtcaccgttcgaaatgtacacttgttcacccacctgggaacgagatctatcgtgatgaccgtatatcattctttgaagtggacggtcggcgccagcgcacctggtgccgcaatctttgccttcttagcaaactctttcttgaccataaaacactctactacgacgtcgaccctttccttttctactgcatggccactcgggatgagaccggttgccatctggtgggctatttctccaaagaaaaagattccgcagaaggttataaccttgcttgtatcttgaccttaccacaataccagcgtctcggctacgggcgactgcttattgctttcagctatgagctcagcaagcgagaaggaaagcttggctctccagaaaagcccctcagtgacctgggtctgctaagttatcggcaatactggcgagaaacactcgtggagttactcatagagccgggccgagagtccatgagtgagaacgaacttgctgtgttaacgtctatgaccgagaaggatgtgcatgagacactggttgtgttcaatatgcttagataccacaaaggaaactgggttatcgtcctcacggatcaagttgtggagcaacacaataagcgtcttgagaaagagaaaattaaagggtcgcgcaaaatcgaccctgcacgcttacaatggaagcctccagttttcacagcttcaagtcgaacatggaattggtga

SEQ ID NO: 92581 - protein, 506 aa, Aspergillus oryzae
MGVRDSHGEATATPDPVEKGFATLNTIRIGVKAMVQKDGELRKAEILSIRQRKDGPSFYVHYVDFNKRLDEWIDSTRIDLSHEVEWPQPEKPEKKKAGPGNKAPSKNAQKRARAGSREVSATPDLLTGKNTNIGKAQRPSKAGGKENRDETPANLSVLDSEAISADVTPKPEMEDVDMIGVSFTDTKEEHEQGKMSREEEIERLRTSGSMTQNPTEIHRVRNLNRLQMGKFDIEPWYFSPYPASFSDVDMVYIDEFCLSYFDNKRAFERHRSKCTLVHPPGNEIYRDDRISFFEVDGRRQRTWCRNLCLLSKLFLDHKTLYYDVDPFLFYCMATRDETGCHLVGYFSKEKDSAEGYNLACILTLPQYQRLGYGRLLIAFSYELSKREGKLGSPEKPLSDLGLLSYRQYWRETLVELLIEPGRESMSENELAVLTSMTEKDVHETLVVFNMLRYHKGNWVIVLTDQVVEQHNKRLEKEKIKGSRKIDPARLQWKPPVFTASSRTWNW

SEQ ID NO: 92582 - DNA, 1341 bp, Candida glabrata
  CDS (1)..(1341)
atggctggtgcagaagttgaagaggaagctggtattcctaagaagattgagagcactgaggaagtactgattaagtgtcagtgctgggtgcgtaaggatgaggaggagcggctggctgagatactgtcgataaacgcgcgcgtgagcccatcgaaattctatgtgcactatgtcaatttcaacaagcgtttggatgaatgggttactggggatcgtataaacctggataaggaagttatatttccgagacccaagagacagttggaagaggacacgaacaagaagcaaaagaaaaagaagaagtttccacagaaagctgcagtggtggagtctgatgcgaagagctcagagatgggtgaaggtagtgatgttatggatctggataacttaaatgtgcgaggtctgaaagacgaagagatatctagggaagatgagatcaaaaagttaaggacttccggttccatgattcaaaatccacatgaagtggctcacgttagaaatttgtccaagatcattatggggaaatttgaaatcgagccttggtatttttctccatatccaattgagctcacagatcttgatgtggtatacatcgatgacttcacgctgcaatactttggttccagaaaacaatacgaacgttatagaaagaagtgtacactacggcatccacctggaaatgaaatttacagagacgattatgtttcattctttgagatagatggtcgaaagcagagaacgtggtgtagaaatctgtgtttgttatctaaactctttttagaccataagacgttatattacgatgttgatccatttttattttattgtatgactagaagagatgagatgggccatcattttgttggctacttttctaaggaaaaggaatctgctgatggttataatgttgcatgtatcctaacattaccacaatatcagcgtatgggttatggtagattattaatcgaattttcttatgaactatccaaaaaggaaggaaaagtaggttcgccggaaaagccattgtcggatttgggtttgctatcttatagagcttattggtcggacgttttaatcacacttctagtggagcatggaaaagaagttaccattgatgaaataagttcaatgacatcaatgacaacaactgatatccttcacactttaaaaacattaaacattctacgatactacaagggacagcatattatatttttaaatgacgatatattagaaaggtacaaccagttaaaaaccaaaaagagaagacatatcgatgcagagaagttactatggaaacctcctgtatttactgcatcgcaattgagatttgcctggtag

SEQ ID NO: 92583 - protein, 446 aa, Candida glabrata
MAGAEVEEEAGIPKKIESTEEVLIKCQCWVRKDEEERLAEILSINARVSPSKFYVHYVNFNKRLDEWVTGDRINLDKEVIFPRPKRQLEEDTNKKQKKKKKFPQKAAVVESDAKSSEMGEGSDVMDLDNLNVRGLKDEEISREDEIKKLRTSGSMIQNPHEVAHVRNLSKIIMGKFEIEPWYFSPYPIELTDLDVVYIDDFTLQYFGSRKQYERYRKKCTLRHPPGNEIYRDDYVSFFEIDGRKQRTWCRNLCLLSKLFLDHKTLYYDVDPFLFYCMTRRDEMGHHFVGYFSKEKESADGYNVACILTLPQYQRMGYGRLLIEFSYELSKKEGKVGSPEKPLSDLGLLSYRAYWSDVLITLLVEHGKEVTIDEISSMTSMTTTDILHTLKTLNILRYYKGQHIIFLNDDILERYNQLKTKKRRHIDAEKLLWKPPVFTASQLRFAW

SEQ ID NO: 92584 - DNA, 1566 bp, Debaryomyces hansenii
  CDS (1)..(1566)
atgtctgtaggcgaagacaagtctggtacggcaacacctcaacataatacatcaatacgaataactgatgacgaagaacgtagtgacgaaaagaaatttactgacgatgatattataacggggtgcaagctatacgtttcaaaggatggcgaatacagattagcagagattttgcaggatcatatgaaaaagggtaaaaaagtgttttatgttcattatcaagaatttaataaaagattggatgaatggataagtgcagacaggatagattttaccagagctttaatctcacctcaagtgaaggtggataagaaggatgacaaaaaggaaggaaagctgaaaacatcgaagaaatctaagctgaaaaacggtaaaacaggttcgaaatcagttacttcgacaccacaaccgaatgaagatacggcaccgggaacgcccagaaatgatgacgagatggatttggataatttgaatgtgcaagggttgaaaagacctggcgaggaggtgagtcgtgaagatgaaattaaaaaattaagaactagtgggtctatgactcaaaaccatctggaggttgcaagagttagaaacttatcgagcgtaattttgggtgaacatatcattgagccgtggtatttttctccatatccaatcgaactaacagaagaagatgagatatacatttgtgacttcacgctagcatattttggttcacttaaacaatttgaaagattcagaacgaagtgttctatgaagcatccccctggtaatgagatttatagagattcaaaggtaagcttttgggaaattgatggcagaaaacaaaggacatggtgtcgtaacttatgtctactactgaagttatttttggatcataaaacattatactacgatgtcgatccatttttattttatatcatgacagttaaatcatcgcaaggccatcatgtagtcggatacttttctaaagaaaaggaaagtgctgatggttataacgttgcatgtattttgacattgccgtgctatcaaaagatgggatttggtaaattgttaattcaattttcttacatgttgtctaatgttgagaataaggtaggatccccagaaaagcctttatcagatttagggttattatcttacagagcattttggaccgatacgctagtaaagttattagtggaaagaaataacccccatctttttaagaagaataatcctcaattattaaccgaagcgagtctgaaggattcatctgtcagtcctcctccaggtggtcgtcaatctgctaatattcaaaatggaaacacaccatcaagtgatataacgattgatgaaatatcatctatcacttgtatgacaaccactgatatattgcataccttaacagcattacagatcttaagatattacaagggacagcacattatagtgataacggatcacgttatggctatgtatgataaattggtcaagaaaattaaagataagaaaaagcatgagttagatccaagcaaattaagctggactcctccagctttcactgccaaccaattacgctttggatggtag

SEQ ID NO: 92585 - protein, 521 aa, Debaryomyces hansenii
MSVGEDKSGTATPQHNTSIRITDDEERSDEKKFTDDDIITGCKLYVSKDGEYRLAEILQDHMKKGKKVFYVHYQEFNKRLDEWISADRIDFTRALISPQVKVDKKDDKKEGKLKTSKKSKLKNGKTGSKSVTSTPQPNEDTAPGTPRNDDEMDLDNLNVQGLKRPGEEVSREDEIKKLRTSGSMTQNHLEVARVRNLSSVILGEHIIEPWYFSPYPIELTEEDEIYICDFTLAYFGSLKQFERFRTKCSMKHPPGNEIYRDSKVSFWEIDGRKQRTWCRNLCLLLKLFLDHKTLYYDVDPFLFYIMTVKSSQGHHVVGYFSKEKESADGYNVACILTLPCYQKMGFGKLLIQFSYMLSNVENKVGSPEKPLSDLGLLSYRAFWTDTLVKLLVERNNPHLFKKNNPQLLTEASLKDSSVSPPPGGRQSANIQNGNTPSSDITIDEISSITCMTTTDILHTLTALQILRYYKGQHIIVITDHVMAMYDKLVKKIKDKKKHELDPSKLSWTPPAFTANQLRFGW

SEQ ID NO: 92586 - DNA, 1509 bp, Gibberella zeae
  CDS (1)..(1509)
atggctggcggtacacctggaggcgagcccaccgtgggctcaggtgagccgcgattaaaaagccttgcgacacccgaaacgatcaagactgggtgcattgcctgggtcgagaaagaaggccagccacgacgcgccgaaattctcagcatcaagacaaccaagagcggcaaacaattttactgcaattttgataacttcaataagcgactggatgaatgggtacctgtcatcagattggactttactcgggaggttgaatggccaaaccccgaaaaggaaaagcctaaagacccaaaggcgaagaaagcgcccactgtgcaatccaagaagacacaaccttcaaagaagtctcaaaaacggcccagcaaacgagagcaatcaactacgtcggaagccaataccccacatccttggactgatttcgtggagaaccaaaaccggcaaaagtctgcctcgatcggccccgatggcgatagtcaagcacgcgccagcgttgatggcggcgaaacacctgggggaggtgacgaaatggaggtggacgaaagagaaacggaagtcaaaagggagccagcagagttcagtcgtgaggtcgagattgagaagcttcgcacatccggctccatgactcaaaatccaaccgaagtctcacgaatccgaaatatctccaaggtacaatttggccgtttcgatctgtatccatggtatttctcgccataccccgagattttcagtcaggaagatgtcattttcatctgtgaattctgtctgagctattatggagacttgaaggctttcactcggcaccgaaaaaagtgcacactacagcacccacctggaaacgaactttatcgaaatgaggaaatatccttcttcgaaatcgatgggcgacgacagcgaacgtggtgtcgcaacctttgtcttttgtccaagatgtttcttgaccacaagacactgtattatgatgtggaccctttcctgttttatgtcatgacggtgcgaaccgaaaaaggatgtcacatggtgggatatttctccaaggagaaagagagtgcagacgggtacaacgttgcttgtattctgactatgcctcaatatcagcgcaaaggctacggccgacttctgatccagttctcgtacgagctctctcgaatcgaaggaaagcttggctcccctgaaaagccactgtcagatttgggcctgctgagttatcgacaatattggtcagaaaacattctggaattcctcatgggttacaacgaacgtgacgagaaagtcacaatcgaggcgatttctacagctctggccatgacaacacaggatgtcgagcacactctccaagcattgcggatgcaggtctaccacaagagtgaccacaagattgtgatacccgagaagttgatcgagcaacgcgaaaagaccaaactgaagaggaagcgaaccgtggacccaaccaagatccaatggaaacctccagtattcacagcttcaagccgaacatggggatggtaa

SEQ ID NO: 92587 - protein, 502 aa, Gibberella zeae
MAGGTPGGEPTVGSGEPRLKSLATPETIKTGCIAWVEKEGQPRRAEILSIKTTKSGKQFYCNFDNFNKRLDEWVPVIRLDFTREVEWPNPEKEKPKDPKAKKAPTVQSKKTQPSKKSQKRPSKREQSTTSEANTPHPWTDFVENQNRQKSASIGPDGDSQARASVDGGETPGGGDEMEVDERETEVKREPAEFSREVEIEKLRTSGSMTQNPTEVSRIRNISKVQFGRFDLYPWYFSPYPEIFSQEDVIFICEFCLSYYGDLKAFTRHRKKCTLQHPPGNELYRNEEISFFEIDGRRQRTWCRNLCLLSKMFLDHKTLYYDVDPFLFYVMTVRTEKGCHMVGYFSKEKESADGYNVACILTMPQYQRKGYGRLLIQFSYELSRIEGKLGSPEKPLSDLGLLSYRQYWSENILEFLMGYNERDEKVTIEAISTALAMTTQDVEHTLQALRMQVYHKSDHKIVIPEKLIEQREKTKLKRKRTVDPTKIQWKPPVFTASSRTWGW

SEQ ID NO: 92588 - DNA, 1320 bp, Kluyveromyces lactis
  CDS (1)..(1320)
atgagtcacggcgaagaaaaggaacctgggattccccagaaggttgacagcatcgatgagattttcgttggatgcaagtcatgggtactaaaagatggtcaagatcgtcttgctgaaattctatccattaacagcagaagagatccacctaagttctacgtgcattatgaagacttcaataaacgtctagatgaatggatcactgctgataggttacagatagacaaggaagtcatttttcctaggcctaaagagcttgaagagaagaaagactcgaagaaaaagaagcagcaacagaataaaagtgctacaccacaagcagccagtgctactccggatggtggggatgtgatggatttggataatttgaatgtacaagggattcctaatgaagatatttccagagaagatgaaataaagaagcttcgtacatcggggtcaatgacacagaatcagaatgaggtggctagagttagaaatttgaacaaggtgattatgggcaaatatgaaatagagccatggtacttttcaccttatccaatagagttgactgatgaggatgtggtatatatcgatgatttttccctacaatatttcggatcaaagaaacaatatgaacgatacagaaagaaatgtactctacgacatcctccaggtaacgagatatatagagatgactatgtttccttctttgaaattgatggtcggaaacagaggacatggtgccgtaatctatgtcttttgtctaaacttttcttggatcataaaacgttgtactatgatgttgatccatttttattttactgtatgactaggcgtgatgaactaggccatcatattgtcggttatttctcaaaggaaaaggaatcagctgatgcttataatgtggcatgtattttaacactacctcaatatcaaagaatgggttacggtagactattaatcgagttttcttatgagttatctaagaaagagggtaaagtcggatcaccagaaaagccgttatcggatttgggtttgttatcttacagagcatactgggccgacaccttgattaagcttttggtagagcacggccaggaaatcaccatcgatgaagttagttcaatttcctctatgactaccactgatattcttcatactgcaaaagccttagaaatattaaggttctatcgaggtcagcatgtactgtatttgaatagcgatgtgatgaaaaggtacaaaaagctaaagaataataagaggagatctatagatcctcaaaaattaatctggacacccccagtatttaccgcttcacaattacgtttcgcatggtaa

SEQ ID NO: 92589 - protein, 439 aa, Kluyveromyces lactis
MSHGEEKEPGIPQKVDSIDEIFVGCKSWVLKDGQDRLAEILSINSRRDPPKFYVHYEDFNKRLDEWITADRLQIDKEVIFPRPKELEEKKDSKKKKQQQNKSATPQAASATPDGGDVMDLDNLNVQGIPNEDISREDEIKKLRTSGSMTQNQNEVARVRNLNKVIMGKYEIEPWYFSPYPIELTDEDVVYIDDFSLQYFGSKKQYERYRKKCTLRHPPGNEIYRDDYVSFFEIDGRKQRTWCRNLCLLSKLFLDHKTLYYDVDPFLFYCMTRRDELGHHIVGYFSKEKESADAYNVACILTLPQYQRMGYGRLLIEFSYELSKKEGKVGSPEKPLSDLGLLSYRAYWADTLIKLLVEHGQEITIDEVSSISSMTTTDILHTAKALEILRFYRGQHVLYLNSDVMKRYKKLKNNKRRSIDPQKLIWTPPVFTASQLRFAW

SEQ ID NO: 92590 - DNA, 1392 bp, Schizosaccharomyces pombe
  CDS (1)..(1392)
atgtcgaatgatgttgatgatgagtccaagattgaaacaaagtcttatgaggctaaagacatagtttataaatccaaagtctttgcatttaaggatggagaatatcgaaaggcggagattttaatgattcaaaaaagaactagaggcgtcgtctactatgtacactataatgactacaataaacgtttagatgaatggattacaatagataatattgatttatcgaaaggaattgagtatccaccgccggagaagccaaaaaaggctcatggaaaaggaaaatcctcaaaacgtccaaaagctgttgacagacgacgatcgattacagcaccttcaaaaactgagccttcgacgccttctacggagaaacctgaaccatccaccccttctggagaaagtgatcatggatcaaatgccgggaatgaaagtttaccgttattggaggaagaccacaagcccgaaagtctttcaaaagaacaagaagtagaaaggttacggttcagtggctcaatggttcaaaatcctcacgaaatagctcgaattcgtaatataaacaaaatttgcataggagatcatgaaattgaaccttggtacttctcaccgtaccctaaagaattttcggaagtagatatagtttatatttgcagtttttgtttctgctattacggatctgagcgacaatttcaaagacaccgcgaaaaatgtacattgcagcatccacccggaaatgaaatataccgtgatgactatatatccttttttgaaattgatggaagaaagcaacgtacatggtgtaggaatatttgtcttttgtccaaactttttctggatcacaaaatgctttactatgatgttgatccctttttgttttactgtatgtgtcgccgcgatgaatatggatgtcacttggtaggatatttctcaaaagaaaaagagtcctccgaaaattacaaccttgcttgtatcttaactttacctcaataccaaagacatggttatggcaagttactcatacaattttcttatgaattgaccaagcgtgagcacaaacacggctcacctgaaaaaccactttctgatttggggttgattagttatcgagcgtattgggctgaacaaatcatcaaccttgtgcttggaatgcgaactgaaaccactattgacgaattagccaacaaaacttcaatgactactaatgatgtgctacatacacttcaagcactaaatatgcttaaatattacaaaggtcaatttattatctgtatttcagatggaattgagcaacaatacgaaagattgaagaacaaaaaaagaagaaggatcaatggagatttgttggcagattggcaacctcctgtttttcacccttcccaactacgatttggatggtaa

SEQ ID NO: 92591 - protein, 463 aa, Schizosaccharomyces pombe
MSNDVDDESKIETKSYEAKDIVYKSKVFAFKDGEYRKAEILMIQKRTRGVVYYVHYNDYNKRLDEWITIDNIDLSKGIEYPPPEKPKKAHGKGKSSKRPKAVDRRRSITAPSKTEPSTPSTEKPEPSTPSGESDHGSNAGNESLPLLEEDHKPESLSKEQEVERLRFSGSMVQNPHEIARIRNINKICIGDHEIEPWYFSPYPKEFSEVDIVYICSFCFCYYGSERQFQRHREKCTLQHPPGNEIYRDDYISFFEIDGRKQRTWCRNICLLSKLFLDHKMLYYDVDPFLFYCMCRRDEYGCHLVGYFSKEKESSENYNLACILTLPQYQRHGYGKLLIQFSYELTKREHKHGSPEKPLSDLGLISYRAYWAEQIINLVLGMRTETTIDELANKTSMTTNDVLHTLQALNMLKYYKGQFIICISDGIEQQYERLKNKKRRRINGDLLADWQPPVFHPSQLRFGW

SEQ ID NO: 92592 - DNA, 1698 bp, Ustilago maydis
  CDS (1)..(1698)
atggcacctcgaacacagaagtcgacaagcggcacgccgggcggctcaggaacgcctggcccggacgaaggcccccaaatcagtcccggaggtacgtacggattggaagacgtcgttgtaggatgcaaggcattcgtgcagaagcccgacgtggtcacaggcgagatggaggagaggaaggccgagattctgtcgattcgcgaaaaacccaagcctcgccttactaagaagcagcaggcggagctggcagacaagccagcgcccactctggaagaaacgctcgagtactatgttcactactgcgaattcaataagcgtctcgacgaatgggtcagtggtacacgtctcatcacctcacgcgagctcgagtggccaaagaaggaagtcactagtgataagaccaagcgaaaggtgattcgtgcaggcagcggtgcgacaactccctcgacaccgctcacacccactggcaagggctatcgcggcgctggtgcgagcaacctgctcaagaaggccgccgcacaggctgccaagaacgttcagggggaaagtggtctcgaaacaccacagaagcgcaaagccgattctggggacacctccacagcgcaaagcattcgcgccgactctattgatgcggatgcggatggcgaagacgatgaaaatggcgccgtggttgccatggagatgcttggcggcaatgaccagcaggagaaggacgatgttgctaccgagagcaatggcggcctcactgcatcgctcaacgccaatcaaggtcaagagacgtttagcaagaagcaagagatcgaaaaattgcgaacgtcgggctcaatgacgcaatcggtctccgaagtggcaagagtcaagaatctcaacaagatccagatgggcaaatccgaggtagagacgtggtactttagtccttatccgctcgaatacgcccacattgataccttgtacatctgcgagatgtgtttatcgtattttccttcgccctttactctcaaacgtcatcgaagcaagtgtacgctcttgcatccgccgggcaacgagatctaccgccacgaagacatttccttcttcgagatcgacggccgacttcaaaggacgtggtgtcgaaatttgtgcttgctgagcaagtgctttctcgaccacaagacgctctactacgacgtcgatcctttcctgtactactgcatggtcaagcgcgatgacctcggttgccacctgctcggctacttttccaaagagaaggattcggccgaaaactacaacgttgcctgtatcttgacattgcctcagcaccagcgagccggctacggtaagctgctcattgaattctcgtacgagctcactaagatcgaaggcaagctcggcagtcccgaaaaaccgctctccgatctgggtctactcagctaccgtgcctactgggccgagatcattgtcgaattgttgctcaagaccgaagacgagatcagcattgaggaaattgcccaaaagacggctttcacccacgccgacatcctacatacctgcatggcactcaacatgcttaagcagtaccaaggcaagcacatgattgtcttgagtgacttgattatctcaaaatatacggccaagcgtcctagaaaacgcatcaatccacagaagctgcactggaccgccaagaattggcatcgctcccagctcaatttcggctggtag

SEQ ID NO: 92593 - protein, 565 aa, Ustilago maydis
MAPRTQKSTSGTPGGSGTPGPDEGPQISPGGTYGLEDVVVGCKAFVQKPDVVTGEMEERKAEILSIREKPKPRLTKKQQAELADKPAPTLEETLEYYVHYCEFNKRLDEWVSGTRLITSRELEWPKKEVTSDKTKRKVIRAGSGATTPSTPLTPTGKGYRGAGASNLLKKAAAQAAKNVQGESGLETPQKRKADSGDTSTAQSIRADSIDADADGEDDENGAVVAMEMLGGNDQQEKDDVATESNGGLTASLNANQGQETFSKKQEIEKLRTSGSMTQSVSEVARVKNLNKIQMGKSEVETWYFSPYPLEYAHIDTLYICEMCLSYFPSPFTLKRHRSKCTLLHPPGNEIYRHEDISFFEIDGRLQRTWCRNLCLLSKCFLDHKTLYYDVDPFLYYCMVKRDDLGCHLLGYFSKEKDSAENYNVACILTLPQHQRAGYGKLLIEFSYELTKIEGKLGSPEKPLSDLGLLSYRAYWAEIIVELLLKTEDEISIEEIAQKTAFTHADILHTCMALNMLKQYQGKHMIVLSDLIISKYTAKRPRKRINPQKLHWTAKNWHRSQLNFGW

SEQ ID NO: 92594 - DNA, 1410 bp, Yarrowia lipolytica
  CDS (1)..(1410)
atggctctcgcagaagcagacttgcccaacggcaaaaccaacggcaaagcctcggggtccgaggagactcctgcgcccgttcagaaggtcgacatgaacgtggcaatcaacgagctccgtgtgggctgcaaagtccacgtcgagaaagacggtgaggaccgagttgctgaaattctcagcgtgcaaatgagacgtggtaacctcgagttctatgtgcactacgtcgagttcaacaagcgtctggatgagcgtattgcggctactcgagtcgacttgtcacagggtgtcatttggcccgagccagagaagcccaagaagcctctcagtggtgctgcaaaggagagcagcaaggagaagaagaagaacccctccaagaagcagaagctcacagattcggctgcaactactcctggagccaattcggaagatgtcatggacctggacaacctccaggttaacggcaccacccaggaccccgacaatttcaaccgtgacgaggagattgagaagctcagaactggaggaagtatgacacagagcagtcatgaggtggctcgagttcgaaatttacagagaattgttctaggcaatcatgtcatcgaaccgtggtacttttctccctatcctatcgagctgaccgaagaagatgaaatctacatttgcgactttaccctgtgttatttcgggtccaagaagcagtttgagcggttcagatccaaatccactctgagacatcctcctgggaacgaaatctatcgagatgaggcagtcagtttcttcgagattgacggcagaaagcagagaacatggtgccgaaacctgtgtctcctttcaaagcttttcctggatcataagactctctactacgatgtggaccccttccttttctactgcatgactcgacgagatgagaagggtcaccatctggtaggatacttttccaaggagaaggagtctgctgagggatacaatgtcgcttgtattctcacactgccgcaataccagcgtcacggttatggccgccttcttattgacttctcatatgccctttccaaggctgagggcaagactggttccccagaaaagcctctttcagatctgggtctgctgtcataccgagcctattgggcagacaccattattgagttgctcatggagaagggtaagcaggagatgacaatcgaagacattgcctccgtgaccgccatgaccactacagatgtgctgcataccctgcagacatacaacatgctcaagtactacaagggccaacacatcatttgtttgacagacagtgtgtgcgaaaagtatgaaaagatgctcaaaaagcggcgccgaaaggtcaactcggagctcctcaagtggaagccccccgtattcacagctgcacagctgcggtttgcttggtaa

SEQ ID NO: 92595 - protein, 469 aa, Yarrowia lipolytica
MALAEADLPNGKTNGKASGSEETPAPVQKVDMNVAINELRVGCKVHVEKDGEDRVAEILSVQMRRGNLEFYVHYVEFNKRLDERIAATRVDLSQGVIWPEPEKPKKPLSGAAKESSKEKKKNPSKKQKLTDSAATTPGANSEDVMDLDNLQVNGTTQDPDNFNRDEEIEKLRTGGSMTQSSHEVARVRNLQRIVLGNHVIEPWYFSPYPIELTEEDEIYICDFTLCYFGSKKQFERFRSKSTLRHPPGNEIYRDEAVSFFEIDGRKQRTWCRNLCLLSKLFLDHKTLYYDVDPFLFYCMTRRDEKGHHLVGYFSKEKESAEGYNVACILTLPQYQRHGYGRLLIDFSYALSKAEGKTGSPEKPLSDLGLLSYRAYWADTIIELLMEKGKQEMTIEDIASVTAMTTTDVLHTLQTYNMLKYYKGQHIICLTDSVCEKYEKMLKKRRRKVNSELLKWKPPVFTAAQLRFAW

SEQ ID NO: 92596 - DNA, 1475 bp, Arabidopsis thaliana
  CDS (1)..(1338)
atgggatcgtctgcggatacagagacggcgatgataatcgccacaccggcgtcgaaccataataatccggcaaccaacggcggagatgcgaatcagaatcatacttctggtgcgatactcgctctcacgaattcagaatcggatgcttcgaagaagagaagaatgggggtgcttccgctcgaggttggtactcgcgtgatgtgtcaatggagagacggaaaataccatccggtgaaggttatcgagcgccgaaagaattataatggtggtcacaatgattacgagtactacgttcattacacagagtttaatagaagattggatgaatggattaagcttgaacagcttgaccttgattcagtagagtgtgctttagatgaaaaagttgaagacaaggtgactagcttgaagatgacacgacaccagaaacggaagattgatgagactcatgtagagggtcatgaagagctggatgctgccagtttgcgtgaacacgaggagttcacgaaagtgaagaacatagctacgattgagcttgggaagtatgagattgagacgtggtacttctctccttttcctccagaatacaatgactgcgtgaagctctttttctgtgagttttgcctcagttttatgaagcgcaaagagcagcttcaaagacatatgaggaaatgcgatttgaagcacccccctggggatgaaatctatcgaagctctactttgtcaatgtttgaggtggatggcaagaagaataaggtctatgcacagaacctctgttatctggcaaagttatttcttgaccacaaaactctttactatgacgttgatttgttcctgttctatattctctgtgaatgtgatgatcgtggatgccacatggttggatacttttcaaaggaaaaacactcagaagaagcttacaacttggcttgcatccttacacttcctccatatcaaaggaagggctatggcaaattcttaatagccttctcctatgaactctcaaagaaagagggcaaagtcgggacaccggaaaggccgctctctgatctagggttagtgagttacagaggttactggactcggattttattagacattttgaaaaagcacaagggaaacatatctatcaaggagctgagcgacatgacagcgattaaagcagaagatatattaagcaccctgcagagcttggaactgatacaatacaggaaaggacaacacgtaatctgcgcggatcctaaggtactggaccgacacttgaaagcggcaggccgaggtggtcttgatgtggatgtgagcaaaatgatatggactccttacaaagagcagagctaagagggcattacacttcaaatagttatggttatggtctacttttaatctgcatatccttagatgacttttgtctgtaacaatttaacacgcactctgttcaatagatcttgtaactgtaggaatcttttgtctggatg

SEQ ID NO: 92597 - protein, 445 aa, Arabidopsis thaliana
MGSSADTETAMIIATPASNHNNPATNGGDANQNHTSGAILALTNSESDASKKRRMGVLPLEVGTRVMCQWRDGKYHPVKVIERRKNYNGGHNDYEYYVHYTEFNRRLDEWIKLEQLDLDSVECALDEKVEDKVTSLKMTRHQKRKIDETHVEGHEELDAASLREHEEFTKVKNIATIELGKYEIETWYFSPFPPEYNDCVKLFFCEFCLSFMKRKEQLQRHMRKCDLKHPPGDEIYRSSTLSMFEVDGKKNKVYAQNLCYLAKLFLDHKTLYYDVDLFLFYILCECDDRGCHMVGYFSKEKHSEEAYNLACILTLPPYQRKGYGKFLIAFSYELSKKEGKVGTPERPLSDLGLVSYRGYWTRILLDILKKHKGNISIKELSDMTAIKAEDILSTLQSLELIQYRKGQHVICADPKVLDRHLKAAGRGGLDVDVSKMIWTPYKEQS

SEQ ID NO: 92598 - DNA, 1353 bp, Oryza sativa
  CDS (1)..(1353)
atgggctcgatggaggcgtccaccgcgccggagaacggcaccgccgccgccgcggcggccgcggcctcgacggcgtgcaacggcgcgggcggcggcggcggcgccgccgccgcctcgaacggcggcggggtagagaggaggctgaggtcctccgccgcgtccgcgtcgtgggcgtcgcatctgccgctggaggtgggcacgcgcgtgatgtgccggtggcgcgaccagaagctccatcccgtcaaggtcatcgagcgccggaagtcctccacctcctcctcccccgccgattacgagtactacgtccactacaccgagttcaataggaggctcgatgagtgggttaaacttgaacaacttgatcttgagactgttgagaccgatgttgatgagaaggtagaagataaggcaacaagcttgaagatgacacggcaccagaagcgtaaaattgatgaaacccatgtggagcaaggtcatgaggagcttgatgctgctagtttgcgggaacatgaagagttcacaaaggtgaaaaatatagcgaagatagaacttgggagatatgagatagatacatggtatttctctcctttcccaccggagtataatgactctccaaagctgttcttctgtgagttttgcctcaacttcatgaagcgcaaggaacagcttcagaggcacatgaaaaaatgtgatcttaaacatccccctggtgatgaaatatacagaagtggaaccctgtctatgtttgaggttgatggcaagaagaacaaagtttatgggcagaacctttgttatcttgccaaactatttcttgatcacaagacactttattacgatgttgatttgtttttgttctacgtcctgtgtgaatgtgatgatcgggggtgtcatatggtggggtatttctccaaggagaaacactctgaggaatcttacaatttggcttgcatcctcactctccctccatatcaaagaaaaggatatgggaagttcctgattgccttctcctatgagctttctaagaaggaaggtaaagtagggacaccggagcgccctctttctgatcttggtctgctcagttatagaggttattggactagagtgcttctagagattttaaagaaacataagagcaacatatccattaaggagcttagcgatatgacggcaataaaagcggacgacatcttgagcacgcttcagagtctggacctgatccagtaccggaaaggtcagcacgtcatctgcgctgaccccaaggttctcgaccgccacctcaaggccgccggccggggtggcctcgaggtcgacgttagcaagctgatctggacaccctacaaggaacaaggctaa

SEQ ID NO: 92599 - protein, 450 aa, Oryza sativa
MGSMEASTAPENGTAAAAAAAASTACNGAGGGGGAAAASNGGGVERRLRSSAASASWASHLPLEVGTRVMCRWRDQKLHPVKVIERRKSSTSSSPADYEYYVHYTEFNRRLDEWVKLEQLDLETVETDVDEKVEDKATSLKMTRHQKRKIDETHVEQGHEELDAASLREHEEFTKVKNIAKIELGRYEIDTWYFSPFPPEYNDSPKLFFCEFCLNFMKRKEQLQRHMKKCDLKHPPGDEIYRSGTLSMFEVDGKKNKVYGQNLCYLAKLFLDHKTLYYDVDLFLFYVLCECDDRGCHMVGYFSKEKHSEESYNLACILTLPPYQRKGYGKFLIAFSYELSKKEGKVGTPERPLSDLGLLSYRGYWTRVLLEILKKHKSNISIKELSDMTAIKADDILSTLQSLDLIQYRKGQHVICADPKVLDRHLKAAGRGGLEVDVSKLIWTPYKEQG

SEQ ID NO: 92600 - DNA, 1513 bp, Arabidopsis thaliana
  CDS (15)..(1352)
gacccgaccgagaaatgggatcgtcagcgaatacagaaaccaacggcaacgcaccgccaccgtcgtcgaatcaaaagcctccggctacgaacggcgttgatgggtctcatcctcctcctcctcctttaactcctgatcaagctattatagagtcggatccgtcgaagaagaggaaaatggggatgcttcctctagaagtgggtactcgtgtgatgtgtcggtggagagacgggaaacaccatccggtgaaagtaattgagcgccggcggatacataacggcggtcaaaatgattacgagtattacgttcattacactgagtttaataggaggctggatgaatggactcagctggaccaactggaccttgattcagtagagtgcgctgtagatgaaaaagtggaagacaaggtaacaagcttgaagatgacacgtcaccagaagaggaagatcgatgagacacatatagagggtcatgaagagctggatgcagcaagtttgcgtgaacatgaagagttcacgaaagtgaagaacatatcaacaattgagcttggaaaatatgagattgagacttggtacttctccccttttccgccagaatacaatgactgtgtgaagctctttttttgtgagttttgcctgaacttcatgaaacgcaaagagcagcttcaaaggcatatgaggaagtgtgacctgaagcacccacctggtgatgaaatttaccgaagtggtaccttgtcaatgtttgaggtagatggcaaaaagaacaaggtttatgcacagaatctctgctacctggcaaagttatttcttgaccacaaaactctttactacgatgttgatttgtttctattctacgttctttgcgaatgtgatgaccgaggatgccacatggttgggtacttttcaaaggagaagcattcggaagaagcatacaacttagcttgcattctaaccctgccttcatatcaaagaaaaggctatggaaagttcttaatagccttttcctatgaactgtcaaagaaagagggaaaagttgggacaccggaaagacccttgtcggatctaggcttactaagctacagaggttattggactcgtgttctattagaaatcttgaaaaaacataagggaaacatttctatcaaggagctgagcgacgtgacagcaatcaaagcggaagatatattaagcacacttcagagcctagaactgatacagtacaggaaaggacagcatgtgatctgtgcggatccaaaggttctggaccgacatctgaaagctgcaggccgaggtggtcttgatgtagatgctagcaaactgatttggacaccttacaaggaccagagttaagagtaagtacactcctcttgtgccattggatttgatttgagtgtgtaagtaaagcgggctgtcttattctcctgaaatgtaagtgtactttacttgtaaatgttgaaatcgtacttggaatggtgtttgtttacaactcttataatgaggaaatttgaagc

SEQ ID NO: 92601 - protein, 445 aa, Arabidopsis thaliana
MGSSANTETNGNAPPPSSNQKPPATNGVDGSHPPPPPLTPDQAIIESDPSKKRKMGMLPLEVGTRVMCRWRDGKHHPVKVIERRRIHNGGQNDYEYYVHYTEFNRRLDEWTQLDQLDLDSVECAVDEKVEDKVTSLKMTRHQKRKIDETHIEGHEELDAASLREHEEFTKVKNISTIELGKYEIETWYFSPFPPEYNDCVKLFFCEFCLNFMKRKEQLQRHMRKCDLKHPPGDEIYRSGTLSMFEVDGKKNKVYAQNLCYLAKLFLDHKTLYYDVDLFLFYVLCECDDRGCHMVGYFSKEKHSEEAYNLACILTLPSYQRKGYGKFLIAFSYELSKKEGKVGTPERPLSDLGLLSYRGYWTRVLLEILKKHKGNISIKELSDVTAIKAEDILSTLQSLELIQYRKGQHVICADPKVLDRHLKAAGRGGLDVDASKLIWTPYKDQS

SEQ ID NO: 92602 - DNA, 1626 bp, Drosophila melanogaster
  CDS (1)..(1626)
atgaaaattaaccacaaatatgagttcgacgacgatgtggcctccatatgcgagtcaacggccgccctaaccgagggatgtcgtttacccgtcaggatgcacaaaacggacgactggccactagcggagattgtgagcatcaaggagttggatgggcgccggcagttttacgtgcactatgtggacttcaacaagcgcttggacgagtgggtcaacgaggaggatctgtacacgcgaaaggtgcaatttccgcggagagacggctcacaaacaggcaccagcactggagtgaccacgccacagcgccaccattccctagcgggcagcgtttctcggcctacatcaccgcaacaccctggttccggggctctggcagccatcccccagactcctactggtgcatcaggcagtgttcctccccctgctggcattccaaactctgtggctccacccggaacaccaagcagtgggggagagcttgtgaatggcaacaatctggccgcagcccttcagaaacgcatcaatcgcaagcgaaaaaaccacggaggctcggcccatggacaccacagtctgaccagtcaacagcagcagtcacatccgcatcctacaactccgcagacacccacggctacgcccgtgcatgtgaccggcgacggtttaataagcggagcggccaatgatgatggtgatggatcgcaggatggcaagacgcccacgccgaggcaatcaggcagcatggttacgcaccaggacgacgtggtcacccgcatgaagaacgtggagatgatcgagctgggcaggcatcgcattaagccctggtatttctcaccctatccgcaagagctgtgtcaaatgccctgcatctacatctgcgagttctgcctgaagtacaggaagagcaggaagtgcctggagaggcacctgtccaagtgcaatcttaggcatccaccgggaaacgagatctatcgcaaacatacaatttccttctttgaaatcgatggacgcaaaaacaaggtgtatgcccagaacttgtgcctgcttgccaaactctttctcgaccacaagacactctactatgataccgatccgtttctcttctacgtaatgacagagttcgactcgcgcggcttccacatagtagggtacttctccaaggagaaggagagcacagaggactacaacgtggcctgcattctcacaatgcctccgtatcagcgcaagggctacggcaagctgctcattgagttcagctacgagttgtccaagttcgagggcaagacgggatcgccggagaaaccattgtctgatctgggtttgctgtcctatcgatcgtactgggcgcaaaccatactggagatctttatcagccaaaacccgagcacggacggcgaaaagcccactataactataaacgacatctgcgaatgcacatccatcaaaaaagaggacgtgatctcaacgctgcagaacctgaacctgatcaactactacaagggccagtacatcgtgtgcatcaaccgggttatcatcgagcaacaccggcgagcaatggacaagcgcaagatccgcatcgactcgaaatgcctgcactggacacccaaagactggtccaagcgctccaaatga

SEQ ID NO: 92603 - protein, 541 aa, Drosophila melanogaster
MKINHKYEFDDDVASICESTAALTEGCRLPVRMHKTDDWPLAEIVSIKELDGRRQFYVHYVDFNKRLDEWVNEEDLYTRKVQFPRRDGSQTGTSTGVTTPQRHHSLAGSVSRPTSPQHPGSGALAAIPQTPTGASGSVPPPAGIPNSVAPPGTPSSGGELVNGNNLAAALQKRINRKRKNHGGSAHGHHSLTSQQQQSHPHPTTPQTPTATPVHVTGDGLISGAANDDGDGSQDGKTPTPRQSGSMVTHQDDVVTRMKNVEMIELGRHRIKPWYFSPYPQELCQMPCIYICEFCLKYRKSRKCLERHLSKCNLRHPPGNEIYRKHTISFFEIDGRKNKVYAQNLCLLAKLFLDHKTLYYDTDPFLFYVMTEFDSRGFHIVGYFSKEKESTEDYNVACILTMPPYQRKGYGKLLIEFSYELSKFEGKTGSPEKPLSDLGLLSYRSYWAQTILEIFISQNPSTDGEKPTITINDICECTSIKKEDVISTLQNLNLINYYKGQYIVCINRVIIEQHRRAMDKRKIRIDSKCLHWTPKDWSKRSK

SEQ ID NO: 92604 - DNA, 1305 bp, Glycine max
  CDS (1)..(1305)
atgggttcactcgaggccccaaccgccgcggaaaacggttccgctcccgccgccggcaacggaaaatccccctccgtcaacggcgcggaggcggcgctggagcccgacgcatcgaagcggcggagatcgtcggtgctcccactggaggtgggcacgcgcgtcatgtgccggtggagggacaacaagtaccaccccgtcaaagtcatcgaacgccgcaaggttcccaacgtcatccccaacgattacgagtactacgtccattacactgagttcaataggaggcttgatgagtgggtgaagcttgaccagttggatcttaattcagtggaggctgttgttgatgagaaagtggaggagaagggtgcaacaggtttgaagatgactcgccaccaaaagaggaagattgatgagacacatgtagagggacatgaggagcttgatgctgccagtttgcgagaacatgaggaatttaccaaagtgaaaaatatagctactattgagcttggaagatatgagattgagacatggtacttctccccattcccaccagaatacaatgactgtttgaagctgtacttttgtgagttttgcctcaatttcatgaagcgcaaagaacagcttcagaggcatatgaggaaatgtgatcttaagcatccccctggtgatgagatatacagaagtggtacactgtcaatgtttgaggtcgatggcaaaaagaacaaggtttatgggcagaacctttgttatttggccaagttatttcttgatcacaagaccctctattatgatgtagacctgtttctgttctatgttttgtgtgaatgtgatgatcgaggatgtcacatggttggctatttctccaaggaaaaacattctgaggaatcttacaatttggcatgtatcctcaccctaccaccttaccaaaggaaaggctatggaaaatttctaattgcattctcatatgagctgtccaaaaaagagggcaaagttggcacacctgaaagacccctttcggaccttggactgctaagctacagaggatattggaccagggttctcttagacattctgaagaagcataagggaaacatttctatcaaggaactgagtgatatgactgccattaaagctgaagacatattaaccactctgcagagcctagaattgattcaatacaggaaaggtcagcatgttatatgcgcagatccgaaagtgttggatcgccatcttaaagctgctggcagagggggcctggaggttgatgttagcaaactgatctggactccttataaagaacaaagttga

SEQ ID NO: 92605 - protein, 434 aa, Glycine max
MGSLEAPTAAENGSAPAAGNGKSPSVNGAEAALEPDASKRRRSSVLPLEVGTRVMCRWRDNKYHPVKVIERRKVPNVIPNDYEYYVHYTEFNRRLDEWVKLDQLDLNSVEAVVDEKVEEKGATGLKMTRHQKRKIDETHVEGHEELDAASLREHEEFTKVKNIATIELGRYEIETWYFSPFPPEYNDCLKLYFCEFCLNFMKRKEQLQRHMRKCDLKHPPGDEIYRSGTLSMFEVDGKKNKVYGQNLCYLAKLFLDHKTLYYDVDLFLFYVLCECDDRGCHMVGYFSKEKHSEESYNLACILTLPPYQRKGYGKFLIAFSYELSKKEGKVGTPERPLSDLGLLSYRGYWTRVLLDILKKHKGNISIKELSDMTAIKAEDILTTLQSLELIQYRKGQHVICADPKVLDRHLKAAGRGGLEVDVSKLIWTPYKEQS

SEQ ID NO: 92606 - DNA, 1320 bp, Zea mays
  CDS (1)..(1320)
atgggctctatggaagcgtcgaccgcgccggagaacggctccgccgccggcggcggagccggcaacggggcgggcgccgcgtcgaacggaggaggtgttgagaggaggctgaggtcctcggctgcgcccgcgtcgtgggcagcccagcttcccctggaggtgggcacacgcgtgatgtgccggtggcgcgaccagaagctccaccctgtcaaggtcatcgagcgccgcaagggctccgcttcctcttcccccgctgactacgagtactacgtccattacaccgagttcaatagaagacttgacgagtgggttaagcttgagcagcttgatcttgctactgtcgagaccgatgttgatgagaaagtcgaagataaggcaacaagcttaaagatgacacggcaccagaagcgtaaaattgatgaaacacatgtggagcaaggacacgaggagcttgatgcagccagcttgcgggaacatgaagaattcacaaaagtgaaaaatattgcaaagattgaacttgggagatatgagatagatacatggtatttctctccttttccaccagagtacaatgactgcccgaagctgtttttctgtgaattttgcctcaacttcatgaagcgcaaagaacagcttcagaggcacatgaagaagtgcgatcttaagcaccctccaggtgatgaaatctatagaagtggaactctttcgatgttcgaggttgatgggaagaagaacaaggtttatggacagaatctttgttatctggccaagctatttcttgatcacaagacattgtactatgatgttgatttattcttgttttatgttctctgcgaatgtgatgaccggggatgtcatatggtgggatatttctctaaggaaaaacactctgaagaatcttataatttggcttgcattctcactcttcccccataccaaagaaaaggatatgggaagttcctgattgctttctcatatgaactttccaagaaggaaggtaaagttgggacaccggagcgccctctttctgatcttggcctgctcagctatagaggttattggactagagtgcttctggaaattctaaagaaacataagggtaacatatctataaaggaactcagcgacatgacggcaataaaagcagatgacatcttgagcacgctgcagagcctggacctaatccagtatcgcaaagggcagcacgtcatctgcgcggacccgaaggtcctcgaccgccacctgaaggcggcgggtcggggaggcctggacgtggacgttagcaagctgatctggactccctacaaggagcaaggctaa

SEQ ID NO: 92607 - protein, 439 aa, Zea mays
MGSMEASTAPENGSAAGGGAGNGAGAASNGGGVERRLRSSAAPASWAAQLPLEVGTRVMCRWRDQKLHPVKVIERRKGSASSSPADYEYYVHYTEFNRRLDEWVKLEQLDLATVETDVDEKVEDKATSLKMTRHQKRKIDETHVEQGHEELDAASLREHEEFTKVKNIAKIELGRYEIDTWYFSPFPPEYNDCPKLFFCEFCLNFMKRKEQLQRHMKKCDLKHPPGDEIYRSGTLSMFEVDGKKNKVYGQNLCYLAKLFLDHKTLYYDVDLFLFYVLCECDDRGCHMVGYFSKEKHSEESYNLACILTLPPYQRKGYGKFLIAFSYELSKKEGKVGTPERPLSDLGLLSYRGYWTRVLLEILKKHKGNISIKELSDMTAIKADDILSTLQSLDLIQYRKGQHVICADPKVLDRHLKAAGRGGLDVDVSKLIWTPYKEQG

SEQ ID NO: 92608 - DNA, 24 bp, Artificial sequence
  primer
atgtcccatgacggaaaagaagaa

SEQ ID NO: 92609 - DNA, 24 bp, Artificial sequence
  primer
ttaccaggcaaagcgtaactgaga

SEQ ID NO: 92610 - protein, 520 aa, Artificial sequence
  consensus sequence
  Variant (5)..(6): Xaa in position 5 to 6 is any amino acid
  Variant (7)..(7): Xaa in position 7 is any or no amino acid
  Variant (9)..(9): Xaa in position 9 is any amino acid
  Variant (15)..(57): Xaa in position 15 to 57 is any amino acid
  Variant (58)..(179): Xaa in position 58 to 179 is any or no amino acid
  Variant (181)..(195): Xaa in position 181 to 195 is any amino acid
  Variant (196)..(204): Xaa in position 196 to 204 is any or no amino acid
  Variant (206)..(211): Xaa in position 206 to 211 is any amino acid
  Variant (213)..(215): Xaa in position 213 to 215 is any amino acid
  Variant (217)..(218): Xaa in position 217 to 218 is any amino acid
  Variant (224)..(224): Xaa in position 224 is any amino acid
  Variant (226)..(238): Xaa in position 226 to 238 is any amino acid
  Variant (242)..(252): Xaa in position 242 to 252 is any amino acid
  Variant (254)..(256): Xaa in position 254 to 256 is any amino acid
  Variant (258)..(260): Xaa in position 258 to 260 is any amino acid
  Variant (265)..(265): Xaa in position 265 is any amino acid
  Variant (270)..(273): Xaa in position 270 to 273 is any amino acid
  Variant (275)..(275): Xaa in position 275 is any amino acid
  Variant (278)..(278): Xaa in position 278 is any amino acid
  Variant (281)..(288): Xaa in position 281 to 288 is any amino acid
  Variant (292)..(292): Xaa in position 292 is any amino acid
  Variant (294)..(294): Xaa in position 294 is any amino acid
  Variant (307)..(309): Xaa in position 307 to 309 is any amino acid
  Variant (314)..(318): Xaa in position 314 to 318 is any amino acid
  Variant (320)..(321): Xaa in position 320 to 321 is any amino acid
  Variant (323)..(323): Xaa in position 323 is any amino acid
  Variant (325)..(325): Xaa in position 325 is any amino acid
  Variant (334)..(334): Xaa in position 334 is any amino acid
  Variant (336)..(338): Xaa in position 336 to 338 is any amino acid
  Variant (339)..(339): Xaa in position 339 is any or no amino acid
  Variant (341)..(341): Xaa in position 341 is any amino acid
  Variant (349)..(350): Xaa in position 349 to 350 is any amino acid
  Variant (353)..(353): Xaa in position 353 is any amino acid
  Variant (357)..(358): Xaa in position 357 to 358 is any amino acid
  Variant (361)..(361): Xaa in position 361 is any amino acid
  Variant (368)..(369): Xaa in position 368 to 369 is any amino acid
  Variant (371)..(373): Xaa in position 371 to 373 is any amino acid
  Variant (375)..(375): Xaa in position 375 is any amino acid
  Variant (378)..(378): Xaa in position 378 is any amino acid
  Variant (390)..(390): Xaa in position 390 is any amino acid
  Variant (393)..(399): Xaa in position 393 to 399 is any amino acid
  Variant (401)..(407): Xaa in position 401 to 407 is any amino acid
  Variant (408)..(450): Xaa in position 408 to 450 is any or no amino acid
  Variant (452)..(457): Xaa in position 452 to 457 is any amino acid
  Variant (459)..(463): Xaa in position 459 to 463 is any amino acid
  Variant (465)..(467): Xaa in position 465 to 467 is any amino acid
  Variant (470)..(476): Xaa in position 470 to 476 is any amino acid
  Variant (478)..(478): Xaa in position 478 is any amino acid
  Variant (481)..(502): Xaa in position 481 to 502 is any amino acid
  Variant (503)..(510): Xaa in position 503 to 510 is any or no amino acid
  Variant (512)..(514): Xaa in position 512 to 514 is any amino acid
  Variant (516)..(516): Xaa in position 516 is any amino acid
  Variant (517)..(517): Xaa in position 517 is any or no amino acid
  Variant (519)..(519): Xaa in position 519 is any amino acid
YVHYXXXNXRLDEWXXXXXXXXXXXXXXXXXXXXXXXXXXXXXXXXXXXXXXXXXXXXXXXXXXXXXXXXXXXXXXXXXXXXXXXXXXXXXXXXXXXXXXXXXXXXXXXXXXXXXXXXXXXXXXXXXXXXXXXXXXXXXXXXXXXXXXXXXXXXXXXXXXXXXXXXXXXXXXXXXXXXXEXXXXXXXXXXXXXXXXXXXXXXXXNXXXXXXGXXXIXXWYFSPXPXXXXXXXXXXXXXFCLXXXXXXXXXXXHXXXCXXXHPPGXEIYRXXXXSXFEXDGXXXXXXXXNLCXLXKLFLDHKTLYYDXXXFLFYXXXXXDXXGXHXVGYFSKEKXSXXXXNXACILTLPXXQRXGYGXXLIXFSYELSXXEXXXGXPEXPLSDLGLLSYRXYWXXXXXXXLXXXXXXXXXXXXXXXXXXXXXXXXXXXXXXXXXXXXXXXXXXXXXXXXXXIXXXXXXTXXXXXDXXXTLXXXXXXXYXKGXXXXXXXXXXXXXXXXXXXXXXXXXXXXXXDXXXLXXWXP

SEQ ID NO: 92611 - protein, 44 aa, Artificial sequence
  protein pattern
  Variant (3)..(3): Xaa in position 3 is any amino acid
  Variant (5)..(5): Xaa in position 5 is any amino acid
  Variant (7)..(7): Xaa in position 7 is Leu or Met
  Variant (16)..(16): Xaa in position 16 is Phe or Tyr
  Variant (18)..(18): Xaa in position 18 is any amino acid
  Variant (19)..(19): Xaa in position 19 is Asp or Glu
  Variant (20)..(20): Xaa in position 20 is any amino acid
  Variant (25)..(25): Xaa in position 25 is any amino acid
  Variant (26)..(26): Xaa in position 26 is Leu or Met
  Variant (27)..(27): Xaa in position 27 is Ala, Cys or Thr
  Variant (28)..(29): Xaa in position 28 to 29 is any amino acid
  Variant (30)..(30): Xaa in position 30 is Asp, Ser or Thr
  Variant (31)..(32): Xaa in position 31 to 32 is any amino acid
  Variant (34)..(34): Xaa in position 34 is any amino acid
  Variant (36)..(36): Xaa in position 36 is Phe, Ile, Leu, Met or Val
LCXLXKXFLDHKTLYXDXXXFLFYXXXXXXXXGXHXVGYFSKEK

SEQ ID NO: 92612 - protein, 58 aa, Artificial sequence
  protein pattern
  Variant (2)..(5): Xaa in position 2 to 5 is any amino acid
  Variant (7)..(7): Xaa in position 7 is Leu or Val
  Variant (13)..(13): Xaa in position 13 is Leu or Met
  Variant (15)..(15): Xaa in position 15 is Pro, Gln or Ser
  Variant (16)..(16): Xaa in position 16 is Phe, His or Tyr
  Variant (19)..(19): Xaa in position 19 is any amino acid
  Variant (21)..(21): Xaa in position 21 is Phe or Tyr
  Variant (23)..(23): Xaa in position 23 is Lys or Arg
  Variant (24)..(24): Xaa in position 24 is Phe or Leu
  Variant (27)..(27): Xaa in position 27 is Ala, Asp, Glu, Gln or Ser
  Variant (31)..(31): Xaa in position 31 is any amino acid
  Variant (33)..(33): Xaa in position 33 is Gly, Ser or Thr
  Variant (34)..(35): Xaa in position 34 to 35 is any amino acid
  Variant (37)..(39): Xaa in position 37 to 39 is any amino acid
  Variant (41)..(41): Xaa in position 41 is Ser or Thr
  Variant (44)..(44): Xaa in position 44 is any amino acid
  Variant (51)..(51): Xaa in position 51 is any amino acid
  Variant (52)..(52): Xaa in position 52 is Ile, Leu or Val
  Variant (56)..(56): Xaa in position 56 is Ala, Gly, Gln or Ser
SXXXXNXACILTXPXXQRXGXGXXLIXFSYXLXXXEXXXGXPEXPLSDLGXXSYRXYW

SEQ ID NO: 92613 - protein, 36 aa, Artificial sequence
  protein pattern
  Variant (2)..(3): Xaa in position 2 to 3 is any amino acid
  Variant (4)..(4): Xaa in position 4 is any or no amino acid
  Variant (6)..(7): Xaa in position 6 to 7 is any amino acid
  Variant (8)..(9): Xaa in position 8 to 9 is any or no amino acid
  Variant (14)..(14): Xaa in position 14 is Asp, Asn or Arg
  Variant (16)..(16): Xaa in position 16 is Ile or Leu
  Variant (19)..(21): Xaa in position 19 to 21 is any amino acid
  Variant (22)..(22): Xaa in position 22 is Ile, Leu or Val
  Variant (24)..(24): Xaa in position 24 is Phe, Met or Val
  Variant (25)..(25): Xaa in position 25 is Phe or Trp
  Variant (27)..(27): Xaa in position 27 is any amino acid
  Variant (30)..(30): Xaa in position 30 is His, Lys or Arg
  Variant (31)..(31): Xaa in position 31 is any amino acid
  Variant (32)..(32): Xaa in position 32 is Asn or Gln
  Variant (33)..(33): Xaa in position 33 is Lys or Arg
  Variant (34)..(34): Xaa in position 34 is any amino acid
  Variant (35)..(35): Xaa in position 35 is Trp or Tyr
  Variant (36)..(36): Xaa in position 36 is Ala, Cys, Gly or Ser
RXXXKXXXXHPPGXEXYRXXXXSXXEXDGXXXXXXX

SEQ ID NO: 92614 - protein, 16 aa, Artificial sequence
  protein pattern
  Variant (2)..(2): Xaa in position 2 is any amino acid
  Variant (3)..(3): Xaa in position 3 is Phe, His or Tyr
  Variant (4)..(4): Xaa in position 4 is any amino acid
  Variant (6)..(6): Xaa in position 6 is Asp, Glu, Lys or Arg
  Variant (7)..(7): Xaa in position 7 is Ala, Pro or Thr
  Variant (11)..(11): Xaa in position 11 is Ala or Ser
  Variant (13)..(13): Xaa in position 13 is Phe or Tyr
  Variant (15)..(15): Xaa in position 15 is any amino acid
  Variant (16)..(16): Xaa in position 16 is Asp, Glu or Ser
GXXXIXXWYFXPXPXX

SEQ ID NO: 92615 - protein, 13 aa, Artificial sequence
  protein pattern
  Variant (5)..(5): Xaa in position 5 is any amino acid
  Variant (6)..(6): Xaa in position 6 is Asp, Glu, Gly or Asn
  Variant (7)..(7): Xaa in position 7 is any amino acid
  Variant (8)..(8): Xaa in position 8 is Asp or Asn
  Variant (9)..(9): Xaa in position 9 is Lys or Arg
  Variant (13)..(13): Xaa in position 13 is Asp or Glu
YVHYXXXXXRLDX

SEQ ID NO: 92616 - DNA, 1257 bp, Saccharomyces cerevisiae
  CDS (1)..(1257)
atgtcaggaacattcaatgatataagaagaaggaagaaggaagaaggaagccctacagccggtattaccgaaaggcatgagaataagtctttgtcaagcatcgataaaagagaacagactctcaaaccacaactagagtcatgctgtccattggcgaccccttttgaaagaaggttacaaactctggctgtagcatggcacacttcttcatttgtactcttctccatatttacgttatttgcaatctcgacaccagcactgtgggttcttgctattccatatatgatttatttttttttcgataggtctcctgcaactggcgaagtggtaaatcgatactctcttcgatttcgttcattgcccatttggaagtggtattgtgattatttccctataagtttgattaaaactgtcaatttaaaaccaacttttacgctttcaaaaaataagagagttaacgaaaaaaattacaagattagattgtggccaactaagtattccattaatctcaaaagcaactctactattgactatcgcaaccaggaatgtacagggccaacgtacttatttggttaccatccacacggcataggagcacttggtgcgtttggagcgtttgcaacagaaggttgtaactattccaagattttcccaggtattcctatttctctgatgacactggtcacacaatttcatatcccattgtatagagactacttattggcgttaggtatttcttcagtatctcggaaaaacgctttaaggactctaagcaaaaatcagtcgatctgcattgttgttggtggcgctagggaatctttattaagttcaacaaatggtacacaactgattttaaacaaaagaaagggttttattaaactggccattcaaacggggaatattaacctagtgcctgtgtttgcatttggagaggtggactgttataatgttctgagcacaaaaaaagattcagtcctgggtaaaatgcaactatggttcaaagaaaactttggttttaccattcccattttctacgcaagaggattattcaattacgatttcggtttgttgccatttagagcgcctatcaatgttgttgttggaaggcctatatacgttgaaaagaaaataacaaatccgccagatgatgttgttaatcatttccatgatttgtatattgcggagttgaaaagactatattacgaaaatagagaaaaatatggggtaccggatgcagaattgaagatagttgggtaa

SEQ ID NO: 92617 - protein, 418 aa, Saccharomyces cerevisiae
MSGTFNDIRRRKKEEGSPTAGITERHENKSLSSIDKREQTLKPQLESCCPLATPFERRLQTLAVAWHTSSFVLFSIFTLFAISTPALWVLAIPYMIYFFFDRSPATGEVVNRYSLRFRSLPIWKWYCDYFPISLIKTVNLKPTFTLSKNKRVNEKNYKIRLWPTKYSINLKSNSTIDYRNQECTGPTYLFGYHPHGIGALGAFGAFATEGCNYSKIFPGIPISLMTLVTQFHIPLYRDYLLALGISSVSRKNALRTLSKNQSICIVVGGARESLLSSTNGTQLILNKRKGFIKLAIQTGNINLVPVFAFGEVDCYNVLSTKKDSVLGKMQLWFKENFGFTIPIFYARGLFNYDFGLLPFRAPINVVVGRPIYVEKKITNPPDDVVNHFHDLYIAELKRLYYENREKYGVPDAELKIVG

SEQ ID NO: 92618 - DNA, 1059 bp, Drosophila melanogaster
  CDS (1)..(1059)
atgaaaatcgagtgggctcccaaaggagttcccatggaacggcgtcgccagacgtttgccatggccttcctaatcctatcctttatgatactctcctttggatcctatttcttcgttgctgccgtgctgttctatggaagccttttgtggcgcaccattatggtcatctatttggtctacgtctacgcgaatcacaagagaacccactccattatggatggcaatggctggaaaattaaccgcaacaattggctgtttcggcattatcgggactactttcccgtacagctggtcaagaccgcagagctgccgccgaataagaactacattttggccagttttccgcacggaattttggggactggcatttccattaatatgggtctagacatctccaagtggctgcaactgttcccacaggtgaggcccaaggtggccactttggatcaaaacttcctgacgcccatcgtgcgtggtctcctgagatcttggggcctggtgtcggtttccaaggaggccttagtatatctgctaaccaaatcaaacgatcccaagcacaaggacaatcgtgatgggttcacctccaacgcggtggctattctggtgggtggtgcccaggaggcactagactcgcaccctggcaaatatatattgacactgaagaaccgcaagggattcgttaaaatggccattaggacagggtcttcgattgttcccacgttttcctttggcgaggtggacattctggatcaggttgccaatccaccgaactctcgggttcgtcgctttcaagactttgtaaagaggataacggggatatctccgctgattcccgttggccggggcatcttcaactactcctttggctttctgcccaaccgtcgacgcattgtccaagttgttggcgctcccatcgacgtggttcagagcgatcaaccagacgcagcctatgtggataagatacacaaacaggttattgacgacctggagaagatgttcgccaagtacaaggatcagtacataccgaactccaagcaggacaagctgattatacactag

SEQ ID NO: 92619 - protein, 352 aa, Drosophila melanogaster
MKIEWAPKGVPMERRRQTFAMAFLILSFMILSFGSYFFVAAVLFYGSLLWRTIMVIYLVYVYANHKRTHSIMDGNGWKINRNNWLFRHYRDYFPVQLVKTAELPPNKNYILASFPHGILGTGISINMGLDISKWLQLFPQVRPKVATLDQNFLTPIVRGLLRSWGLVSVSKEALVYLLTKSNDPKHKDNRDGFTSNAVAILVGGAQEALDSHPGKYILTLKNRKGFVKMAIRTGSSIVPTFSFGEVDILDQVANPPNSRVRRFQDFVKRITGISPLIPVGRGIFNYSFGFLPNRRRIVQVVGAPIDVVQSDQPDAAYVDKIHKQVIDDLEKMFAKYKDQYIPNSKQDKLIIH

SEQ ID NO: 92620 - DNA, 1059 bp, Drosophila melanogaster
  CDS (1)..(1059)
atgaaaatcgagtgggcaccactgcgggttcctctggaacgccgactgcagatactggtcacggcctttttcacctccatgctgctgatactattgtcagtttccttccttttggtagctggatcactgatctacggaggtcttttggtgcgtagtctgatggtaacttacttggcctacgtctttgtgcaccacaagaaaacccaatccgttgtggatggcaatggctggatgataacacgcaccaaccttttgcatcgccactatcgtgattactttcccgtggagctggtgaaaacagccgaactgccagctactaagaactacatcttggccagctttccccacggaattctgggcacaggcattggcattaacatgggcttggaaatctccaagtggctggagctattcccccaagtgcgtcccaaactgggcactctggatcagcatttccatgttccgttcatgcgtgaggtcctccgctgctggggtctggtgtcagtgtccaaagaggcgctgatccgtatgctcagcaagtcaaatgatcccaagcacaaggataatcgggatggtttcacctccaatgcggtggccattctggttggcggtgcccaggaagccatggactctcatcctgggcagtacattttaaccttgaagaataggaaaggcttcgtgcgaatggccattagaacgggctcatcgattgttccttcattttcctttggagaggtggacattttcgatcaggtggcaaatccccccaactcgctgctccgacggtttcaggactttgtcaagaagctcaccggagtctctccgctgattcctgtgggccgcggattcttcaactacacctttggcttcctcccattccgacgacgcattgtccaagttgttggtgctcccatcgatgttgttaagaacgagcacccagactcggagtatgtggataaagtgcatggacaggtcattgagtcgctggagaagttattcgatcagtacaaagacaagtacttggagaattcgaagagtgccactctagttgtacactag

SEQ ID NO: 92621 - protein, 352 aa, Drosophila melanogaster
MKIEWAPLRVPLERRLQILVTAFFTSMLLILLSVSFLLVAGSLIYGGLLVRSLMVTYLAYVFVHHKKTQSVVDGNGWMITRTNLLHRHYRDYFPVELVKTAELPATKNYILASFPHGILGTGIGINMGLEISKWLELFPQVRPKLGTLDQHFHVPFMREVLRCWGLVSVSKEALIRMLSKSNDPKHKDNRDGFTSNAVAILVGGAQEAMDSHPGQYILTLKNRKGFVRMAIRTGSSIVPSFSFGEVDIFDQVANPPNSLLRRFQDFVKKLTGVSPLIPVGRGFFNYTFGFLPFRRRIVQVVGAPIDVVKNEHPDSEYVDKVHGQVIESLEKLFDQYKDKYLENSKSATLVVH

SEQ ID NO: 92622 - DNA, 1089 bp, Strongylocentrotus purpuratus
  CDS (1)..(1089)
atggggttagaactcgcgcccctgcggatcccgctccaccggcgtctggagacctttgctgtcttccaatggtggttctgcttcatgttccaagggctgctgtccatactcgtatccgcctatattctattcttcacaagacaaatcttactaatagttatatctattttaaagtgttcatccaaaatttctattccaactctctctctccttgctagctactactggatcatccttttgcttatagcatggatctactatgaccgtcacacgcctgtccgtggtgggcgcccttccaactggatccgccgctggaggatctgggtccacatgcggaactacttccccatcaacctgatcaagaccgcggacctggacccgaagaacaactacatgatgggttcccacccccacggggtcatgagcatgggttcggtcgtcagcttcgggagcgaggcgtgcggcttctcagagaagtttcccgggatgaggccggccctgctgacgttgggaggatggttctatttccccctggtcagggattacgtcatgagttctggtatgtgtgactgcagtcgtgagagtatagactatctcttgggtgagaatgggaaaggcaatgcagtggtgctggttgtgggcggggctattgaatcattagaggcccacccccatgcttacaagctgtatcttaacaggaggaggggcttcatcgccaaggcgatggaacatggtgcccatttagtgccagtctactcgtttggcgagacggaaatctatgaacagatctccaaccccgagggctcgtttctcaggaggtttcaggggatgcttaccaaattgattggattcgccccgcccctctaccacgggcgaggaatcttcaactacagtgtgggattcttgccttatagaaagaatattaatacaatcgttggtgaacccatcccggtggagaagaaccccaacccaacatcggaggagatccaagcacttcaacaaaaatacaaagatgccctcatcaaactcttcgaggacaacaaggccaaatacggcgtggaggcggataggagactctccattatctaa

SEQ ID NO: 92623 - protein, 362 aa, Strongylocentrotus purpuratus
MGLELAPLRIPLHRRLETFAVFQWWFCFMFQGLLSILVSAYILFFTRQILLIVISILKCSSKISIPTLSLLASYYWIILLLIAWIYYDRHTPVRGGRPSNWIRRWRIWVHMRNYFPINLIKTADLDPKNNYMMGSHPHGVMSMGSVVSFGSEACGFSEKFPGMRPALLTLGGWFYFPLVRDYVMSSGMCDCSRESIDYLLGENGKGNAVVLVVGGAIESLEAHPHAYKLYLNRRRGFIAKAMEHGAHLVPVYSFGETEIYEQISNPEGSFLRRFQGMLTKLIGFAPPLYHGRGIFNYSVGFLPYRKNINTIVGEPIPVEKNPNPTSEEIQALQQKYKDALIKLFEDNKAKYGVEADRRLSII

SEQ ID NO: 92624 - DNA, 1077 bp, Nasonia vitripennis
  CDS (1)..(1077)
atgagactgttcggcgtggagttcgcgcctctgctggtgccctgggagcgtaggctgcagaccctggctgccgcggtctggttcatcatcacggccttcggtggtctcacctgctggttcatcaccttcgccgtcctcctcttcggatcccagtggctcaggctgctcatgatcgcttacttgctgttcgcctactacgatcgcgagaccagccgaaaaggcggtagaagcaagcggatttatctgttattccggaacctggcctggtggcgctatttctgcgcctactttcccatcaagatcgtcaagacggtcgatctcgatccgactcggaactacctgttctgctcctttcctcacggcatcttgtcgaccggcgtcagtggcgctttcacaaccaacggccttgactgcgccaagcttttcccgggactggatttcaggcttctcacgctcgacgcgcactttcagacgccgcttttccgggaatacgtgctcaattacggcatctgcagctgcgacaaggatagcctcgactacctcctgtcgcacaagccgacggagaaggacggcccaaccgaggcgccggtgaccggaagagcttgcgtcctgatcgtcggaggagccgccgaggctttcaagtgcaagccgcagacctacaacattctcgtcaagcggaggaagggcttcgtcagacgcgccttgaagaacggagcaccgctggtaccggtcttctcgttcggcgagaccgatctctacgaccagctcaacagtcccgaaggctccttcttgcgggcagtccaggaattcgtgaaaaaggtcacgggaatagctccagtggtaccgatcggccgcggcctctttcaatactcgtttggcctcgttccaaaccggaaacctgtccacgttgtcgtcggcgccccgttggatgtgccgaaaatagaggagcccagcagggaagaggtcgatctctatcacgcacaattcacggacaagctcatcgagctcttcgagacgcacaagagcaaatacttggagaaccacgaaagcataaagctcattttggacgattgctag

SEQ ID NO: 92625 - protein, 358 aa, Nasonia vitripennis
MRLFGVEFAPLLVPWERRLQTLAAAVWFIITAFGGLTCWFITFAVLLFGSQWLRLLMIAYLLFAYYDRETSRKGGRSKRIYLLFRNLAWWRYFCAYFPIKIVKTVDLDPTRNYLFCSFPHGILSTGVSGAFTTNGLDCAKLFPGLDFRLLTLDAHFQTPLFREYVLNYGICSCDKDSLDYLLSHKPTEKDGPTEAPVTGRACVLIVGGAAEAFKCKPQTYNILVKRRKGFVRRALKNGAPLVPVFSFGETDLYDQLNSPEGSFLRAVQEFVKKVTGIAPVVPIGRGLFQYSFGLVPNRKPVHVVVGAPLDVPKIEEPSREEVDLYHAQFTDKLIELFETHKSKYLENHESIKLILDDC

SEQ ID NO: 92626 - DNA, 1062 bp, Anopheles gambiae str. PEST
  CDS (1)..(1062)
atgggtaaaatcgaatgggccccactgaatgtgccgatgaggcggcggatcgaaaccctgtccactgccctgtggatgtggctgatactgttcggcgagctgggcatgctgatatcgtacttcctgctgctgatctatggtaacttgtttattaaatcgctgtgcgtcatctacggatacttcatctacactgatcgaaaagtgactttgaacgggggccgtggacagggtgtaacatggtggcgagagctgttctggtggaagctctaccagagctacttcccggcgaagctgcacaaaacggttgatctcgaccctaaccggaactacctgtttgccgccttcccgcacggcgtgcttggcctcggtgccttcatcaactttgccaccaatgcgaccggctttcacgacaagtttcccaaaatccgttcccgcccggtgacgctaaacttccactttgtgataccgttcttccgcgagctgctgctcagctggggcctcgtgtcggccaacccgaacagcatcctgagcctgctgaaggcgccgaacaaaccggaccacccgctgaacgacgacggctacacggccaacgcggtcgtgatagtggtgggcggtgcggccgaatcgctgcactgccggccgaacaactacacgctggtgctgcgcaagcggaagggcttctgcaagctggcgatcaaggcgggcaccccgctggtgccggtgatgacgttcggcgaggtcgacctgttcgatcagccgccgaatccgcccggctcgcggttgcgccggttccaggagtttgtgaaaaacacgaccggcatcgcgccggccgccttcgtcgggcggggcttcttccagtacagctacgggttgatcccgcgccggaagccactgaacacagtcgtcggtgctccggtggaggtgacgcaaatagacaacccgacgcaggaacaggtggatgaggtgcacgagcggttctgccgcgcgctggacaatctgttcgaaacgaacaaatcgcgcttcattgccgactacaagaatgtgaagcttgtcatggagtaa

SEQ ID NO: 92627 - protein, 353 aa, Anopheles gambiae str. PEST
MGKIEWAPLNVPMRRRIETLSTALWMWLILFGELGMLISYFLLLIYGNLFIKSLCVIYGYFIYTDRKVTLNGGRGQGVTWWRELFWWKLYQSYFPAKLHKTVDLDPNRNYLFAAFPHGVLGLGAFINFATNATGFHDKFPKIRSRPVTLNFHFVIPFFRELLLSWGLVSANPNSILSLLKAPNKPDHPLNDDGYTANAVVIVVGGAAESLHCRPNNYTLVLRKRKGFCKLAIKAGTPLVPVMTFGEVDLFDQPPNPPGSRLRRFQEFVKNTTGIAPAAFVGRGFFQYSYGLIPRRKPLNTVVGAPVEVTQIDNPTQEQVDEVHERFCRALDNLFETNKSRFIADYKNVKLVME

SEQ ID NO: 92628 - DNA, 1530 bp, Gibberella zeae PH-1
  CDS (1)..(1530)
atgtcgaacccccttgccgatggtggtattcccaccctgaatggcgtgtacccgtctgagtcaaatgaaaaggtgacgacgattcccaacccggaaaacgaccagccggctgcgtcggatcaaccgcaattgcaggatatgattaacgggaacaatggccaggagcgacctcagatgccagaccgtgattttgattccagcatctctaccagcaatgccgactttgatgatctgatgctctcaactaatgggatgtctaatgacaagcccaatggagtgcacaacggacatgccaataattcagcaaaaagctatgccgaagttgctgccgaaggggaagaaaatgacggcaaaagccaagatacagatgatctcgataaaagttacgccgatgtcgtagcaaaccgagacgcgaaagatagtagaggtgatgatggttggacttaccccaagctgcccatcaccgcccagcccaaggacctcaaaagtgcgagctggcgcgctggaggaatccgctttgcgcctctacgagtacccatgaggcgacggtctcagacagcagcagttttgtttcattgcatgtctattgccacattggtttcggccttttggttgatttgcgccaacccacttgcctggcctattattatcccttatttaattcatcttgctctatcaactgccggtactaatggcaacttgacataccgctcagaatgggttcgaagcctgaagttgtggaaacttttcgctggatatttccccatgaagttgcacaaaacgcacgatctgcctaccgataggaagtacatttttggataccatccccacggtatcatttcccatggtgcctttgccgcttttggtaccaatgcccttggattccgtgagctcttccctgggatcacaaacacgttacttactctagactccaacttccgcctccccttctatcgcgactacatcatgcttcttggcctgcagtcagtgtcgaaggagtcgatctggaatctgctttccaagggtggacccaacaacgatggccaaggccgtgctgttactatcgttgttgggggtgcacgcgagtcgctcgaggctcagccaggcagccttcgtttaatcctcaaaagccgtaagggcttcgtcaagatggccctccgaactggagccgaccttgttcctgttattggatttggcgagaacgatctttacgaccagttaagcccaaagacacacccaatcgttcaccgcatccagatgatccttctcaaggtcttcaagttcactgttccggctcttcatggtcgtggtgtgctgaattatgatgttggtctcatgccataccgccggccagtcaacatcgtgatgggccggcccatccgagtcgacaaggctcatggacctcagccagctcagaaggatatcgatgagctgcacgagcgttatgtccaagaggttgagaagttgtgggaaacatacaaggaccagttttcagttgagcgcaagactgagatggagattattgcttaa

SEQ ID NO: 92629 - protein, 509 aa, Gibberella zeae PH-1
MSNPLADGGIPTLNGVYPSESNEKVTTIPNPENDQPAASDQPQLQDMINGNNGQERPQMPDRDFDSSISTSNADFDDLMLSTNGMSNDKPNGVHNGHANNSAKSYAEVAAEGEENDGKSQDTDDLDKSYADVVANRDAKDSRGDDGWTYPKLPITAQPKDLKSASWRAGGIRFAPLRVPMRRRSQTAAVLFHCMSIATLVSAFWLICANPLAWPIIIPYLIHLALSTAGTNGNLTYRSEWVRSLKLWKLFAGYFPMKLHKTHDLPTDRKYIFGYHPHGIISHGAFAAFGTNALGFRELFPGITNTLLTLDSNFRLPFYRDYIMLLGLQSVSKESIWNLLSKGGPNNDGQGRAVTIVVGGARESLEAQPGSLRLILKSRKGFVKMALRTGADLVPVIGFGENDLYDQLSPKTHPIVHRIQMILLKVFKFTVPALHGRGVLNYDVGLMPYRRPVNIVMGRPIRVDKAHGPQPAQKDIDELHERYVQEVEKLWETYKDQFSVERKTEMEIIA

SEQ ID NO: 92630 - DNA, 1047 bp, Apis mellifera
  CDS (1)..(1047)
atgaagatccttggcgtggaattcgcaccgttgaacgtaccattgaaacgaagattagaaacgctttcagctgcgttatggatcattcttctaagcggaggagatttaatgggttaccttctttttgcttatcttctattgtactcgaaaatcacacgttattttgtgctgctgtacacactctggatgtactatgattgggatacatgtaataaaggcggcagaagcgaacgatggacaagattgatgagaggcaacgcgtggcaacgttacttttgcaactatttccctataaaattagtgaaaactaccgacctggatccgactaagtcatatttattctgcagctttccacatggaattctgtccacaggagtattcggcgcattcggaacggagcatctcaactgtaaaaaagtgtttccgggtttggatttccgggtcgtgatactagaacaacactttaaaatcccgttcttccgtgaatatgcctatatgggagccggtatcagcagttcccaaagaagtttaatccatcagctatcgacgaagcccgaggcaccgttcaccggaagagcaaccattcttgttatcggtggagcatgggaatcattggaatgtaagccgggcaaatatcgtatcctgctaaaaaggagaaaaggcttcgttaagattgcgctgaagcatggggcccccttagtacctgtcatctcgtttggagaaacagatatatacgatcaatattattggccagagggcacattgatgagaagaatacagcattatgttcgtaaaaagatcggattagcgccagtgtttttgaaaggtcgaggattcttccaatattcttttggcattatcccgcgacggaaaccagtcacggttgtcgtcggtagtccattggaattaccaaagatagaggaacctacgacggaacagatcgacgaataccacgagaaattcgtcaatcacctggtggagttgttcgaaaatcagaagcacaattacatgaagaatgcggattcggtgaagcttgagtttctatag

SEQ ID NO: 92631 - protein, 348 aa, Apis mellifera
MKILGVEFAPLNVPLKRRLETLSAALWIILLSGGDLMGYLLFAYLLLYSKITRYFVLLYTLWMYYDWDTCNKGGRSERWTRLMRGNAWQRYFCNYFPIKLVKTTDLDPTKSYLFCSFPHGILSTGVFGAFGTEHLNCKKVFPGLDFRVVILEQHFKIPFFREYAYMGAGISSSQRSLIHQLSTKPEAPFTGRATILVIGGAWESLECKPGKYRILLKRRKGFVKIALKHGAPLVPVISFGETDIYDQYYWPEGTLMRRIQHYVRKKIGLAPVFLKGRGFFQYSFGIIPRRKPVTVVVGSPLELPKIEEPTTEQIDEYHEKFVNHLVELFENQKHNYMKNADSVKLEFL

SEQ ID NO: 92632 - DNA, 1305 bp, Candida glabrata CBS 138
  CDS (1)..(1305)
atgtttggtaacgcatttcacttacgtaataggatccataaaaggtccagttcctctgatagactcgatcaagatgagtccagtgatgatggggataatgcccctaatattgtggaacagaagaccaaggatattaagttagtgaagccgctaaagaggccaagattgagcaattgctgctcacccacaacacccatggctaataggttacagacaatggcggttgcttggcatatttcctcatttgtgctgtttagcattttctccctgttgattatttccaatccattcacatggatagttgtaattccttatctcatttatttcttcaatgacaggtctccagctaatggggatgtagtctaccgatactcaccttgggtacgttctttaaagatttggaaatactattgtgattatttccctattgaactggttaagacggttgatttggaacctacgtttacaccatgtaatgaagaagaggagaaggaaaacaaaaagcttcaagaatattatactttacgtctctggccatcagactacgagataagattgttcaagaagaacaccgtgtattcgcacggctataagcgcacggggccaaagtatatcttcggatatcatccacatggtattggtgctttaggatcgtttggtgcttttgcaacagaaggacgtggctggtctaataaatttccgggcattccggtatctctattgactttagttacacaattccatattcctttctatcgtgattatctgctttcggttgggatatcatcagtttccaggaagaatgctttgaaagttcttgataataaccaatcgatatgtattgttgttggtggggctagagaatctttaataagcattcctggtacatctggattaattctaaataaaaggaaggggtttattaagttagctattcaagccggtaatgttagtcttgtcccagtgtatacttttggcgaaaatgactgttataatatattagctacagatgagacatccatcattaggaaattacagctctgggttaaggaaaattttggatttactataccaattttctacgcaagaggattattcaactatgattttgggctattgccattcagagcacctttacatgtggttgttggtaggcccatacatgtcaaagaacagcaagaaaatcctgaacaaagccttgttgaccactaccatgaactgtatgtggaagaattaaaaagaatatatttagaaaacagagacaggtatggctatggtgcagcagactttgaaatattgggataa

SEQ ID NO: 92633 - protein, 434 aa, Candida glabrata CBS 138
MFGNAFHLRNRIHKRSSSSDRLDQDESSDDGDNAPNIVEQKTKDIKLVKPLKRPRLSNCCSPTTPMANRLQTMAVAWHISSFVLFSIFSLLIISNPFTWIVVIPYLIYFFNDRSPANGDVVYRYSPWVRSLKIWKYYCDYFPIELVKTVDLEPTFTPCNEEEEKENKKLQEYYTLRLWPSDYEIRLFKKNTVYSHGYKRTGPKYIFGYHPHGIGALGSFGAFATEGRGWSNKFPGIPVSLLTLVTQFHIPFYRDYLLSVGISSVSRKNALKVLDNNQSICIVVGGARESLISIPGTSGLILNKRKGFIKLAIQAGNVSLVPVYTFGENDCYNILATDETSIIRKLQLWVKENFGFTIPIFYARGLFNYDFGLLPFRAPLHVVVGRPIHVKEQQENPEQSLVDHYHELYVEELKRIYLENRDRYGYGAADFEILG

SEQ ID NO: 92634 - DNA, 1239 bp, Kluyveromyces lactis NRRL Y-1140
  CDS (1)..(1239)
atgggtaaggaacaaatcagaaagagacaaactaaaaaggtacgcaagggttcacaacccgtggcaaatggtaaatcttctgtagtaggggtctccaaagatgggaaaccagaattttgtgctattgatacgcccatagaaaggagacttcaaactctcagcgtagcatggtatgtcgaatgtattccgttaatgatcatcataatgttgtttgtttgggttaacccgttgatgtggtcgtttgtaataccatacaccatttattatttcatagaccggactgcctccaatgggaacgctgtgaagagacactccaagtggttccgatctctaaaggtctggttttatttccgtgattacttccctataagtatgcacaaaagcactgaactcgagccaacatttacaagtattgattccacagagctggaaaatgatgcgagtgagccaggctacctggatagctcacagcccgttttaccagataaatggtggaatcctttcagagaaaaggatgaaactgttagaccaacaggaccgaggtatatttttggctaccatccacatggtatagcagcattcggagcgtttggagcattcgctaccgaggcatgtaattggagtaaagttttcccaggcattccagtgtgtttgcttactttggtaaatcaatttcaaataccagtgtaccgtgattatttattggccttaggcataacatcggtcgctagaaaaaatgctatgaaagtacttgagaaaaattattcaatagccatcgtaattggaggtgccagtgaatcccttcttactaaccttggttcatctgatatcattttaagcaagcggaaaggttttgtgaagttggctttgcaaactgggaatgtgagtcttgtacctgtgtatggatttggtgaaactgatacttacaagattctgaagcttaaaaatgactctataataggcaggatacagatatggcttaaagagaactacagcttcactgtccctctatttttcgctcgtggtgtattcaattatgattttggtttactaccgtttagacatccagtcaatgttgttgttggaaaccctattcatattaaagaaaagatagatcatccaacaattgaggagattgatcattaccattccttatacattgaagaattgaaacgtctttacgatgataacaaggcaaaatttaactattcagaaaaaactttaaatatagtggaatga

SEQ ID NO: 92635 - protein, 412 aa, Kluyveromyces lactis NRRL Y-1140
MGKEQIRKRQTKKVRKGSQPVANGKSSVVGVSKDGKPEFCAIDTPIERRLQTLSVAWYVECIPLMIIIMLFVWVNPLMWSFVIPYTIYYFIDRTASNGNAVKRHSKWFRSLKVWFYFRDYFPISMHKSTELEPTFTSIDSTELENDASEPGYLDSSQPVLPDKWWNPFREKDETVRPTGPRYIFGYHPHGIAAFGAFGAFATEACNWSKVFPGIPVCLLTLVNQFQIPVYRDYLLALGITSVARKNAMKVLEKNYSIAIVIGGASESLLTNLGSSDIILSKRKGFVKLALQTGNVSLVPVYGFGETDTYKILKLKNDSIIGRIQIWLKENYSFTVPLFFARGVFNYDFGLLPFRHPVNVVVGNPIHIKEKIDHPTIEEIDHYHSLYIEELKRLYDDNKAKFNYSEKTLNIVE

SEQ ID NO: 92636 - DNA, 1152 bp, Ustilago maydis 521
  CDS (1)..(1152)
atggcacctcaccatcctgcgtccgagacggcgggacagagggcacagcctcacgacgccgacgacacgtctttacaagcctcgagcacaaccacaagcggtgaagccccttcggatgcttcaaagtccaaaagcgatcccaccaacaaagagaatgtcatccgctttgcacccatctcaatcccacgcagtcgtcgactgcaaacgctcggtgtcctgttttgggcgttactcctgcctatctgtctcagcatcttcttcctgcttctctcgtttcctattctgtggcctgtcctaatcccctacctggtgtggatcaactttatcgacaaagcaccggagaacggcggtcgccgattctcttgggttcgcaaactccccgtgtttcgctactttgccgaatactttcccatctccatgatcaagaccaccaaccttccagccgatcggccttacatctttggctaccatccacacggcatcctcggcgttgcagcggtcgccaaccttgctacagacgccaccgagtttcccgagagcttccctggcatcacaccgcatcttttgacactggcgaccaactttaccatcccgctcttccgagattgcttgatggccatgggcatctgcagcgtttcgaagcgcagttgcgaggcgattttgagaaagggaaagggaagtgcgattgcgattgtcgtgggaggtgcaagtgagagcttggcagcgcatccgggtaccgcggatctgacgttaaagaggaggttggggttcatcaaaatcgctattcgaaacggagctgatctggtgcccgtcttctcgtttggagagaacgacgtgtacgagcagctgagcaatgaggaggggaccaaaatttacgctctgcagaaacagtttcaggcgttgttcggcttcacattaccgttcttccacggaagaggtctgttcaattacagtgttggtctgatgccctatcgacatccaatcgttagcgtcgttggcaagccaatacacgtcaagaagaacccaaaccccagcaaagaggagatcgaggaagtgcagcatcgatacattgaggaactcatgaacatttgggagacgtggaaagacgcgtatgctgctaaccgcaccaaggagcttacgatcgtcgcctag

SEQ ID NO: 92637 - protein, 383 aa, Ustilago maydis 521
MAPHHPASETAGQRAQPHDADDTSLQASSTTTSGEAPSDASKSKSDPTNKENVIRFAPISIPRSRRLQTLGVLFWALLLPICLSIFFLLLSFPILWPVLIPYLVWINFIDKAPENGGRRFSWVRKLPVFRYFAEYFPISMIKTTNLPADRPYIFGYHPHGILGVAAVANLATDATEFPESFPGITPHLLTLATNFTIPLFRDCLMAMGICSVSKRSCEAILRKGKGSAIAIVVGGASESLAAHPGTADLTLKRRLGFIKIAIRNGADLVPVFSFGENDVYEQLSNEEGTKIYALQKQFQALFGFTLPFFHGRGLFNYSVGLMPYRHPIVSVVGKPIHVKKNPNPSKEEIEEVQHRYIEELMNIWETWKDAYAANRTKELTIVA

SEQ ID NO: 92638 - DNA, 1341 bp, Cryptococcus neoformans var. neoformans B-3501A
  CDS (1)..(1341)
atgccgctcaaacggcctagcccgggaccgcatcccctcgacctcaatccttacgagaggctgcaatttgaggagaaggagaacaggagatcgcataatgataccgatcatcatgcgactctcacaagccgtcaagaagggctccggcgccgggcagccttaggggaaaatgtcgacatatcagccgatggagaatcgaaggaagacgaggggtattccgcccaaaaaaggaatgacagactatcgtcgcctgaggataccaagacaggggagggaaaggggaagaagagtccgctgatgagtaacttgaagttggatgattttagggatactttggaggctgggattgaacgaaagtttgcgcctctacatattcctcctcatcgacgcctacagacagccgctgtggctctctgggcacttctcttgccaatatgcatgattgtcctcctgttattactatcacttcccccaatgtggctcatcctcataccctactttatttggataagttttgacagagcgccgattcatggaggaaggccaaaggaatgggcacgaaaaggcttcatttggaagtattttgctgattattatccttgcagtatcgtgaaagaagctgaacttcctccaaacagaccttaccttttcggctaccacccccacggtatcatcgggatgggagcattcgctacctttgccacagaaggcacaaacttctccgagtacttccctggtatcaaaccccatctccttactcttggatccaattttaaaatccccttctatcgggaactgctcatgatccacggttgcggctcagtctctaaacgttcttgcgccaatgtcctctcccaaggtcctggtagcgccatcgccattgtcatcggcggtgcttctgagagtttgtccgcacatcctggcacggcggatttgacgttgaagaaaaggtttggatttgtgaaaatggcgattcgggaaggggcggatttggtgccggttttctcattcggcgagaatgacatctatgctcaattagctaatgctaaagggtcgatggtatacaagcttcagaagaagtttgagaaggtctttggtttcacactgccactattttatgggcgagggttattcaattacaactatggactaatgccgtttcgtcatcctatcgtttctgtcgttggaaagcccattcatgtcgaacgggatccacatccaagcgacgaaaaggtgcaggagctacagggcaaatacattgctgagctgacccgtatatgggacaagtacaaggacttgtatgctcgaggaaggacgaaggaactcactttagtagagtaa

SEQ ID NO: 92639 - protein, 446 aa, Cryptococcus neoformans var. neoformans B-3501A
MPLKRPSPGPHPLDLNPYERLQFEEKENRRSHNDTDHHATLTSRQEGLRRRAALGENVDISADGESKEDEGYSAQKRNDRLSSPEDTKTGEGKGKKSPLMSNLKLDDFRDTLEAGIERKFAPLHIPPHRRLQTAAVALWALLLPICMIVLLLLLSLPPMWLILIPYFIWISFDRAPIHGGRPKEWARKGFIWKYFADYYPCSIVKEAELPPNRPYLFGYHPHGIIGMGAFATFATEGTNFSEYFPGIKPHLLTLGSNFKIPFYRELLMIHGCGSVSKRSCANVLSQGPGSAIAIVIGGASESLSAHPGTADLTLKKRFGFVKMAIREGADLVPVFSFGENDIYAQLANAKGSMVYKLQKKFEKVFGFTLPLFYGRGLFNYNYGLMPFRHPIVSVVGKPIHVERDPHPSDEKVQELQGKYIAELTRIWDKYKDLYARGRTKELTLVE

SEQ ID NO: 92640 - DNA, 1065 bp, Strongylocentrotus purpuratus
  CDS (1)..(1065)
atgggtcaacggcgctatgtccgctccttctgcaatgaccaccgcaggacaagcaaagtagaagccatcctgaaccagctcaagtggccaacattacaagaacgcaggaatgatgaggtgttcagaagtaggcaaaagcacaagctggtcattaccagtggagatgaggttcctgttgaagtgataccaggcagcgatgtcatgccaagggaagatctttccataacacatgaagaagcagacaacatcatagtacagcaagcgattctaattgctgctaatgagaaaaggtatttctgggtgtctttcgtgctgatgggctgggcatactatgacaggcacacgcccaagagaggcggtcgccgtagcgactttatgcgtcgcggccgcatctggaagaagatggccgactactttccggtccatctggtgaaaacttccgatctggatccgaaccggaactacctcttcggagtacatccccatggcatcatgagcgtcggcgcctttgtaaactttgcagcggaagcgacatcttttagtgacctcttccctgggataaaatctcatctgtgcaccctctccgtcatgtacacgtatcctctcgcaagggatttaatgatggctgggggtatgtgcgatgtacacaaagagagcatagactacctgctcggccaatcagggcccgggaacgctgccgtcatcgtagtgggcggggccggtgaagccctggaagctcgggcagacaatcatgtggtctgcctcaaagaaaggaagggatttatcaagaaggctctacaacatgggtttctgacactgatcaatcaaataccagagtttgaaccaaatgatactgctgtaccacttaacccccaaatgatgatggtgtggaggcgcgttagctcagacgttggtaaacccatttctgtggagaagatggagaagccctcatccgaagccattgaagatctctggaacacctacattcaggccctgcaggagctctttgaagagaacaaggtcaagtttggggtcagggatgacctaaccctgcaggtcaaatga

SEQ ID NO: 92641 - protein, 354 aa, Strongylocentrotus purpuratus
MGQRRYVRSFCNDHRRTSKVEAILNQLKWPTLQERRNDEVFRSRQKHKLVITSGDEVPVEVIPGSDVMPREDLSITHEEADNIIVQQAILIAANEKRYFWVSFVLMGWAYYDRHTPKRGGRRSDFMRRGRIWKKMADYFPVHLVKTSDLDPNRNYLFGVHPHGIMSVGAFVNFAAEATSFSDLFPGIKSHLCTLSVMYTYPLARDLMMAGGMCDVHKESIDYLLGQSGPGNAAVIVVGGAGEALEARADNHVVCLKERKGFIKKALQHGFLTLINQIPEFEPNDTAVPLNPQMMMVWRRVSSDVGKPISVEKMEKPSSEAIEDLWNTYIQALQELFEENKVKFGVRDDLTLQVK

SEQ ID NO: 92642 - DNA, 1011 bp, Strongylocentrotus purpuratus
  CDS (1)..(1011)
atggggttagaactcgcacccctgcggatcccgctccaccggcgtctggagacccttgctgtcttccaatggtggttatgcttcatgttccaagggctgctgtccatactcgtatccttctatcttcttttcttcacgagctactactggatcccccttttgcttatagcatggatctactatgaccgtcacacgcctctccgtggtgggcgcccttccaactggatgcggcgctggagggtctgggtccacatgcggaactacttccccatcaacctgatcaagaccgcggacctggacccgaagaacaactatctgatgggcttccacccccacggggtcatgagcatgggttccttcgtcaacttcggcacggaggcgtgtggcttctcagagaagtttcccgggatgaggtcgaccctgctgacgctgggaggatggttctatttcccgctagccagggactacatcttgagttctggtatgtgtgactgcagtcgtgagagtatagactatctcctgggtgagaatgggaaaggcaatgcagtggtgctggttgtgggcggggctattgaatctttggaggcccacccccatgctaacaagctctatcttaacaggaggagaggcttcatcataaaggcgatggaacatggtgcccatttagtgccagtctactcgtttggcgagacagacatctacgagcagattgctaaccccgagggctcattcctcaggaggtttcaggggatgcttaccaagttgtttggattcgcccctcccctctaccacgggagaggaatcttcaactacagcgtgggattcatgccgtatagaaagaatattaatacaattgttggtgagcccatcccagtggagaagaaccccaacccgacatcggatgagatccaagcgcttcacaacaaatacaaggacgccctcatcagtctctttgaggacaacaaggccaaatatggcgtggaggcagatagaagactctccattatctaa

SEQ ID NO: 92643 - protein, 336 aa, Strongylocentrotus purpuratus
MGLELAPLRIPLHRRLETLAVFQWWLCFMFQGLLSILVSFYLLFFTSYYWIPLLLIAWIYYDRHTPLRGGRPSNWMRRWRVWVHMRNYFPINLIKTADLDPKNNYLMGFHPHGVMSMGSFVNFGTEACGFSEKFPGMRSTLLTLGGWFYFPLARDYILSSGMCDCSRESIDYLLGENGKGNAVVLVVGGAIESLEAHPHANKLYLNRRRGFIIKAMEHGAHLVPVYSFGETDIYEQIANPEGSFLRRFQGMLTKLFGFAPPLYHGRGIFNYSVGFMPYRKNINTIVGEPIPVEKNPNPTSDEIQALHNKYKDALISLFEDNKAKYGVEADRRLSII

SEQ ID NO: 92644 - DNA, 1020 bp, Tribolium castaneum
  CDS (1)..(1020)
atgagaattttaggcttcaattttgatccctgggacaccccttggcggaaaaggctccactttctagcagccggtgcttgggtgtttgtgttcttgtttggcggatttgtcgtgctacttttatgcatctacttaatatttactcctttacggtggttagttttgttctacttctgttggatttattacgacaggaatactaaagataggggaggtagacctatcgaatggataaaaaacttcaagtggtacaaatacactgctgagcatttcctcataaccgtaaaactcgcacctggcttccaacttgactcaaataaaaattacttatttgcatgttttccgcatggagttatacctatgggggcctatcatgcaatcgcctgtaatcattcacgatttcggcagttgtataaaaattttaattttaaagtagcgatccttttgattcagcttttattccctttaacacgagaattaaacctggcacaaggaggcatctctgcatcgtctgaatcgctcaattacgctttaagtagaccgcaaggtggacacattgtgcttctttttcctggaggtgctttagaagctacttacacaaaaccaggattttacaaattcgttgtcaagaaaaggaaaggttttgtcagagtcgcgctacaaaatggggttcctttggtaccggttataactttcggagaaaatgatttgtataatataattggagataattactattggcgaatgtttcaaaatattaccaggaaggtaactggttttactcctcttatttttaacggaagaggggtttttcaaagttcatttggatttgtaccactggagaggcctctgatgactgttttgggtaagcccattgaagtcaccaaggcagaaaatccgactaaggagcagatcgacaagcttcatcaaaaatttcaagaagaactcgtaaatttgttcgaaaaatataaatatcaattttttgataatcctcaagacaagtgcctcgaattagaataa

SEQ ID NO: 92645 - protein, 339 aa, Tribolium castaneum
MRILGFNFDPWDTPWRKRLHFLAAGAWVFVFLFGGFVVLLLCIYLIFTPLRWLVLFYFCWIYYDRNTKDRGGRPIEWIKNFKWYKYTAEHFLITVKLAPGFQLDSNKNYLFACFPHGVIPMGAYHAIACNHSRFRQLYKNFNFKVAILLIQLLFPLTRELNLAQGGISASSESLNYALSRPQGGHIVLLFPGGALEATYTKPGFYKFVVKKRKGFVRVALQNGVPLVPVITFGENDLYNIIGDNYYWRMFQNITRKVTGFTPLIFNGRGVFQSSFGFVPLERPLMTVLGKPIEVTKAENPTKEQIDKLHQKFQEELVNLFEKYKYQFFDNPQDKCLELE

SEQ ID NO: 92646 - DNA, 1020 bp, Tribolium castaneum
  CDS (1)..(1020)
atgagatttttcggaatcaatttcgaccattggaacaccccttgccgaaaacgacttcaatttctagcagccggagcttggatgtttactttcatttttggcggaacaatcttgctacttttatgtttctacttgctatttactccattgtggtggttggttttgatcaacttctgttggatttattacgacagacacagcaaagaaacaggaggcaaatcaattgaatggatacaaaactggaaatggttcaaatacaccagcgactatttcctcataacgcttaaactcgcccctggctttcaactagaccctaacaggaactacctgtttgcatgttttcctcacggagttctccccgctggactttttcacgcaatgagcacaaaaaactcccgatttcgacaattgtataaagatttcagtgtaaagacggtgatccttacgctacttttttatttacctttcacccgggaactaatattggcccatggagccatctcgtcatcgactaaatcgataaattacgttttaagtaaaccacaaggtggacaaattgtgctgctcttccccggaggtgctttagaagctacttatacgaaaccaggaatttacaaatttgtagtcaagaagaggaaaggttttgtcaggttggcgctacagaatggggctcctttagttcctgttataacttttggcgaaaatgatttgtataacatcactggagataactattgctgggaagtgtttcaaaatattgtcagaaagatggcaggttttactcctattctttttaatgggcgtgggatttttcaaagatcgtttgggttagtaccacttgaaagacctctgatgacagttttgggtaagccgattgaagtcaccaaagtagaaaatccaagcgaagaacagatcaaacagctccatcaaaaatttcaggaagaattggtaaaactcttcgacaagtataaataccagttttttgataatccccaagataagtgcctcgaattggaataa

SEQ ID NO: 92647 - protein, 339 aa, Tribolium castaneum
MRFFGINFDHWNTPCRKRLQFLAAGAWMFTFIFGGTILLLLCFYLLFTPLWWLVLINFCWIYYDRHSKETGGKSIEWIQNWKWFKYTSDYFLITLKLAPGFQLDPNRNYLFACFPHGVLPAGLFHAMSTKNSRFRQLYKDFSVKTVILTLLFYLPFTRELILAHGAISSSTKSINYVLSKPQGGQIVLLFPGGALEATYTKPGIYKFVVKKRKGFVRLALQNGAPLVPVITFGENDLYNITGDNYCWEVFQNIVRKMAGFTPILFNGRGIFQRSFGLVPLERPLMTVLGKPIEVTKVENPSEEQIKQLHQKFQEELVKLFDKYKYQFFDNPQDKCLELE

SEQ ID NO: 92648 - DNA, 1071 bp, Tribolium castaneum
  CDS (1)..(1071)
atgagataccttaaacacaaaacattgataatccattacaacgagtgcttcaaaatgaagttcttgggaatcgattttctccctttaaacacgccctttgaacacatagttcaaagactggcagcagcgttgatcattcaaatgatcggatctttgggcatcatcacaatactatttaacgtttttctgcttttcacccgtttctggtgtctacctttattctacatgtgttggctatatttcgaccgaaatgctggtgaaaatggaggcagagtgaacttgtggatcctgaactggaaaatctgggaatatggggaagcttacttcaagccaaaacttgaattcgccccaaattgcacccttgacgcgaaacgaaactatttgtttgcttgcttcccccatggaatactccctcatggtaccttcatgaccatcaggagcgtgacatcgccgttccatcgcctgtatcccgctttcgatgttaaagtagcagtcttgcccttacttctttggattccgggtacgagagagatcgctttgggcataaaatacatttcgtgttcagccaagtctttgagttatgttttgaaaagtccggaaggcgggaaaatcgtgcttttgtaccctggtggtgcccgggaagcttacaacagcaaacccggccttaacaaattcactattttgagaagaaaaggttttgttaaagtggcgctaaaaaacggagttccgttagttcctgttgtcacatttcgagagtgtgatttgtttgaacaaattgaagggccgtgtattaggagatttcaagaatttgtgcgagggaaattcggctttgtgcctattttagtcaacggttggggcttgtttcaaaacacttttggagtggttccaaggcaagtgccattggcaacagttgtagggactccaatagaagttgagagagttgaaaatccgagtcaggaacaaatcgatgccttacataacaagtttaaactagaattgaaaaacttgtttgaagagtacaaattcaaatttctggataatccggaacagacatttttggaattcgaataa

SEQ ID NO: 92649 - protein, 356 aa, Tribolium castaneum
MRYLKHKTLIIHYNECFKMKFLGIDFLPLNTPFEHIVQRLAAALIIQMIGSLGIITILFNVFLLFTRFWCLPLFYMCWLYFDRNAGENGGRVNLWILNWKIWEYGEAYFKPKLEFAPNCTLDAKRNYLFACFPHGILPHGTFMTIRSVTSPFHRLYPAFDVKVAVLPLLLWIPGTREIALGIKYISCSAKSLSYVLKSPEGGKIVLLYPGGAREAYNSKPGLNKFTILRRKGFVKVALKNGVPLVPVVTFRECDLFEQIEGPCIRRFQEFVRGKFGFVPILVNGWGLFQNTFGVVPRQVPLATVVGTPIEVERVENPSQEQIDALHNKFKLELKNLFEEYKFKFLDNPEQTFLEFE

SEQ ID NO: 92650 - DNA, 1017 bp, Tribolium castaneum
  CDS (1)..(1017)
atgaagattttggggatcaagttcgcccctttgcacatccccctcgagcgccgcttgcaaacccttgccgccggatgctggttcacaaccctggcctttggtaccttcatcggtaccttcatctgggtgtacgtcttcttcacccgattctggtacctgtccgtcctttacgccaccataatatacctcgagaaaagcaagtgtgagaagggcggccgccccatcgaatggatcagacattggggatggtggtactacttgaaaaactacttcccctgtaagcttgactttgtcccgggcctaacctttgatccgaagaggaattatctatttgcctgttacccccatgggatcctcccggcgggccctttcaacaccattggtagcccttacagcgaatttagcaagttgtttccaaagtttcgggtgaggttggtgattctgcaccaacatttcttcattccgtttctgcgggagattgcttatgggacaggggggatttcggcctcggccaagtcgttgaatcatgttttggggagtccggaaggggggtatattgcggtgttgatgcccgggggcgcagttgaggcctataacagccggcctggacagtacagaatcatcctgaagaacaggaaaggcttcgtaaaactggccttgaggaatgggtcaccactagtaccagttatctcgttcggggagccggaattgtttgatcaagttgaagggaggactttgaggaagattcaggagtccatcaggaagtacctcgggctggcacctgtgattttctcagggagagggttcttccagtactcgtttggcgttattccacaaaggaggcctattacgaccgttgtcgggcacccgattgaagttaccaaaatcgaaaaaccaacaaacgaggaagtggacgaactacataaaaagtacatgcaagagctggagaacttgttcgaagagtacaaattcaaatatttggagaatccgaaggacatacacttggagtttgaataa

SEQ ID NO: 92651 - protein, 338 aa, Tribolium castaneum
MKILGIKFAPLHIPLERRLQTLAAGCWFTTLAFGTFIGTFIWVYVFFTRFWYLSVLYATIIYLEKSKCEKGGRPIEWIRHWGWWYYLKNYFPCKLDFVPGLTFDPKRNYLFACYPHGILPAGPFNTIGSPYSEFSKLFPKFRVRLVILHQHFFIPFLREIAYGTGGISASAKSLNHVLGSPEGGYIAVLMPGGAVEAYNSRPGQYRIILKNRKGFVKLALRNGSPLVPVISFGEPELFDQVEGRTLRKIQESIRKYLGLAPVIFSGRGFFQYSFGVIPQRRPITTVVGHPIEVTKIEKPTNEEVDELHKKYMQELENLFEEYKFKYLENPKDIHLEFE

SEQ ID NO: 92652 - DNA, 1017 bp, Ostreococcus tauri
  CDS (1)..(1017)
atgatttatgcgttcttattgagcgcgatattcatctatccgacatactgcgttttcgggcacgcgacgtggatgcggaacgcgttcttgggatacattggttggtacgtgctgttggaccggcgctcggatagctcgggcactagattcgtggcgtggtcgagacgtctacctttttggcgcatcctggctgattacttcccagttcgattatacaagagcggcgagctcgatccaaaagggaattacttgttcgggtatcatccgcacggcgtcatcggcgtcggggcgttgatgacgtttgccaccgaagcgacgggattttacgaagcatttccaggattggatttacggctcttgacgttatcggtgaacttcaagtttccatttacgcgagaggtgttgatggcgctcgggattaactccgtcactaaggcgagcgtcatgaccaatcttacccgcgcaccaggcgcgagcgtcgccatcgtcatcggcggcgccgcagaggcgttggacgctcgtccgggatcggccacgctcacgctggcgagacgtaaagggttcgtgaaaatggctctgcgcacgggtgcatcgctcgtgcctgtttttgccttcggggagaacgatattttcgagcaagtcgagaatcccgacggcgggcgcctgcgcaagtttcagacgtacatcaagcaactcatcggaatctcaccgccggctttttacggccgctcgctcagtcggggggtgtggcgtcgcatttttgggcgtaagggagtgctgccgaagcgtgaaccgatcgaagtgatcatcggtaatcccatacacgtccctcaggtggacgatccgtcgcccgacgtcatcgacaagtatcatcaattgtacaccgtgggactcaaggaactttacgagctgcatcgcagacaatttcaccagttgaatcgcggaggttcttccgacgatctgctaagcgatctgatcaagcgtaagaacaacctccaagccatgacattcaaatag

SEQ ID NO: 92653 - protein, 338 aa, Ostreococcus tauri
MIYAFLLSAIFIYPTYCVFGHATWMRNAFLGYIGWYVLLDRRSDSSGTRFVAWSRRLPFWRILADYFPVRLYKSGELDPKGNYLFGYHPHGVIGVGALMTFATEATGFYEAFPGLDLRLLTLSVNFKFPFTREVLMALGINSVTKASVMTNLTRAPGASVAIVIGGAAEALDARPGSATLTLARRKGFVKMALRTGASLVPVFAFGENDIFEQVENPDGGRLRKFQTYIKQLIGISPPAFYGRSLSRGVWRRIFGRKGVLPKREPIEVIIGNPIHVPQVDDPSPDVIDKYHQLYTVGLKELYELHRRQFHQLNRGGSSDDLLSDLIKRKNNLQAMTFK

SEQ ID NO: 92654 - DNA, 1386 bp, Ashbya gossypii
  CDS (1)..(1386)
atgcaggacagcatggatgacagcttgagggaggctgagggcagacaggacgactcggaggtcagcagcgggacgacactcggaagcagcaccccggaggacagcggggtgacggcgaagctgcgcaagaagtaccagatggcgtcggcactgctgcggcgggagctggaggagctgagcgtgtacgacgcgaagacggcgggggtaagcggccgcagcagcggcagcggcagcggcgggctggcgctgctgggcgggcgattccacgtggcgccgctgcggatccccgcgcggcggcggctgcagacgctggtggtggcgtggcacacgagctcgttcatctacatgacggtgctggtgctgtttctggcggcgaacccgctgatgtggtggttcatggtgccgtatatggtgtactacgtgtggaaccggtcgccggcgaacggcggagtggtgcggcggtactcgccgcggctgcggtcgctggcgctgtggcggtactactgcgagtactacccgatctcactgcacaagagcgaggacctggcgccgacgttcgtgccggacccgcggggggcggagccgcgcgagtggaagctgcggctgtggctgtggccgacgcgcgtggagctgctgaacttgacgctccagtggacgcgcgcgcggccgcaggttgcgacagggccgcgctacatcttcgggtaccacccgcacggcgtgggcgcactgggcgccttcggcgcgatcgcgaccgagggctgcaactggagcaaggtcttcgcgggcatcccggcctgcctgtgcacgctggtgaaccagttccagatccccatctaccgcgactacctgctgggcctcgggtgcacctccgtggcccgcaagaacgtgctcaaggtgctcgagcagaactactcggtctgcatcgtcgtgggcggcgcccaggaagccctgctcagccgtgtgggctccaccgagctcgtgctgaacaagcgcaagggcttcatcaagctcgcgctggagacgggcaacgtcaacctggtgcctatctacgccttcggcgagacagactgcttcaacgtgctcgacacgggcaacgagagctacctacgcaagttccagctgtggatcaagaagacctacggcttcaccatcccgttcttttttgcgcgcggtgtcttcaactatgacttcggcttcctgcccttcaggaatccgatcaacgtcgtcgtgggcaagcctgtgtacgtagacaagcgcagaacgaaccccaccatggaggaaatcgaccactaccacgacctgtacgtgcaggagctgcgcaatgtgttcgacaagaacaaacacaagttcggctacgccgggaaggaacttaaaatagtagagtag

SEQ ID NO: 92655 - protein, 461 aa, Ashbya gossypii
MQDSMDDSLREAEGRQDDSEVSSGTTLGSSTPEDSGVTAKLRKKYQMASALLRRELEELSVYDAKTAGVSGRSSGSGSGGLALLGGRFHVAPLRIPARRRLQTLVVAWHTSSFIYMTVLVLFLAANPLMWWFMVPYMVYYVWNRSPANGGVVRRYSPRLRSLALWRYYCEYYPISLHKSEDLAPTFVPDPRGAEPREWKLRLWLWPTRVELLNLTLQWTRARPQVATGPRYIFGYHPHGVGALGAFGAIATEGCNWSKVFAGIPACLCTLVNQFQIPIYRDYLLGLGCTSVARKNVLKVLEQNYSVCIVVGGAQEALLSRVGSTELVLNKRKGFIKLALETGNVNLVPIYAFGETDCFNVLDTGNESYLRKFQLWIKKTYGFTIPFFFARGVFNYDFGFLPFRNPINVVVGKPVYVDKRRTNPTMEEIDHYHDLYVQELRNVFDKNKHKFGYAGKELKIVE

SEQ ID NO: 92656 - DNA, 1038 bp, Schizosaccharomyces pombe
  CDS (1)..(1038)
atgtcagaagaaacatcaattcccggaatcatagcttctactccacctatttcaaaagatagtagacgtaacgtcagtcactggctacaagcgttagcggtattccttcatagtgtcagtctgacattaacggcatcttggtatacagttttatgggctttcctcccattttggccttttttaattgtttatttgatttggttaatatatgacgatgggtttgtaacaggaaaagatcggcaaaaacgttggctgcgcaatgctcccccttatcgttggttttgtcattacttccccattcgtctgcataaaactactgagcttgactctgaaaaaaattacatatttggatatcatccacacggaattatttcgcttggtgcattcggtggttttgcttcggagggggccgattttagtaaattatttcctggcatcaacgtttctgtcctgacccttaattctaacttttatgtgccggtttaccgtgactatctcatggctttaaacatcaactcagtatccaagaaatcctgtgttagcattctttcccgtaagccaggtgatagtgttttgattgttatcgggggagctcaagagtctcttttgtcccgtccaggtcaaaacaatcttgtacttaaaaagcgtttcgggttcgttaagttagcttttttaacaggatccagtttagtcccttgctttgcttttggagagtctgacatttttgaacaggttgataacaatccgcgtactcgtatctacaaatttcaagaaattgtcaaaaaaattgcaggatttacagtcccctttttctatggtcgtggactattaaacaaaacttttgggttgatgccttggcgtaaacctattaacatcgttgttggagagcccatcgatgttcctaaaaagtctcaccccacaaatcaagaaatctatgaggttcatgaagagtacatccgaagacttgaaggcttatggaacaaatacaaagatgtgtttttaccaaatcgtattagcgaattgaagttgtcagcctaa

SEQ ID NO: 92657 - protein, 345 aa, Schizosaccharomyces pombe
MSEETSIPGIIASTPPISKDSRRNVSHWLQALAVFLHSVSLTLTASWYTVLWAFLPFWPFLIVYLIWLIYDDGFVTGKDRQKRWLRNAPPYRWFCHYFPIRLHKTTELDSEKNYIFGYHPHGIISLGAFGGFASEGADFSKLFPGINVSVLTLNSNFYVPVYRDYLMALNINSVSKKSCVSILSRKPGDSVLIVIGGAQESLLSRPGQNNLVLKKRFGFVKLAFLTGSSLVPCFAFGESDIFEQVDNNPRTRIYKFQEIVKKIAGFTVPFFYGRGLLNKTFGLMPWRKPINIVVGEPIDVPKKSHPTNQEIYEVHEEYIRRLEGLWNKYKDVFLPNRISELKLSA

SEQ ID NO: 92658 - DNA, 1068 bp, Umbelopsis ramanniana
  CDS (1)..(1068)
atggccagcaaggatcaacatttacagcagaaggtcaagcatacgctagaagctatcccatcccctcgctatgctccattgcgagtgccattaagacggagattacaaacattggcagttttattatggtgttccatgatgtcaatatgcatgttcatattcttctttttatgctccattcctgttctcctttggttccccattatcctttatttgacctggatcttggtgtgggataaggcgccagagaacggtggaagacctattcgctggctgcggaatgctgcttggtggaagctgtttgcagggtattttcccgcacatgtcatcaaggaagccgatttagatccatccaagaactacatctttggttatcacccccatggaatcatatccatgggctcgttctgtacttttagtaccaatgctactggctttgatgacttgttcccaggcatccggccatcgcttttgacattaacatctaattttaatatcccactttatcgtgattatttgatggcgtgcggactttgctccgtctccaaaacatcctgtcaaaatattttaaccaaaggtggtccgggccgttccattgccattgtcgtgggaggtgcttccgagtctctcaatgctagacccggtgtcatggaccttgtgttgaagagacgctttggttttatcaagattgctgttcaaaccggtgcaagtctagtgcccactatcagttttggtgaaaatgagctgtacgaacagattgaaagcaatgaaaactcaaagttgcatagatggcaaaagaagattcaacatgcccttggttttactatgccgctctttcatggacgcggtgtattcaattatgactttggtttgctcccccatcgccatcctatctacacgattgttggaaagcccatccccgtccctagcatcaagtatggacagacaaaggatgagattataagagaactacatgactcgtacatgcatgccgtgcaggatctctatgatcgttacaaggatatctatgcaaaggatcgggtaaaagaactagaattcgtcgaatag

SEQ ID NO: 92659 - protein, 355 aa, Umbelopsis ramanniana
MASKDQHLQQKVKHTLEAIPSPRYAPLRVPLRRRLQTLAVLLWCSMMSICMFIFFFLCSIPVLLWFPIILYLTWILVWDKAPENGGRPIRWLRNAAWWKLFAGYFPAHVIKEADLDPSKNYIFGYHPHGIISMGSFCTFSTNATGFDDLFPGIRPSLLTLTSNFNIPLYRDYLMACGLCSVSKTSCQNILTKGGPGRSIAIVVGGASESLNARPGVMDLVLKRRFGFIKIAVQTGASLVPTISFGENELYEQIESNENSKLHRWQKKIQHALGFTMPLFHGRGVFNYDFGLLPHRHPIYTIVGKPIPVPSIKYGQTKDEIIRELHDSYMHAVQDLYDRYKDIYAKDRVKELEFVE

SEQ ID NO: 92660 - DNA, 1050 bp, Umbelopsis ramanniana
  CDS (1)..(1050)
atggagcaagttcaggttacagcactcctcgatcacatccctaaagtgcattgggcccctcttaggggtattcctttgaaacgcagattgcaaacttcagccatcgttacctggctcgcactcctccctatatgcctcataatatacctttacctcttcaccatccctcttctctggccaattcttatcatgtacaccatctggctatttttcgacaaagctcccgaaaacggtggtcgtagaatctccttggtcagaaaacttcccctatggaaacacttcgcaaactacttccctgtcacactcattaaagagggggaccttgacccaaaaggaaactacataatgagctaccatccacacggtatcatctctatggcagccttcgccaacttcgctaccgaggcaaccggtttctccgaacaataccctggtatcgtgccaagccttctaaccctcgcctctaacttcagacttccattgtatagagacttcatgatgtccctcggtatgtgctctgttagtcgtcactcctgtgaagcaatacttagatccggaccaggaaggagtatcgttatagttaccggtggagcctctgaatccctcagtgctagacccggcacgaatgatttgacccttaagaagagactcggttttattcgtctcgcaataagaaacggcgctagtcttgtgcctattttcagtttcggtgaaaatgacatttacgagcaatacgataataaaaagggctcccttatctggcgttaccagaagtggttccagaagattaccggattcactgtcccacttgctcacgcccgcggtatattcaactataatgccggtttcatcccttttaggcaccctatcgtcacagttgtcggtaaaccaatcgcagttccattgcttgctgaaggagagacagagccatccgaggagcagatgcaccaagtccaggcacaatatattgagagtcttcaggctatatacgacaagtacaaagatatttatgctaaagatcgcattaaagacatgactatgatcgcctaa

SEQ ID NO: 92661 - protein, 349 aa, Umbelopsis ramanniana
MEQVQVTALLDHIPKVHWAPLRGIPLKRRLQTSAIVTWLALLPICLIIYLYLFTIPLLWPILIMYTIWLFFDKAPENGGRRISLVRKLPLWKHFANYFPVTLIKEGDLDPKGNYIMSYHPHGIISMAAFANFATEATGFSEQYPGIVPSLLTLASNFRLPLYRDFMMSLGMCSVSRHSCEAILRSGPGRSIVIVTGGASESLSARPGTNDLTLKKRLGFIRLAIRNGASLVPIFSFGENDIYEQYDNKKGSLIWRYQKWFQKITGFTVPLAHARGIFNYNAGFIPFRHPIVTVVGKPIAVPLLAEGETEPSEEQMHQVQAQYIESLQAIYDKYKDIYAKDRIKDMTMIA

SEQ ID NO: 92662 - DNA, 26 bp, Artificial sequence
  primer
atgtcaggaacattcaatgatataag

SEQ ID NO: 92663 - DNA, 25 bp, Artificial sequence
  primer
ttacccaactatcttcaattctgca

SEQ ID NO: 92664 - protein, 440 aa, Artificial sequence
  consensus sequence
  Variant (2)..(4): Xaa in position 2 to 4 is any amino acid
  Variant (6)..(36): Xaa in position 6 to 36 is any amino acid
  Variant (37)..(70): Xaa in position 37 to 70 is any or no amino acid
  Variant (72)..(102): Xaa in position 72 to 102 is any amino acid
  Variant (103)..(106): Xaa in position 103 to 106 is any or no amino acid
  Variant (110)..(113): Xaa in position 110 to 113 is any amino acid
  Variant (114)..(115): Xaa in position 114 to 115 is any or no amino acid
  Variant (117)..(119): Xaa in position 117 to 119 is any amino acid
  Variant (121)..(125): Xaa in position 121 to 125 is any amino acid
  Variant (126)..(172): Xaa in position 126 to 172 is any or no amino acid
  Variant (174)..(178): Xaa in position 174 to 178 is any amino acid
  Variant (182)..(185): Xaa in position 182 to 185 is any amino acid
  Variant (187)..(201): Xaa in position 187 to 201 is any amino acid
  Variant (204)..(211): Xaa in position 204 to 211 is any amino acid
  Variant (213)..(215): Xaa in position 213 to 215 is any amino acid
  Variant (217)..(218): Xaa in position 217 to 218 is any amino acid
  Variant (220)..(221): Xaa in position 220 to 221 is any amino acid
  Variant (223)..(227): Xaa in position 223 to 227 is any amino acid
  Variant (228)..(228): Xaa in position 228 is any or no amino acid
  Variant (230)..(231): Xaa in position 230 to 231 is any amino acid
  Variant (233)..(241): Xaa in position 233 to 241 is any amino acid
  Variant (242)..(242): Xaa in position 242 is any or no amino acid
  Variant (244)..(253): Xaa in position 244 to 253 is any amino acid
  Variant (254)..(267): Xaa in position 254 to 267 is any or no amino acid
  Variant (271)..(271): Xaa in position 271 is any amino acid
  Variant (273)..(277): Xaa in position 273 to 277 is any amino acid
  Variant (279)..(284): Xaa in position 279 to 284 is any amino acid
  Variant (286)..(287): Xaa in position 286 to 287 is any amino acid
  Variant (289)..(289): Xaa in position 289 is any amino acid
  Variant (292)..(294): Xaa in position 292 to 294 is any amino acid
  Variant (296)..(298): Xaa in position 296 to 298 is any amino acid
  Variant (300)..(301): Xaa in position 300 to 301 is any amino acid
  Variant (302)..(302): Xaa in position 302 is any or no amino acid
  Variant (306)..(308): Xaa in position 306 to 308 is any amino acid
  Variant (312)..(312): Xaa in position 312 is any amino acid
  Variant (314)..(318): Xaa in position 314 to 318 is any amino acid
  Variant (319)..(329): Xaa in position 319 to 329 is any or no amino acid
  Variant (331)..(337): Xaa in position 331 to 337 is any amino acid
  Variant (339)..(346): Xaa in position 339 to 346 is any amino acid
  Variant (348)..(351): Xaa in position 348 to 351 is any amino acid
  Variant (353)..(353): Xaa in position 353 is any amino acid
  Variant (355)..(358): Xaa in position 355 to 358 is any amino acid
  Variant (360)..(361): Xaa in position 360 to 361 is any amino acid
  Variant (362)..(364): Xaa in position 362 to 364 is any or no amino acid
  Variant (366)..(366): Xaa in position 366 is any amino acid
  Variant (368)..(373): Xaa in position 368 to 373 is any amino acid
  Variant (376)..(376): Xaa in position 376 is any amino acid
  Variant (379)..(379): Xaa in position 379 is any amino acid
  Variant (381)..(385): Xaa in position 381 to 385 is any amino acid
  Variant (386)..(389): Xaa in position 386 to 389 is any or no amino acid
  Variant (391)..(405): Xaa in position 391 to 405 is any amino acid
  Variant (407)..(413): Xaa in position 407 to 413 is any amino acid
  Variant (415)..(423): Xaa in position 415 to 423 is any amino acid
  Variant (424)..(439): Xaa in position 424 to 439 is any or no amino acid
PXXXRXXXXXXXXXXXXXXXXXXXXXXXXXXXXXXXXXXXXXXXXXXXXXXXXXXXXXXXXXXXXXXXXXYXXXXXXXXXXXXXXXXXXXXXXXXXXXXXXXXXXXYFPXXXXXXKXXXLXXXXXXXXXXXXXXXXXXXXXXXXXXXXXXXXXXXXXXXXXXXXXXXXXXXXYXXXXXPHGXXXXGXXXXXXXXXXXXXXXFPXXXXXXXXLXXXFXXPXXRXXXXXXGXXSXXXXXXXXXXLXXXXXXXXXXXXXXXXXXXXXXXXGGAXEXXXXXPXXXXXXLXXRXGFXXXAXXXGXXXLVPXXXFGEXDXXXXXXXXXXXXXXXXQXXXXXXXGXXXXXXXXRXXXXGXFXXXXGXXXXXPXRXXXXXXVGXPIXVXXXXXXXXXPXXXXXXXXXXXXXXXLXXXXXXXKXXXXXXXXXXXXXXXXXXXXXXXXXL

SEQ ID NO: 92665 - protein, 39 aa, Artificial sequence
  protein pattern
  Variant (2)..(2): Xaa in position 2 is any or no amino acid
  Variant (4)..(7): Xaa in position 4 to 7 is any or no amino acid
  Variant (11)..(11): Xaa in position 11 is any amino acid
  Variant (13)..(13): Xaa in position 13 is Ala or Ser
  Variant (14)..(15): Xaa in position 14 to 15 is any amino acid
  Variant (16)..(16): Xaa in position 16 is Ala, Cys, Ser or Thr
  Variant (17)..(17): Xaa in position 17 is any amino acid
  Variant (18)..(18): Xaa in position 18 is Leu, Pro or Val
  Variant (19)..(19): Xaa in position 19 is Gly, Asn or Gln
  Variant (20)..(22): Xaa in position 20 to 22 is any amino acid
  Variant (23)..(23): Xaa in position 23 is Phe, Ile or Leu
  Variant (24)..(24): Xaa in position 24 is any amino acid
  Variant (25)..(25): Xaa in position 25 is Ile, Leu or Val
  Variant (26)..(27): Xaa in position 26 to 27 is any amino acid
  Variant (29)..(29): Xaa in position 29 is any amino acid
  Variant (32)..(32): Xaa in position 32 is any amino acid
  Variant (33)..(33): Xaa in position 33 is Lys or Arg
  Variant (34)..(34): Xaa in position 34 is any amino acid
  Variant (36)..(36): Xaa in position 36 is Phe, Ile, Leu or Val
  Variant (37)..(38): Xaa in position 37 to 38 is any amino acid
IXVXXXXGGAXEXXXXXXXXXXXXXXXRXGFXXXAXXXG

SEQ ID NO: 92666 - protein, 56 aa, Artificial sequence
  protein pattern
  Variant (2)..(5): Xaa in position 2 to 5 is any or no amino acid
  Variant (7)..(7): Xaa in position 7 is Ile, Leu or Met
  Variant (8)..(8): Xaa in position 8 is Phe, Leu or Met
  Variant (9)..(9): Xaa in position 9 is Ala, Cys, Gly or Ser
  Variant (10)..(10): Xaa in position 10 is any amino acid
  Variant (11)..(11): Xaa in position 11 is Phe, His or Tyr
  Variant (15)..(15): Xaa in position 15 is Ile or Val
  Variant (16)..(16): Xaa in position 16 is any amino acid
  Variant (17)..(17): Xaa in position 17 is Ala, Gly, Pro or Ser
  Variant (18)..(18): Xaa in position 18 is any amino acid
  Variant (19)..(19): Xaa in position 19 is Ala or Gly
  Variant (20)..(22): Xaa in position 20 to 22 is any amino acid
  Variant (23)..(23): Xaa in position 23 is Ala, Asn, Ser or Thr
  Variant (24)..(24): Xaa in position 24 is Phe, Ile, Leu or Met
  Variant (25)..(25): Xaa in position 25 is Ala, Gly, Ser or Thr
  Variant (26)..(34): Xaa in position 26 to 34 is any amino acid
  Variant (35)..(35): Xaa in position 35 is Phe or Tyr
  Variant (36)..(37): Xaa in position 36 to 37 is any amino acid
  Variant (38)..(38): Xaa in position 38 is Phe, Ile, Leu, Met or Val
  Variant (39)..(44): Xaa in position 39 to 44 is any amino acid
  Variant (46)..(48): Xaa in position 46 to 48 is any amino acid
  Variant (50)..(51): Xaa in position 50 to 51 is any amino acid
  Variant (53)..(53): Xaa in position 53 is Phe, Ile, Leu or Val
  Variant (54)..(54): Xaa in position 54 is any amino acid
  Variant (56)..(56): Xaa in position 56 is Asp, Glu or Gly
PXXXXYXXXXXPHGXXXXXXXXXXXXXXXXXXXXXXXXXXXXXXLXXXFXXPXXRX

SEQ ID NO: 92667 - protein, 13 aa, Artificial sequence
  protein pattern
  Variant (4)..(5): Xaa in position 4 to 5 is any amino acid
  Variant (6)..(6): Xaa in position 6 is Ala, Gly, Ser or Thr
  Variant (10)..(10): Xaa in position 10 is any amino acid
  Variant (11)..(11): Xaa in position 11 is Asp or Glu
  Variant (12)..(12): Xaa in position 12 is any amino acid
  Variant (13)..(13): Xaa in position 13 is Phe or Tyr
LVPXXXFGEXXXX

SEQ ID NO: 92668 - DNA, 1197 bp, Saccharomyces cerevisiae
  CDS (1)..(1197)
atgtctcagaacgtttacattgtatcgactgccagaaccccaattggttcattccagggttctctatcctccaagacagcagtggaattgggtgctgttgctttaaaaggcgccttggctaaggttccagaattggatgcatccaaggattttgacgaaattatttttggtaacgttctttctgccaatttgggccaagctccggccagacaagttgctttggctgccggtttgagtaatcatatcgttgcaagcacagttaacaaggtctgtgcatccgctatgaaggcaatcattttgggtgctcaatccatcaaatgtggtaatgctgatgttgtcgtagctggtggttgtgaatctatgactaacgcaccatactacatgccagcagcccgtgcgggtgccaaatttggccaaactgttcttgttgatggtgtcgaaagagatgggttgaacgatgcgtacgatggtctagccatgggtgtacacgcagaaaagtgtgcccgtgattgggatattactagagaacaacaagacaattttgccatcgaatcctaccaaaaatctcaaaaatctcaaaaggaaggtaaattcgacaatgaaattgtacctgttaccattaagggatttagaggtaagcctgatactcaagtcacgaaggacgaggaacctgctagattacacgttgaaaaattgagatctgcaaggactgttttccaaaaagaaaacggtactgttactgccgctaacgcttctccaatcaacgatggtgctgcagccgtcatcttggtttccgaaaaagttttgaaggaaaagaatttgaagcctttggctattatcaaaggttggggtgaggccgctcatcaaccagctgattttacatgggctccatctcttgcagttccaaaggctttgaaacatgctggcatcgaagacatcaattctgttgattactttgaattcaatgaagccttttcggttgtcggtttggtgaacactaagattttgaagctagacccatctaaggttaatgtatatggtggtgctgttgctctaggtcacccattgggttgttctggtgctagagtggttgttacactgctatccatcttacagcaagaaggaggtaagatcggtgttgccgccatttgtaatggtggtggtggtgcttcctctattgtcattgaaaagatatga

SEQ ID NO: 92669 - protein, 398 aa, Saccharomyces cerevisiae
MSQNVYIVSTARTPIGSFQGSLSSKTAVELGAVALKGALAKVPELDASKDFDEIIFGNVLSANLGQAPARQVALAAGLSNHIVASTVNKVCASAMKAIILGAQSIKCGNADVVVAGGCESMTNAPYYMPAARAGAKFGQTVLVDGVERDGLNDAYDGLAMGVHAEKCARDWDITREQQDNFAIESYQKSQKSQKEGKFDNEIVPVTIKGFRGKPDTQVTKDEEPARLHVEKLRSARTVFQKENGTVTAANASPINDGAAAVILVSEKVLKEKNLKPLAIIKGWGEAAHQPADFTWAPSLAVPKALKHAGIEDINSVDYFEFNEAFSVVGLVNTKILKLDPSKVNVYGGAVALGHPLGCSGARVVVTLLSILQQEGGKIGVAAICNGGGGASSIVIEKI

SEQ ID NO: 92670 - DNA, 1936 bp, Glycine max
  CDS (311)..(1534)
ccacgcgtccggcgagacgacgacagacaggggggaaaaagaagagtaattggcaaattgattttggcttgctcggcaacacggtgggagcattcttcacttgtccttggttttggaacgacgacagccgagctatctcggagacgggcggctccggtacagctggcagggcttccagcagcacagcgactgccgctcccccaggcttccggagggctgagagggcactgcagcttgggacttcttcgggttcgacgatccccttctccttctctctctctttttcgcctcattccattttcatctatcaatggctccagtagcagcagcatcttcagattcaatcaagccaagagatgtttgcatcgttggtgttgcacgtacaccaatgggtggatttcttggtactctgtcatctctatctgccaccaagctaggctctatagctattgaagctgctcttaaaagggccaatgttgatccatcccttgtggaagaagtattttttgggaatgttcttagtgctaatttggggcaagctcctgcaagacaagctgctcttggagcaggaatatccaattcagttatctgcactaccgttaacaaagtttgtgcatcaggaatgaaagctgcaatgcttgctgcacagagtattcaattaggcacaaatgatgttgttgtggctggtggtatggaaagcatgtctaatgtacccaagtacctggctgaagcaaggaaaggatcacgccttggacatgattcacttgttgatgggatgttgaaagatggtttgtgggatgtctataaggatgttggcatgggagtgtgtgctgagctatgtgcagataaccatgcattaacaagagacgaccaggataactatgcaattcagagttttgaacgtggaattgctgcccaagaaagtggtgccttttcatgggaaattgctccagttgaagtctctggtggaagaggaagaccatcaacagttgttgataaggatgaaggcctaggaaagtttgatgctgccaagttacgcaaacttcggccaagtttcaaggagactggaggttctgttacagctggcaatgcttccagcataagtgatggtgctgctgcactagttttggtgagtggagagaaggcactgaagcttgggcttcaagttattgcaaaaatcactggatatgctgatgctgctcaggaaccagagttatttacaacggctccatcccttgccattcccaaagctattgccaaggcggggttggagacttcacaaattgatttttatgaaattaatgaagcctttgcggttgtggctctcgcaaatcagaaacttcttggacttaactcggaaaaagtaaacgtacatggtggagctgttgcactgggtcatcctcttggttgcagtggtgctcgcattctggtgacacttttgggggtactgaagcagaagaatgggaagtacggagttggtggcatttgcaatggaggaggtggtgcatctgcccttgttgttgagcttcagtaagacctatttcatgttcagtagatgtccttttaagagccagcgtttgatgcaaagctcaaaagatcttgcctccctctttagcaagcgaacatgcaagtttcaaatttattacaaggacaagaccgaaagagagcgaaatttagctacatagttgttaggtttaagtcgcatcttgtgaaagtgaaattttcttggcatcaaagtagaacatgaaacaatattatccaaattttagttttctctgaaatgttattggcgtactttggtttggaatgaatcattataaaacctcttattccaagcacaagattacagattcccgtggtttgcaaaatgtgttccagaactgaaattgccaaaaagagtggaaataaggaagttgtagttaaaaatgcgtaagct

SEQ ID NO: 92671 - protein, 407 aa, Glycine max
MAPVAAASSDSIKPRDVCIVGVARTPMGGFLGTLSSLSATKLGSIAIEAALKRANVDPSLVEEVFFGNVLSANLGQAPARQAALGAGISNSVICTTVNKVCASGMKAAMLAAQSIQLGTNDVVVAGGMESMSNVPKYLAEARKGSRLGHDSLVDGMLKDGLWDVYKDVGMGVCAELCADNHALTRDDQDNYAIQSFERGIAAQESGAFSWEIAPVEVSGGRGRPSTVVDKDEGLGKFDAAKLRKLRPSFKETGGSVTAGNASSISDGAAALVLVSGEKALKLGLQVIAKITGYADAAQEPELFTTAPSLAIPKAIAKAGLETSQIDFYEINEAFAVVALANQKLLGLNSEKVNVHGGAVALGHPLGCSGARILVTLLGVLKQKNGKYGVGGICNGGGGASALVVELQ

SEQ ID NO: 92672 - DNA, 1592 bp, Zea mays
  CDS (145)..(1350)
gcacgagctcgtgccgcgcgcacacactgtctttctctgcctttctttccctagcgccgcgccggcgccgccattcgatcaggccgcttcgccggcgacagcatattccaggtcggttggttttggcacttcggaccggcggccatggcttccgacggcatcggccccagagatgtatgtgttgttggggttgcacgcaccccaatgggcggtttccttggtgccttgtctcccttgcctgctacgaaacttggctctatagtaattcaagctgctctggaaagagcaaacgtggatccagccctcgtgcaggaggtctactttggaaacgtcttgagtgctaatttggggcaagctcctgcaaggcaagctgctctgggtgccgggataccaaactctgttgtttgcaccactgttaacaaagtctgtgcatctggcatgaaagctactatgtttgcagcacagtcaattcaattgggtatcaatgatattgttgtggctggtggcatggaaagcatgtccaatgccccaaagtacattgctgaagctaggaaggggtctcgttttggtcatgacacacttgttgatgccatgcttaaggatgggctttgggatgtatacaatgattgtgccatgggaatgtgtgccgagctttgtgctgacaaccatgccctcacaagagaagaccaggatgcatttgctatccaaagcaacgagcgtggaattgctgctcgtgacagtggtgcttttgcatgggagattattccggttcaagttcctgttggtagaggaaaacccccaacattaattgagagagatgaaagcctggataagtttgacccagtaaaactaaagaaacttcgcccaagtttcaaggagaatggtggtacagttacagctggaaatgcttctagtataagtgatggagctgctgcattagttttagtgagtgggcagaaggctcaagagcttggccttcaagtccttgcaaggatcaaaggttatgctgatgcagctcaagctccggagctttttacaaccactccagcacttgcaataccaaaggctatcgcaaatgctggattagagtcatcccgtgttgatttctatgagattaatgaagccttttcggctgttgcgcttgcaaatcaaaaacttcttggaattccttcagaaaagattaatgttcatggaggagctgtatccttaggacatcctctcgggtgcagtggtgctcgcattttggttacccttattggtgttctcagggcgaagagtggcaagatcggagttgctggtgtctgcaacggtggaggcggagcatcagctcttgttctggagctcgcataagaaatctagaccttgtagttagcaaaagctccctgaggtgatcttgtagtcttattttccgttgtagtagtcccatagaacatttcttaatttaatttggcaataaagcaaaagctccctgaggagatattgcttctgttggttgcatagtagagtatcatgtaataagagctacagaaatatttttgatatatttgtgaggatactacagaaatattttatataaaaaaaaaaaaaaaaaa

SEQ ID NO: 92673 - protein, 401 aa, Zea mays
MASDGIGPRDVCVVGVARTPMGGFLGALSPLPATKLGSIVIQAALERANVDPALVQEVYFGNVLSANLGQAPARQAALGAGIPNSVVCTTVNKVCASGMKATMFAAQSIQLGINDIVVAGGMESMSNAPKYIAEARKGSRFGHDTLVDAMLKDGLWDVYNDCAMGMCAELCADNHALTREDQDAFAIQSNERGIAARDSGAFAWEIIPVQVPVGRGKPPTLIERDESLDKFDPVKLKKLRPSFKENGGTVTAGNASSISDGAAALVLVSGQKAQELGLQVLARIKGYADAAQAPELFTTTPALAIPKAIANAGLESSRVDFYEINEAFSAVALANQKLLGIPSEKINVHGGAVSLGHPLGCSGARILVTLIGVLRAKSGKIGVAGVCNGGGGASALVLELA

SEQ ID NO: 92674 - DNA, 1239 bp, Arabidopsis thaliana
  CDS (1)..(1239)
atgtatttatcctttgatccagcagtaatggctacttacagttcagttccggtgtgtgcagatgtttgtgttgtgggagtggcgcgaacgcctataggggacttccttggctccctctcgtctttgactgctacaagacttgggtccatagccatccaagccgcacttaagagagcacatgttgatccggcccttgtggaagaggtcttctttggcaatgtcttaactgccaatcttgggcaagcaccagcaagacaggctgcacttggtgctgggattccctattctgtgatctgcaccactatcaacaaagtttgtgctgcaggaatgaaatctgtaatgctagcgtctcaaagtatccagctcggcttgaatgatattgttgttgctggtgggatggagagcatgtcaaacgtacctaagtacctcccggacgcaagaaggggttctcgattaggtcatgatactgttgttgatggtatgatgaaagatggactttgggatgtctataatgactttggaatgggagtttgtggagaaatatgcgctgaccagtaccgtattacaagagaagaacaggatgcttatgctatccagagctttgagcgtggtattgctgcgcaaaacactcagttgttcgcttgggaaattgttccggtcgaagtttccactggaagagggaggccttcagttgttattgacaaggatgaaggattggggaagtttgatgcagccaagttaaaaaagcttagaccaagtttcaaggaggatgggggatcagtcactgctggaaatgcatcaagcataagtgatggtgcggcagcgttagtgctagtgagtggagagaaggctcttgagcttggactgcatgttatcgctaagattagaggatacgctgatgctgctcaggcaccagagttattcacaaccacgccagctcttgctattcctaaagctataaagcgggctggtttggatgcatctcaagtggattattatgaaataaacgaagcattttctgtggtagctctagccaatcagaaactactgggattagatcctgaacggctcaatgcgcatggaggggctgtttcactgggacatccattgggctgtagcggtgctcgtatcttggtcacattattgggggtgttgagagcaaagaagggaaagtatggagtggcatcaatatgcaacggaggaggaggagcatcagcacttgtccttgagttcatgtaa

SEQ ID NO: 92675 - protein, 412 aa, Arabidopsis thaliana
MYLSFDPAVMATYSSVPVCADVCVVGVARTPIGDFLGSLSSLTATRLGSIAIQAALKRAHVDPALVEEVFFGNVLTANLGQAPARQAALGAGIPYSVICTTINKVCAAGMKSVMLASQSIQLGLNDIVVAGGMESMSNVPKYLPDARRGSRLGHDTVVDGMMKDGLWDVYNDFGMGVCGEICADQYRITREEQDAYAIQSFERGIAAQNTQLFAWEIVPVEVSTGRGRPSVVIDKDEGLGKFDAAKLKKLRPSFKEDGGSVTAGNASSISDGAAALVLVSGEKALELGLHVIAKIRGYADAAQAPELFTTTPALAIPKAIKRAGLDASQVDYYEINEAFSVVALANQKLLGLDPERLNAHGGAVSLGHPLGCSGARILVTLLGVLRAKKGKYGVASICNGGGGASALVLEFM

SEQ ID NO: 92676 - DNA, 1251 bp, Oryza sativa (japonica cultivar-group)
  CDS (1)..(1251)
atggctcctcctccgcactcggactctgacctgctcaagccgagagacgtctgcatcgtgggcgtcgcccgcacgcccatcggcgccctgctcggctccctctcctccctccccgccaccaagctcggctccgtcgccatccaggccgctctcaggagagcaaatgtggagccggcgctcgtgcaggaggtcttcatggggaacgttctcagcgccaaccttggccaagccccggcgaggcaagccgccctaggcgccggcttgcccgacactgtgccctgcaccaccgtcaacaaagtttgctcctcggggatgaaggctgtcatgcttgcggcgcagactattcagcttgggatgcatgatgttgttgtcgctggtgggatggagagcatgtccaatgcccccaaatatgtcgcggcagcaagacgggggtcacggtttgggcacgacgtcctcatcgatgggatgctcaaggatgggctgtgggatgtgtataatgatttcccaatgggaatgtgtgccgagttgtgtgcggatcaacactccatttcaagggaggagcaggatctttatgctatccagagcaatgaacgtgcaatagcagctcgtgatagcggcacattttcttgggaaattgctccggttgaaatttcttccggtagagggaaaccaccacttattgttgacaaggatgagagtcttgcaaagttcaattcagcgaagctgaggaaacttgggccgactttcaagaagaatggttctgtaactgccggcaattcttctagtataagtgatggtgctgctgcaatcgtgctagtcagtggacagaaagccaagagtcttggccttcaagttattgcaaggatcagagggtatgcggatgctgctcaggcacctgaattatttacaactactccagctcttgctattccaaaggctgtatcaaatgcgggtctccaaacttcacaaatagattattatgagataaacgaagctttctccgtcgttgctttagccaaccagaagcttcttggtattccttcgggaaagcttaacctaagtggtggtggtgtttctctgggccatcctattggttgcagtggtgcgagaatcatagtcactttgctcgggattcttagacataaaaatggaaagattggggttgctggagtttgcaatggaggtggtggtgcttctgcccttgttgtggaactcatgcaaccatcactatttacacgttcctcgttgtga

SEQ ID NO: 92677 - protein, 416 aa, Oryza sativa (japonica cultivar-group)
MAPPPHSDSDLLKPRDVCIVGVARTPIGALLGSLSSLPATKLGSVAIQAALRRANVEPALVQEVFMGNVLSANLGQAPARQAALGAGLPDTVPCTTVNKVCSSGMKAVMLAAQTIQLGMHDVVVAGGMESMSNAPKYVAAARRGSRFGHDVLIDGMLKDGLWDVYNDFPMGMCAELCADQHSISREEQDLYAIQSNERAIAARDSGTFSWEIAPVEISSGRGKPPLIVDKDESLAKFNSAKLRKLGPTFKKNGSVTAGNSSSISDGAAAIVLVSGQKAKSLGLQVIARIRGYADAAQAPELFTTTPALAIPKAVSNAGLQTSQIDYYEINEAFSVVALANQKLLGIPSGKLNLSGGGVSLGHPIGCSGARIIVTLLGILRHKNGKIGVAGVCNGGGGASALVVELMQPSLFTRSSL

SEQ ID NO: 92678 - DNA, 1347 bp, Oryza sativa (japonica cultivar-group)
  CDS (1)..(1347)
atggagaaggcgatcgatcgccagcgcgtcctcctcgcccacctcctcccctcctcctcctccgaccaatcgctcctctccgcgtcggcgtgcgccgccggggacagcgccgcctaccagaggacttccgcctacggggacgacgtcgtcgtcgtcgctgcctacaggacacccatatgcaaggccaagcgaggaggtttcaaggatacatacccagaggaccttcttactgttgttctaaaggctgttctggacaacactaagatcaaccctggtgaaattggtgacattgtagttggcacggtgctaggtccaggctcgcagcgtgcaatcgagtgcagggctgcggctttctatgctggagttcccgaaaacgttcctgttagaactgtcaaccggcaatgttcctctggattacaggcagtggctgatgttgccgcggccattaaagctgggttctacgacatagggattggtgcaggcctggaatccatgtcagtaaatgctatgggttgggaaggacaagtaaaccctaaagtaaatgaagtccagaaagcacaggattgtcttttgcccatggggataacgtccgaaaatgttgcgcaccgatatggtgtaacaagacaagagcaggatcaggctgctgctgagtctcataggagggctgctgcagccacagctgctgggaaattcaaagatgagattgttccggtgcctacaaagattgttgaccccaagactggagaggaaaagaaagttgtgatatcagttgatgatggaattaggccagggaccacagcatctggattggcaaagcttaaaccagttttccggaaggatggtaccacaactgcaggcaactctagtcaagtgagcgatggtgctggagctgttcttctcatgaggagggacgtagcgatgaagaagggacttcctattcttggtgttttcaggagctttgctgctgttggagtagatcctgctgttatgggtgttggtcctgcagtagcaataccagctgcagtgaagtctgctggactccagattgaagacattgatctgtttgaattgaatgaggccttcgcttcgcagttcgtgtattgctgcaacaagctgggactggacaggtcaaaagtaaacgtgaatggaggcgcaatcgccctaggacatcctcttggtgcaacaggtgcccggtgcgtcgcaactcttctgaatgaaatgaagcgccggggcagggactgcagattcggtgttgtcaccatgtgcattggatctggcatgggggcagcagctgtgtttgagcggggtgactcggtcgaccaattctcaaacgtgcgccaccattag

SEQ ID NO: 92679 - protein, 448 aa, Oryza sativa (japonica cultivar-group)
MEKAIDRQRVLLAHLLPSSSSDQSLLSASACAAGDSAAYQRTSAYGDDVVVVAAYRTPICKAKRGGFKDTYPEDLLTVVLKAVLDNTKINPGEIGDIVVGTVLGPGSQRAIECRAAAFYAGVPENVPVRTVNRQCSSGLQAVADVAAAIKAGFYDIGIGAGLESMSVNAMGWEGQVNPKVNEVQKAQDCLLPMGITSENVAHRYGVTRQEQDQAAAESHRRAAAATAAGKFKDEIVPVPTKIVDPKTGEEKKVVISVDDGIRPGTTASGLAKLKPVFRKDGTTTAGNSSQVSDGAGAVLLMRRDVAMKKGLPILGVFRSFAAVGVDPAVMGVGPAVAIPAAVKSAGLQIEDIDLFELNEAFASQFVYCCNKLGLDRSKVNVNGGAIALGHPLGATGARCVATLLNEMKRRGRDCRFGVVTMCIGSGMGAAAVFERGDSVDQFSNVRHH

SEQ ID NO: 92680 - DNA, 1386 bp, Oryza sativa (japonica cultivar-group)
  CDS (1)..(1386)
atggagaaggcgatcaacaggcagagggtgcttctcgcccacctggagcccgccgcgagtcccgccgccgccgcgccggccatcaccgcgagcgcgtgcgccgcgggggacagcgccgcgtaccaccgcggggcgtgcttcgcagacgacgtcgtcatcgtcgctgcctataggacagcaatttgcaagtccaagagaggtggtttcaaggatactcccgcagaggacctcttggttccagtattcaaggctttgatagataaaacgaagttgaacccaagtgaagttggtgatattgttgttggtactgttttagctcctgggtcccaaagggcaattgaatgcagaatggctgcattttatgctggattccctgataccgttcctcttatgactgtaaacaggcaatgttcgtctgggcttcaagcagttgcaaatgttgcttctaacattaaagcaggactttatgacattggtattgctgctggcctagagtccatgacagtgaaccaagttcgccttgatgggcaagtgaaccccaaagttgagctgttttctcaagcacgcgattgccttctcccaatgggcctcacgtccgagaatgttgcaaaacgatttggcataacacgaatggagcaagaccaggctgctgttgagtcccacaggaaggctgcggctgcagctgcttctggtaaattcaaggaagaaattgttccagttcacacgaagattgtggatccaaaaactggtgaggaaaaggagatagtggtctcggcagatgatggaatccgaccaggcacttcattggcagtcctgtcaaaactcaaaccagcattctctaaagatggcaccactactgctggaaacgctagccaagtaagcgatggtgctggagcagtcttactaatgagacgtgacattgctatgcaaaagggtcttccaatagttggcgtcttcaggagctttgcagcagttggagttgatccagctataatgggtgttggtcctgctgttgccatccctgcggcagtgaaagctgctggtcttcaaatagatgatgttgaccttttcgagattaatgaggcctttgcatcacagtacgtatactgctgcaagaagttgggacttgatcctgcaaaagttaacgttaacggaggtgcaatggctcttgggcatccattgggtgctacaggtgcacggtctgtcagtacccttctcaacgaaatgaagcgacggggcaaagactgtcgatttggtgtgatttccatgtgcataggttctggcatgggggctgctgctgtctttgagcgtggggatgcagtggatgagctcactaatgctcggtgcatcccgacccataaccggctttcgaaggacgccatgtaa

SEQ ID NO: 92681 - protein, 461 aa, Oryza sativa (japonica cultivar-group)
MEKAINRQRVLLAHLEPAASPAAAAPAITASACAAGDSAAYHRGACFADDVVIVAAYRTAICKSKRGGFKDTPAEDLLVPVFKALIDKTKLNPSEVGDIVVGTVLAPGSQRAIECRMAAFYAGFPDTVPLMTVNRQCSSGLQAVANVASNIKAGLYDIGIAAGLESMTVNQVRLDGQVNPKVELFSQARDCLLPMGLTSENVAKRFGITRMEQDQAAVESHRKAAAAAASGKFKEEIVPVHTKIVDPKTGEEKEIVVSADDGIRPGTSLAVLSKLKPAFSKDGTTTAGNASQVSDGAGAVLLMRRDIAMQKGLPIVGVFRSFAAVGVDPAIMGVGPAVAIPAAVKAAGLQIDDVDLFEINEAFASQYVYCCKKLGLDPAKVNVNGGAMALGHPLGATGARSVSTLLNEMKRRGKDCRFGVISMCIGSGMGAAAVFERGDAVDELTNARCIPTHNRLSKDAM

SEQ ID NO: 92682 - DNA, 1179 bp, Mesorhizobium loti MAFF303099
  CDS (1)..(1179): transl_table=11
atgtccgattccatcgtcattgccagcgccgcgcgcacggccgtcggctccttcaacggcgcgtttgccgccacgcccgcgcatgagctcggtgccgtcgtcatcaaggaacttctatcgcgcgcgggtgtcgaggcagccgaggtcgacgaggtcatcctcggccaggtgctgacggcggcccagggccagaacccagcccgccaggcttctatcattgccggcctgcccaaggagaccaccgcctggggcctcaaccaggtttgcggctcgggcctgcgcgccatcgcgctcggcatgcagcagatcgccaccggcgacgccaaggttatcatcgccggcggccaggaatcgatgtcgctgtcgccgcacgccgagcatctgcgcgccggcgtcaagatgggcgactacaagatgatcgacaccatgatcaaggacggcctgtgggacgccttcaacggctaccacatgggcaacaccgccgaaaacgtcgcccgccagttccagatcacccgcgacgatcaggaccagttcgcgctggcctcgcagaacaaggccgaggccgcgcagaaggccggcaagttcaaggacgagatcgtcgccttcaccatcaagggcaagaagggcgacaccatcgtcgaccaggatgaatacatccgtcatggcgccacgctcgacgccatgaccaagctgaagcctgccttcgacaaggacggcacggtgaccgccgccaacgcctccggcatcaatgacggtgcggccggcgcgctgctgatgagcgaagcggaggccgcaaggcgcggcatcacaccgctggcgcgcatcgcgtcctgggcaaccgccggcgtcgatccggcgatcatgggcaccggcccgatccccgcctcgcgcaaggctttggagaaggccggctggtcggccggcgatctcgacctggtcgaggccaacgaggcattcgccgcgcaggcctgcgccgtcaacaagggcatgggctgggatccctcgatcgtcaatgtcaatggcggcgccatcgccatcggccatccgatcggcgcctcgggcgcccgcgtcttcaacacgctggtctacgagatgcgccgccgcggcgccaagaagggcctcgccacgctgtgcattggcggcggcatgggcgtcgccatgtgcgtggaagccctctga

SEQ ID NO: 92683 - protein, 392 aa, Mesorhizobium loti MAFF303099
MSDSIVIASAARTAVGSFNGAFAATPAHELGAVVIKELLSRAGVEAAEVDEVILGQVLTAAQGQNPARQASIIAGLPKETTAWGLNQVCGSGLRAIALGMQQIATGDAKVIIAGGQESMSLSPHAEHLRAGVKMGDYKMIDTMIKDGLWDAFNGYHMGNTAENVARQFQITRDDQDQFALASQNKAEAAQKAGKFKDEIVAFTIKGKKGDTIVDQDEYIRHGATLDAMTKLKPAFDKDGTVTAANASGINDGAAGALLMSEAEAARRGITPLARIASWATAGVDPAIMGTGPIPASRKALEKAGWSAGDLDLVEANEAFAAQACAVNKGMGWDPSIVNVNGGAIAIGHPIGASGARVFNTLVYEMRRRGAKKGLATLCIGGGMGVAMCVEAL

SEQ ID NO: 92684 - DNA, 1191 bp, Pseudomonas aeruginosa PAO1
  CDS (1)..(1191): transl_table=11
atgacccgcgaagatccgatcgtcatcgtcagcgccgtccgcaccccgatgggcggcttcctcggcgacttcaaggacgtcaacgccgctaccctcggtgccgcggcggtgcgcgccgcggtggagcgggcgcgcctgcaagccgacgaagtggacgaggccgtgctcggctgcgtgctcgccgccggccagggccaggcgccggcgcgccaggcggtgcttggcgccggactggcgcgcggcacgccgtgctcgacgctgaacaagatgtgcggctcgggcatgaaggcgctgatgctcgcccatgacacgttgctcgccggcagcgccggggtcgcgctggccgggggcatggaaagcatgtccaacgcgccctacctgctggagcgcgcccgtagcggctaccgcatgggccacggcaaggtgctcgaccacatgttcctcgacggcctcgaagacgcctacgacaagggccgcctgatgggcaccttcgccgaggactgtgccgaggcctacggcttcacccgcgaagcacaggacgagttcgccgtggcctcgctgacccgcgcgcagcaagccatgcgcgacgggcgcttccaggccgagatcgtgccgctgacggtcaccgccggcaagaccgagcgcctggtggatagcgacgagcagccgccgaaggcccggctggacaagatcccgaccctgaagccggcgttccgcgaaggcggcacggtgaccgcggccaactccagttcgatttccgacggcgccgccgcgctggtcctgatgcgcctttccgaggccgagcgacgcgggctcgcgccgttggcggcgattcgtgggcatgcttcgttcgccgacgcgccgaacctgttccccaccgcgccggtcggtgcggtgaagcgcctgatgcagcgtaccggctggtcgctgggcgaggtcgacctgttcgaggtcaacgaagccttcgccgtggtcggcatggcggcaatgcgcgacctcgacctgtcccacgagcgcctcaacgtccacggcggcgcctgtgcgctgggccatccgatcggcgcgtccggcgcgcggatcgtcgtgaccctgctcaacgccctgcagcagtacgacctggaacgcggcgtggcggcggtctgcatcggcggcggcgaggcgaccgcgatcgccgtcgagcgcttgcgctga

SEQ ID NO: 92685 - protein, 396 aa, Pseudomonas aeruginosa PAO1
MTREDPIVIVSAVRTPMGGFLGDFKDVNAATLGAAAVRAAVERARLQADEVDEAVLGCVLAAGQGQAPARQAVLGAGLARGTPCSTLNKMCGSGMKALMLAHDTLLAGSAGVALAGGMESMSNAPYLLERARSGYRMGHGKVLDHMFLDGLEDAYDKGRLMGTFAEDCAEAYGFTREAQDEFAVASLTRAQQAMRDGRFQAEIVPLTVTAGKTERLVDSDEQPPKARLDKIPTLKPAFREGGTVTAANSSSISDGAAALVLMRLSEAERRGLAPLAAIRGHASFADAPNLFPTAPVGAVKRLMQRTGWSLGEVDLFEVNEAFAVVGMAAMRDLDLSHERLNVHGGACALGHPIGASGARIVVTLLNALQQYDLERGVAAVCIGGGEATAIAVERLR

SEQ ID NO: 92686 - DNA, 1140 bp, Lactococcus lactis subsp. lactis Il1403
  CDS (1)..(1140): transl_table=11
gtgaaagaaattgtaatcattgacgccttaagaacaccagttggaagatacgacggtgctcttgctgaatattcagcagcagaacttgggacacatgttgtttcaaacttattgtcaaaacatgaaaatataaaatcagatgttgaacaagttatttttgggaatgttcttcaagctggtaatggtcaaaatatagcacgtcaaattgcgattcatagtggtctatctaatacagtgcccgcttcaacaatcaacgaagtttgtggttcaggaatgaaagcagtgattttagctaaacaacttttacagcttggtgaagcagaagttgtaatcgctggtgggacagaatctatgtctaatgccccaattataaagaatcgaaaaactcaagaagaaacattaagtatgttaaatgatggcttagttgatgccttctcaggaatttctatggggattattggtgaaactattgctgaacaatttgatataagtcgagcagaccaagacgcttttgcgcaaaactctcaagaaaaagcggtcgctgcaagtcaagccggaatttttaaagaagagattgttgcgattggagaagtcggagtcgacgaaacaccacgtccttcttctagtttagaaaaattagccactttaaggacagctttcaaagaaaatggaactgtgacagcaggtaattcttctcctgttaatgatggagcttcagctgtcattcttgcaacgaaagactatgctgaaaaacatgggattccgtacctagcagaactagttgatagtacagaagttggaattgaccctgctattatgggagtttcaccaattgaagctatcaaaaaattaattaatcgttcagagcttgaactttcagatattgacctgtttgaaattaatgaagcatttgcagcatcaagtcttgctgtcaatcgtgaacttggtttaaatgaatcacaagttaacatttatggtggtgcaattgcattaggtcatgctatcggttcaagtggttctaaaattctcacgactttgtcttatgccttaaaacgtgagcaaaaacgctatggaattgctagtctttgtatcggtggaggcctaggtttggctgttcttttaaaaaatcctaacctttaa

SEQ ID NO: 92687 - protein, 379 aa, Lactococcus lactis subsp. lactis Il1403
MKEIVIIDALRTPVGRYDGALAEYSAAELGTHVVSNLLSKHENIKSDVEQVIFGNVLQAGNGQNIARQIAIHSGLSNTVPASTINEVCGSGMKAVILAKQLLQLGEAEVVIAGGTESMSNAPIIKNRKTQEETLSMLNDGLVDAFSGISMGIIGETIAEQFDISRADQDAFAQNSQEKAVAASQAGIFKEEIVAIGEVGVDETPRPSSSLEKLATLRTAFKENGTVTAGNSSPVNDGASAVILATKDYAEKHGIPYLAELVDSTEVGIDPAIMGVSPIEAIKKLINRSELELSDIDLFEINEAFAASSLAVNRELGLNESQVNIYGGAIALGHAIGSSGSKILTTLSYALKREQKRYGIASLCIGGGLGLAVLLKNPNL

SEQ ID NO: 92688 - DNA, 1182 bp, Deinococcus radiodurans R1
  CDS (1)..(1182): transl_table=11
atgtcaaaagcagtgatcgtggcggcctcgcgcacgccgacgggcaagtttctgggggcgctgactgacgtgccggcggtggaactcggcgccatcaccctgcgcgaaaccctgcggcgttcggggatgcccgccgaactggtcgaagaagtcatcatgggccaagtggtgcaggcgggctgcggccagaacccggcgcggcaggcggcgctgcgggcgggcgtgtcgcacgaagcaggcgccctgaccattaacaaagtgtgtggctctgggctgaaagctgtgatgctggcggcccagagtatccgcgcgggcgaccagcaggccgtgctggcgggcggcatggagtccatgagcaacgcaccgcacctgctgccgggcgcgcgcaagggctaccgcctggggcacgcgacggtgctggacgccaacacccacgacggcctgtggtgctccatcaacgacgagggcatgggcctgaccggcgagcgggtggccgagaagtacagcatcgggcgtgaggagcaggacgcctacgcgaccggcagccaccgcaaagccgttgccgccgcgcagggcgggctgttcaaggacgaaatcgtgccggtgacgatcaagggccgcaagggtgacgtgatcgtggacaccgacgaaggcccccgcgccgataccagcgaggaaacgcttggcaagctgaagcccgctttcaagaaagacggctcggtcacggcgggcaatgctcccggcctcaacgacggcgcggcctcgctgctggtcgtgagtgaagaactggcgcaggcgcacgagctgacgccgctggccgaaatcgtggactacgcctcgggcggcctcgcgccggaatgggtgatgatgacgccggtgccggctacccagaagctgctaaagaagatgaacatccaggccggggacgtggacctctgggaactgaacgaggccttcagcgtgcagagcctcgcggtggcgcgcgaactgggcctggacgctgagcgcgtgaacgtcaatggcggtgcggtggcgctggggcaccccatcggcgcaagcggggcgcgcatcctggtgacgctgctctccgccctcaaacagcaggataaggaactcggcgtggcgacactgtgcatgggcggcggcaacgggctggcgctggccgtgcgccgcctcgggtaa

SEQ ID NO: 92689 - protein, 393 aa, Deinococcus radiodurans R1
MSKAVIVAASRTPTGKFLGALTDVPAVELGAITLRETLRRSGMPAELVEEVIMGQVVQAGCGQNPARQAALRAGVSHEAGALTINKVCGSGLKAVMLAAQSIRAGDQQAVLAGGMESMSNAPHLLPGARKGYRLGHATVLDANTHDGLWCSINDEGMGLTGERVAEKYSIGREEQDAYATGSHRKAVAAAQGGLFKDEIVPVTIKGRKGDVIVDTDEGPRADTSEETLGKLKPAFKKDGSVTAGNAPGLNDGAASLLVVSEELAQAHELTPLAEIVDYASGGLAPEWVMMTPVPATQKLLKKMNIQAGDVDLWELNEAFSVQSLAVARELGLDAERVNVNGGAVALGHPIGASGARILVTLLSALKQQDKELGVATLCMGGGNGLALAVRRLG

SEQ ID NO: 92690 - DNA, 1254 bp, Agrobacterium tumefaciens str. C58
  CDS (1)..(1254): transl_table=11
ttggtgatagcgttcatggcagtcgcggtctggaggagatcgcgatggtggtcgttttctcaagcgagaggatggccaagggaggtgaatttggctgtgcatgaccctgtcgtgatcgtcggggccgcccgtactgctatgggtgggttccagggcgaattcaaatcggtggccgcgcccgatctcggggccgcggcgatccgtgcggccgtcgaacgggcggctattccggtttctgacattgatgatgtgctgatgggctgtgtgctcacggccgggcaggggcaggctccggccagacaggcggccattgccgccggtgtcccgaattccgtgggcgcaacgaccatcaacaagatgtgtggctcgggcatgaaggcgatcatgctggggcatgaccagatcgcggcgggaagctcttccatcgtgcttgcgggcggcatggaaagcatgagcaatgcgccttatctgctggatcgcgcccggaacggctatcgtctcggccatggcaaggtcatcgaccatatgtttctcgatggtctcgaagatgcctatgacaagggccggttgatgggcactttcgcggaagattgcgctgaagcctaccagttcacccgcgcaatgcaggatgactatgcgctgacctcgcttgaacgggcgcgacgcgccatagcggaaggcgcattccaagcggaaatcgcgcctgttggtgatgttgccgtggacgagcagccgggcaaggcaaagccggaaaaaattccgcagctgaagcccgcctttcgcgatggcggaacggtgacggcggcgaattccagttccatttctgatggtgcggccgctcttgttctcatgcgcagatcggaagcagaacgacggggccgttcaccgctggcaaccattatcggtcaggcctcgcatgccgatgcacctgccggatatccgaccgcgcccatcggcgcgattaaaaagctgttcgaaaaaaacggctgggccgcgaaggacgtcgatctgttcgaaatcaacgaggcctttgcggtcgtggccatggcagcgatgcgcgatctcgatctgccgcatgagaaggtgaatgtgcatggcggcgcctgcgcgcttggccacccgatcggcgcttccggcgcgaggatcgtcgtcaccttgctggcggcccttcaacgccacgggctgaaacggggcgtggccgccgtctgtatcggcggcggtgaagcaaccgcgctcggtatcgagcggcattga

SEQ ID NO: 92691 - protein, 417 aa, Agrobacterium tumefaciens str. C58
MVIAFMAVAVWRRSRWWSFSQARGWPREVNLAVHDPVVIVGAARTAMGGFQGEFKSVAAPDLGAAAIRAAVERAAIPVSDIDDVLMGCVLTAGQGQAPARQAAIAAGVPNSVGATTINKMCGSGMKAIMLGHDQIAAGSSSIVLAGGMESMSNAPYLLDRARNGYRLGHGKVIDHMFLDGLEDAYDKGRLMGTFAEDCAEAYQFTRAMQDDYALTSLERARRAIAEGAFQAEIAPVGDVAVDEQPGKAKPEKIPQLKPAFRDGGTVTAANSSSISDGAAALVLMRRSEAERRGRSPLATIIGQASHADAPAGYPTAPIGAIKKLFEKNGWAAKDVDLFEINEAFAVVAMAAMRDLDLPHEKVNVHGGACALGHPIGASGARIVVTLLAALQRHGLKRGVAAVCIGGGEATALGIERH

SEQ ID NO: 92692 - DNA, 1194 bp, Sulfolobus tokodaii str. 7
  CDS (1)..(1194): transl_table=11
gtgattaatatggatgcatatattgtttccgctgtaagaactcctataggaaaatttggtggagtatttaaggatctacctccttatgagttaggagctattgcaataaaggaagctttaaaaagagctaacgttgaccctgctaaagtagatataacaataatgggaaatatacttagggcaggacatgggcaggatttagcaagacaagcagcaataagagctggaatcccaatggaaattgatggttattgtgttgacatggtgtgttcatctggtatggtaagtgtgataaacgcagtacagatgataaaaagtggggatgcagatatagtagtagctggtggaatggagagtatgagtcaggctatgttagcaattagaagtgaggcaagatggggagtcaaaatgctgttaggtaaaaaattggactttattgatacaatgttgatagatgggcttacagatccattcaacatgaaattgatgggacaggaagctgatatggttgcaaagtcacacaatatcagtagaagagagttagatgaagtggcttatgaaagtcataagagagcaataatagctactgaaaaaggatattttgctaaggagatagtatcagttaaagtagatggcaaagaagttactcaagatgaaggaattagaagggacacatccatagaaaaattatctcaactaaagccagcatttagtcctgatggtgtacatactgcaggaaactcatctcagatttccgatggttcatcagcattagttatagtaagtgaaaaaatagttaaagaatataaattggaaccaatagctaagattttaggttatagttgggttggaattgaaagttggagatttactgaagcacctatatttgctgttaagaaattactacagaaattaaatatggaaatttcacactttgattatttcgagaataatgaagcttttgcagtcaacaatgtactctataataaatatttaggtgttccgtatgacaggctaaacgtatttggaggagcaatagccttaggtcatccaataggtgctagtggtgccagaataataacgacccttattaatgtgttatcaacaatgggaggaaaaagaggaatagctagtatctgtcatggtactggaggaagtacggccattgctattgaattattaaggcctctataa

SEQ ID NO: 92693 - protein, 397 aa, Sulfolobus tokodaii str. 7
MINMDAYIVSAVRTPIGKFGGVFKDLPPYELGAIAIKEALKRANVDPAKVDITIMGNILRAGHGQDLARQAAIRAGIPMEIDGYCVDMVCSSGMVSVINAVQMIKSGDADIVVAGGMESMSQAMLAIRSEARWGVKMLLGKKLDFIDTMLIDGLTDPFNMKLMGQEADMVAKSHNISRRELDEVAYESHKRAIIATEKGYFAKEIVSVKVDGKEVTQDEGIRRDTSIEKLSQLKPAFSPDGVHTAGNSSQISDGSSALVIVSEKIVKEYKLEPIAKILGYSWVGIESWRFTEAPIFAVKKLLQKLNMEISHFDYFENNEAFAVNNVLYNKYLGVPYDRLNVFGGAIALGHPIGASGARIITTLINVLSTMGGKRGIASICHGTGGSTAIAIELLRPL

SEQ ID NO: 92694 - DNA, 1176 bp, Caulobacter crescentus CB15
  CDS (1)..(1176): transl_table=11
atgagcgagattgtcatcgtttccgccgcccgcacgccggtaggctcgttcaatggggccttggccagcctgccggcttcggaactgggcaaggccgtcatcgaagccgccgtctcgcgcgcggggatcgcgccctccgacgtcgatgaagtgatcctgggccaggtgctgcaggccgccgccggtcagggtccggcgcgccaggcctcggtgaaggccggcatcccggtcgaggccccggcctggagcctgaaccagctgtgcggctcgggtctgcgcgccgtggccctggcggcccagcagattgccgacggctcggccaaggtggtggtcgccggcggccaggagagcatgagccaggcgccgcacgcccagaacctgcggggcggccagaagatgggcgacctgcagttcgtcgacaccatgatcaaggacggcctgtgggacgccttccacggttaccacatgggtcagaccgccgagaacatcgccagccgctggcagatcacgcgcgaagaccaggacaagttcgccgtcaccagccagaatcgcgccgaggccgcccagaaggccggcaagttcgatgacgagatcgttccgatcaccatcaagggccgcaagggcgacaccatcgtcgacaaggacgagttcatccgccacggcgcgacgatcgagagcgtccagggcctgaagccggtgttcaacaaggaaggctcggtcaccgccgccaacgcctcgggcctgaatgacggcgccgccgccctcgttttgatgagcgccgaggaagccgccaagcgcggcctcaagcccctggccaggatcgcctcgtgggccaatgccggcgtcgagcccgagatcatgggcaccggtccgatcccggcctcgaagaaggcgctggagaaggccggctggtcggtctccgacctcgacctggtggagagcaacgaagccttcgccgcccaggccctgtgcgtggtgcgcgagctgggcctggacccggccaaggtgaacgtcaacggcggcgccatcgccatcggtcacccgatcggcgcttcgggtgcgcgcattctgaccacgctggtccacgagatgaagcgctcgggcgccaagaagggcctggccacgctgtgcgtcggcggtggcatgggcgtggccatgtgcgtggaagcggtctga

SEQ ID NO: 92695 - protein, 391 aa, Caulobacter crescentus CB15
MSEIVIVSAARTPVGSFNGALASLPASELGKAVIEAAVSRAGIAPSDVDEVILGQVLQAAAGQGPARQASVKAGIPVEAPAWSLNQLCGSGLRAVALAAQQIADGSAKVVVAGGQESMSQAPHAQNLRGGQKMGDLQFVDTMIKDGLWDAFHGYHMGQTAENIASRWQITREDQDKFAVTSQNRAEAAQKAGKFDDEIVPITIKGRKGDTIVDKDEFIRHGATIESVQGLKPVFNKEGSVTAANASGLNDGAAALVLMSAEEAAKRGLKPLARIASWANAGVEPEIMGTGPIPASKKALEKAGWSVSDLDLVESNEAFAAQALCVVRELGLDPAKVNVNGGAIAIGHPIGASGARILTTLVHEMKRSGAKKGLATLCVGGGMGVAMCVEAV

SEQ ID NO: 92696 - DNA, 1191 bp, Sinorhizobium meliloti 1021
  CDS (1)..(1191): transl_table=11
atgaacaagcaggatcctgtggtcatcgtcgggcaggcacgaaccccgcttggcagtttccaaggtgagttgaaggacctttccgccgccgacctcggcgcggccgcgattgtcgatgctctgaagcgcgccggacttgcgccggatgcggtcgatgaggtgatgttcggttgtgtcctgaccgcgggacagggacaggcgccagcccgtcaggcggcgctcggtgcgggtcttccgcccggcgtcggcgcgaccaccgtgaacaagatgtgtggttcgggcatgaaggcggcgatgctggcgcatgacctgatcaaggcggaatcggcctcgatcgtggttgcgggcggcatggaaagcatgaccaatgccccctatctgctcgaccgtgcgcggcagggctatcgcatcggacaccagaaggttctggaccacatgttcctcgatgggctggaggatgcctatgacaaggggcgcctgatgggcagctttgccgaggattgcgcggaagcctatcaattcacccgcagcgcccaggatgagtatgccattgcgtccctggagaaggcgcagaaggcaagcgccgacggcagctttgcggaggagatcgtccccttgagcatcgcctcgggcaagggggaacggaccgtcaacctggacgagcagccgcagaaggcgcggctcgacaaaattcctctgttgaaaccggcttttcgcgacggcggcacgatcacggccgcgaacgcctcttcgatttccgacggggcagcggcgctggtgctgatgcgccggtcggcggcggataaacagggcatcgggcctctggcggtgatctgcggtcatgccacccatgcggacgcccccagtctctttccgacggcgccgatcggagcgatcaaggcactctgccggcgcatcggctgggacattggtgaggtcgatctcttcgaaatcaacgaggcctttgccgtcgtgccgatggcggcaatgcgcgagctcggccttgatgcggagaaggtgaacgtccacggcggcgcctgcgcgttgggccatccaatcggcgcctcgggcgcccgggtgatcgtcacgctcgtcaatgcgctgcgccgccgtggccttagacgcggcatcgcgtccgtgtgcatcggcggcggcgaggcgactgcagtcgcggtggagatatcgggctga

SEQ ID NO: 92697 - protein, 396 aa, Sinorhizobium meliloti 1021
MNKQDPVVIVGQARTPLGSFQGELKDLSAADLGAAAIVDALKRAGLAPDAVDEVMFGCVLTAGQGQAPARQAALGAGLPPGVGATTVNKMCGSGMKAAMLAHDLIKAESASIVVAGGMESMTNAPYLLDRARQGYRIGHQKVLDHMFLDGLEDAYDKGRLMGSFAEDCAEAYQFTRSAQDEYAIASLEKAQKASADGSFAEEIVPLSIASGKGERTVNLDEQPQKARLDKIPLLKPAFRDGGTITAANASSISDGAAALVLMRRSAADKQGIGPLAVICGHATHADAPSLFPTAPIGAIKALCRRIGWDIGEVDLFEINEAFAVVPMAAMRELGLDAEKVNVHGGACALGHPIGASGARVIVTLVNALRRRGLRRGIASVCIGGGEATAVAVEISG

SEQ ID NO: 92698 - DNA, 1230 bp, Synechocystis sp. PCC 6803
  CDS (1)..(1230): transl_table=11
atggccgcccatcccaacccatggcattggaaaacaattatgcgtgatgtttttattgttgccgctaaacgaactcccctgggacgttttggtggctccctgaccaatttttcggcggcggatttgggagcccatgtgatgaaaagcgtcctagcccaggccggggtggggggagaccagcttgacctgtacattatgggcaacgtgttaagggctggccatgggcaattgattccccggcaagcggccttgaaggcggagattcccgatacggtggacggttatgcagtggatatggtctgctcttccgccatgatgagtgtgattaatgcagctttaaccatccgggctggggagggggatttaattttagctggagggacggaatccatgtcccaaactggtttttacctttcccaccgggcccgctggggctacaagttcctcatgggagcaccggaaaatttaaccgatctcctgctccatgatggtttgacggacagcaccaatggggagggcatgggggaacagacggaaaaattggccgcagagcatggtttcagccggatagaattggacgaagtggcctgcttatcgcaacaaagggcggcccacgccacggaatctggttattttgactcagaaattgccccgattgaaatcaccagtcggaaaggaacccaggtgttagccagtgatgaaggtattcgcagtgacaccaccgtggaaagtctaggcaaattgcgctcggcctttgccaaggacggagtgttaacagcgggcaactgtagtcagattaccgatggggcggcagctttgctcctggccagtggggaagcggtggaaaaatatcaactcaaacccttggcaaaaattttgggaggcagttgggcggcgggtactcccagtcgttttcctgagttgcctattaccgctagccagaaactgttagcaaagctagataaaaccctggcagattttgacttgtttgaaaataatgaagccttctccgtcagcaatcttttatttgagcggcggttgggggtggatcgggacaagttgaatgtgaacggtggggcgatcgccctggggcatcccattggagcgtcgggggccaggatcatggttaccctactctatgccttgcaacaacgggataaaactctggggttagcagccctttgccatggcacggggggcggtacggcgatcgccttagagcgggtgtga

SEQ ID NO: 92699 - protein, 409 aa, Synechocystis sp. PCC 6803
MAAHPNPWHWKTIMRDVFIVAAKRTPLGRFGGSLTNFSAADLGAHVMKSVLAQAGVGGDQLDLYIMGNVLRAGHGQLIPRQAALKAEIPDTVDGYAVDMVCSSAMMSVINAALTIRAGEGDLILAGGTESMSQTGFYLSHRARWGYKFLMGAPENLTDLLLHDGLTDSTNGEGMGEQTEKLAAEHGFSRIELDEVACLSQQRAAHATESGYFDSEIAPIEITSRKGTQVLASDEGIRSDTTVESLGKLRSAFAKDGVLTAGNCSQITDGAAALLLASGEAVEKYQLKPLAKILGGSWAAGTPSRFPELPITASQKLLAKLDKTLADFDLFENNEAFSVSNLLFERRLGVDRDKLNVNGGAIALGHPIGASGARIMVTLLYALQQRDKTLGLAALCHGTGGGTAIALERV

SEQ ID NO: 92700 - DNA, 1179 bp, Salmonella typhimurium LT2
  CDS (1)..(1179): transl_table=11
atgaaagaggttgtgatagtgggggctttacggacacccatcggctgttttcagggaacgctggcccgtcattccgccgtcgagctggggagcatggtcgtaaaagcgttaattgagcgcaccggcgtggacgctaacgctatcgatgaggtcatcctcggtcaggtactgacggctggcgccgggcagaatccggcgcgccagtcagccatcaaaggagggctgccgactaccgtttccgctattaccattaatgacgtttgtggttccggtttaaaagcgttgcacctggcgacgcaggctattcagtgcggcgaagcggacattgttattgcgggcgggcaggagaatatgagccgtgcgccgcatgtcctcaatgacagccgtagcggcgcgttgcctgatgccgacaatctggtggatagtctggtacatgatggcttatgggatgccttcaacgattatcacattggcgtgacggcagaaaacctggcgcgggaatatggcatcagccgcgagttacaggatgcttatgcgctcagttcgcagcaaaaagccagggccgcgattgataccggacgttttaaagatgagattgtccccatcgtcacgcaacgtaatgggcagaccgcaattgtcgatacggatgaacaaccgcgggccgacgccagtgcggaggggttagccctgctgcatccggcgtttgatagtttaggttcggtgacggcgggtaatgcctcctcaatcaacgatggcgccgccgcggtgatgatgatgagcgaggcgaaagcccaggcgctggggctgccggtgctggcgcgcatccgcgcgtttgccagcgtcggcgtcgatcctgcgctaatggggattgcgccggtatatgctacccggcgctgtctggagcgtgccggctggcaactgacggaggtcgaccttatcgaagccaacgaagcgtttgccgcccaggcgttatcggtaggaaaaatgctggaatgggatgagcgacgggtaaacgttaatggcggcgcgattgcgctggggcatcccattggcgcttccggctgtcgaattctggtttcactggtgcacgaaatggttaaacgcgacgcgcgtaaaggcctggcgacgctgtgtatcggtggcggtcagggcgttgctttaaccattgaacgcgactga

SEQ ID NO: 92701 - protein, 392 aa, Salmonella typhimurium LT2
MKEVVIVGALRTPIGCFQGTLARHSAVELGSMVVKALIERTGVDANAIDEVILGQVLTAGAGQNPARQSAIKGGLPTTVSAITINDVCGSGLKALHLATQAIQCGEADIVIAGGQENMSRAPHVLNDSRSGALPDADNLVDSLVHDGLWDAFNDYHIGVTAENLAREYGISRELQDAYALSSQQKARAAIDTGRFKDEIVPIVTQRNGQTAIVDTDEQPRADASAEGLALLHPAFDSLGSVTAGNASSINDGAAAVMMMSEAKAQALGLPVLARIRAFASVGVDPALMGIAPVYATRRCLERAGWQLTEVDLIEANEAFAAQALSVGKMLEWDERRVNVNGGAIALGHPIGASGCRILVSLVHEMVKRDARKGLATLCIGGGQGVALTIERD

SEQ ID NO: 92702 - DNA, 1170 bp, Listeria innocua Clip11262
  CDS (1)..(1170): transl_table=11
atgaaagaagtagttataatagatgccgttagaacaccaattggaaaatttggtggtagtttgaaagacatcagtgcagtagaccttggtgctaccgctttaaaaggtgttttaaaaagagctaacattgctccagaacgtgtggatcaagttatttttggcaatgttttacaagcaggtctcggtcaaaacgtagcaagacaagtcgctattaaagccgggattccttataaagtaccaggtgtgacaattaatgaagtttgtggctctggtttaaaagctatcatgcttggtagacaagcaattcaactaggggaggctgacattgtagcagtaggagggaccgaaaatatgtcccaagcgccgttattacttaacccggaactagctggtgaagaaatcaacccgaaagatttaaaaaatagcatgattattgatggacttacagatgtatacggggaataccacatgggaattactgcagaaaatgtggcagaaaaatattccgtttcaagagaagaccaagataaatttgcccataattcgcaaatgaaagctgctcgtgcgcaagaaaaaaacctttttgaagaggaaatagttcctgttcaacttccagatggttcattttttgaagctgacgaaacaattcgcgctaattctactttagaaaaacttgctacgcttaagagtgtttttcaagaaggtggaactgttactgcaggtaatgcttctggtatcaatgacggggcttctgcaatcattttaatgtccaaagaaaaagctgtggcagaaaacatcccttatttagctacaattaaagtaacttcagaagtcggagtggatccagcttatatgggttatgcgccatactatgcagttaatgaagcgctagaaaaagcaggctactcaatagctgatattgatttattccatttaaatgaagcttttgcatctcaatcagttgcagttgcaagagatttaaaaatacctgaagagaaacttaatatttatggtggagcaatagcgctaggccatccaatcggtgcttcaggagctcgcattgttgtttcattgttaaatgagttacaacacgaagataaacatacaggtgtagcttccttatgtattggcggcggtattggtattgcaattatcattgaaagagtataa

SEQ ID NO: 92703 - protein, 389 aa, Listeria innocua Clip11262
MKEVVIIDAVRTPIGKFGGSLKDISAVDLGATALKGVLKRANIAPERVDQVIFGNVLQAGLGQNVARQVAIKAGIPYKVPGVTINEVCGSGLKAIMLGRQAIQLGEADIVAVGGTENMSQAPLLLNPELAGEEINPKDLKNSMIIDGLTDVYGEYHMGITAENVAEKYSVSREDQDKFAHNSQMKAARAQEKNLFEEEIVPVQLPDGSFFEADETIRANSTLEKLATLKSVFQEGGTVTAGNASGINDGASAIILMSKEKAVAENIPYLATIKVTSEVGVDPAYMGYAPYYAVNEALEKAGYSIADIDLFHLNEAFASQSVAVARDLKIPEEKLNIYGGAIALGHPIGASGARIVVSLLNELQHEDKHTGVASLCIGGGIGIAIIIERV

SEQ ID NO: 92704 - DNA, 1410 bp, Drosophila melanogaster
  CDS (1)..(1410)
atgagccttcaaaatgtctgccgcaagggtaacgccttcaacctgttgaatgtcgccaggaaagttcaatgccgcgctctatcggccgctgtggcgaatccacaaccgaagcagaagaacagccagaatatcgtgctcgtggatggagtccgcacaccctttctgacctccggaaccacctactccaagctgatgccccatgaactggccaggcactcgcttttgtcattgctgcaaaagaaccgcctggacaaggagctcatcgactacatcgtgtacggcagcgtcatccaggaggtgaagacctccaacattgccagggaggcagccttggcagctggattcagcaacaagacacctgcccacaccgtcaccatggcctgcatcagttccaatgcggccatcaccacgggcatgggtctgatagccaccaacacctacgatgtcatcgttgccggcggcgtggagttcatgtccgatgtgcccattcgccactcccgcaagatgcgctccctgctcctgaaagccaacaaggcaaagaccctgggccagcggctggccctgctgtccaccttcaggccagacttcctggcccccgagctgcccgccgttgcggagttctcctccggcgagaccatgggacactcggccgatcgcttggcatccgccttcaacgtatcccggagcgagcaggacgagtacgccctgcgatcccacacactggccaaggaggcccaggagaagggctacttcaccgatctggttcccttcaaggtgtccggcgtggaccagatcgtggacaaggacaacggcatccgcgtgtctagtcccgagagcctggcaaagctgaggcccgcctttgtgaagccctacggcactgtgacagcagccaacgcctccttcctcacggacggagcttctgcttgcattatcatgaccgaggagaaggccaagcagctgggcctcaagcccaaggcctatctgcgcgacttcctgttcgtgtcgcaggatcccgtcaaccagctgctgctgggacccgcctacggaattcccaagctgctcaagaaggctggactcacgctgaaggacattgactcgtgggagatccacgaggcgttcgccggacagatcgtggccaatctgaaggccctggactccgactggttctgcaagacttacttgggcctgaacgagaaggtcggcactcccgacctgtccaagtggaacaactggggcggttctctgtccatcggccaccccttcgccgccacaggagtccgcctctgcatgcacaccgccaaccgcctggtgcgcgaggatggcaagttgggcgtggtcgccgcctgcgcggccggtggacagggcgtggctatgctcattgagcgctatccgggcgccacagccgactga

SEQ ID NO: 92705 - protein, 469 aa, Drosophila melanogaster
MSLQNVCRKGNAFNLLNVARKVQCRALSAAVANPQPKQKNSQNIVLVDGVRTPFLTSGTTYSKLMPHELARHSLLSLLQKNRLDKELIDYIVYGSVIQEVKTSNIAREAALAAGFSNKTPAHTVTMACISSNAAITTGMGLIATNTYDVIVAGGVEFMSDVPIRHSRKMRSLLLKANKAKTLGQRLALLSTFRPDFLAPELPAVAEFSSGETMGHSADRLASAFNVSRSEQDEYALRSHTLAKEAQEKGYFTDLVPFKVSGVDQIVDKDNGIRVSSPESLAKLRPAFVKPYGTVTAANASFLTDGASACIIMTEEKAKQLGLKPKAYLRDFLFVSQDPVNQLLLGPAYGIPKLLKKAGLTLKDIDSWEIHEAFAGQIVANLKALDSDWFCKTYLGLNEKVGTPDLSKWNNWGGSLSIGHPFAATGVRLCMHTANRLVREDGKLGVVAACAAGGQGVAMLIERYPGATAD

SEQ ID NO: 92706 - DNA, 1182 bp, Ralstonia solanacearum GMI1000
  CDS (1)..(1182): transl_table=11
atgtccgaccgcatcatcatcgcctccgccgcccgcacccccatgggcgctttccagggcgagctcgccagcctgaccgcgccgcagctcggcgcgaccgccatccgcgcggcggtggagcgcgcaggcctgaagcccgagcagatcgaggaggtcatcatgggctgcgtgctgccggccggccagggccaggcgccggcgcgccaggcggcgctgggcgcgggcctgccgctgtcggtgggctgcacgacggtcaacaagatgtgcggctcgggcatgcgcgcggcgatgaacgcctacgacgcgctgctggccggatcggtggacgtggtggtggccggcggcatggagagcatgaccaacgcgccctacctgatcccgaagggccgcggcggctaccgcatcggccacggcatgatctacgaccacatgatgctcgacggcctggaagacgcctatgacaagggccgcgccatgggcaccttcggcgaggactgtgccgagaagtacggcttcacgcgcgaggcgcaggatgccttcgcgatggactccgtgcggcgcgcgcaggcagccaccgaatcgggcgcgttccgctgggagatcgcgccggtgacagtgccgggcaaagccggcgacaccgtggtcgacaccgacgaaggcccgcgccgcatcaaggtcgacaagattccctcgctcaagcccgcgttcaagaaggacggcacggtgacggccgcttcgtcctcgtcgatcaacgacggcgccgccgcgctggtgatgatgcgcgaatcgaccgccaggcagctcggcatcgcgccgctggcggtcatgctgggccacaccacgcacgcgcaggcgccgggctggttcaccaccgcgccggtcacggcgatcgacaagctgttcaaaaagctcggctggagcgccgacagcgtggacctgttcgagatcaacgaagcgtttgccgtggtgccgatggcggccatgcacgacctgcgcatcccgcacgagaaggtgaacgtgaacggcggcgcgtgtgcgctgggccatccgatcggcgcgtcgggcgcgcgcctgatcgccacgctgctgggcgcgctgcgccaccgcggcggcaagcgcggcgtggccagcctgtgcatcggcggcggcgaggccaccgcggtcggcatcgaactgctgtga

SEQ ID NO: 92707 - protein, 393 aa, Ralstonia solanacearum GMI1000
MSDRIIIASAARTPMGAFQGELASLTAPQLGATAIRAAVERAGLKPEQIEEVIMGCVLPAGQGQAPARQAALGAGLPLSVGCTTVNKMCGSGMRAAMNAYDALLAGSVDVVVAGGMESMTNAPYLIPKGRGGYRIGHGMIYDHMMLDGLEDAYDKGRAMGTFGEDCAEKYGFTREAQDAFAMDSVRRAQAATESGAFRWEIAPVTVPGKAGDTVVDTDEGPRRIKVDKIPSLKPAFKKDGTVTAASSSSINDGAAALVMMRESTARQLGIAPLAVMLGHTTHAQAPGWFTTAPVTAIDKLFKKLGWSADSVDLFEINEAFAVVPMAAMHDLRIPHEKVNVNGGACALGHPIGASGARLIATLLGALRHRGGKRGVASLCIGGGEATAVGIELL

SEQ ID NO: 92708 - DNA, 1197 bp, Drosophila melanogaster
  CDS (1)..(1197)
atgtctgccgcaaccaaaggtatctatattgtggctgccaagcgtacggccttcggaaccttcggtggatccttgaagggcatcaaccagacccaattgcaaaccacggcggccaaggctgccctggatgctgccggtcttaagggtgagcaagtggacaccgtcatcgtgggaaatgtgatcgcgtcctcctccaccgatggtatttatgtgccccgtcatgtgggtctcaactgcggtgtgcccatcgagaagcccgcccttggaatcaaccggctttgcggttccggcttccagtcgatcgtaaacggagcccaggacatcctggtcggcggtgccaagatagcccttaccggcggcgtggagaacatgtcacagagccctttcattgcccgtaatgtgagattcggaaccaccttgggtgccagctacaatctggaggatgctctatgggctggcctcaccgatacctactgcaagctgcccatggctctgaccgctgagaacctggccgatcagtacaagatcagtagggagcgtgtggatgagttctctctgctctcgcaaaagaactgggagaagggtcagaaggagggagcattcaatgccgagatcacacccatcaaacttaaggtcaagggaaaggaagtggactttgtggtggacgagcacccacgtcccaagaccaccatcgagggtctgaacaagctgccttcgctgtttaagaagaacggcgttgtgactgccggaacagcatccggaatctgtgatggtgcctccgcagtgatcgtggcctccgaggaggcgcttaaggagtacaacctgaagcctctggcccgtctagtggccttctcctttgtcggagtcaagcctgagatcatgggcattggcccagtacccgccattcagaacgtcctgaaggtttccggcaagaaactggaggatattgatctgattgagatcaacgaagcctttgctgcccagacattggcttgcgccgatgccctgaagttggatacctccaaactgaatgtgaacggaggcgccatcgccttgggccatcctctgggtgccagtggctctcgcatcactggtcatctggttcatgagttgcagcgcaagaagctaaagtacggcattggatccgcgtgcattggtggtggtcagggcatcgcccttctcctcgaggctgtctaa

SEQ ID NO: 92709 - protein, 398 aa, Drosophila melanogaster
MSAATKGIYIVAAKRTAFGTFGGSLKGINQTQLQTTAAKAALDAAGLKGEQVDTVIVGNVIASSSTDGIYVPRHVGLNCGVPIEKPALGINRLCGSGFQSIVNGAQDILVGGAKIALTGGVENMSQSPFIARNVRFGTTLGASYNLEDALWAGLTDTYCKLPMALTAENLADQYKISRERVDEFSLLSQKNWEKGQKEGAFNAEITPIKLKVKGKEVDFVVDEHPRPKTTIEGLNKLPSLFKKNGVVTAGTASGICDGASAVIVASEEALKEYNLKPLARLVAFSFVGVKPEIMGIGPVPAIQNVLKVSGKKLEDIDLIEINEAFAAQTLACADALKLDTSKLNVNGGAIALGHPLGASGSRITGHLVHELQRKKLKYGIGSACIGGGQGIALLLEAV

SEQ ID NO: 92710 - DNA, 1191 bp, Brucella melitensis 16M
  CDS (1)..(1191): transl_table=11
atgtccaagagcgatcctattgtcatcgtcggtgcttcgcgcacccccatgggcggttttcagggtgacttcacaaatgcgcaggcaaccgaccttggcgcttccgccatcggcggcgcgcttgccggtgcaggccttgccccggaagccgtcgaggaggttatcatgggctgtgtcctgcctgctggtcagggtcaggcgcctgcgcgtcaggcctcgctcaaggccgggctgccgcttggcaccggtgccacgaccgtcaacaagatgtgcggctcgggcatgaaggccgcgatgcttgcccatgacctcatccttgccggttccgccgatgtcatcgtcgcgggcggcatggaaagcatgacaaatgccccctatcttctgcccaaggcgcgcgggggctatcgcatgggccatggacaggtgctcgaccatatgttcctcgatgggctggaagatgcctatgacaaggggcgcctgatgggcacgtttgcggaagattgcgccgaggcctaccagttcacgcgcgaggcgcagtacgcatttgcgatatcctccctgacccgcgcgcagaacgcgatcaaggatggtctttttgcggcggaaatcacgccggtcaaggtcaagtccggccgcgccgaggtggaagttaccattgacgagcagccaggcaaggcaaagctggacaagatccccacgctgcgccccgccttccgcgaaggcggcacggtaacggcggccaattcctcttccatttccgatggcgcggcagcacttctgctcatgcgcgcatcggaggcagaaaaacgtggcctcaccccgcgcgcggtcatcaccggccatgcaacctatgccgacaagccaaatctcttctccacggcccccattggcgcgatccgcaaactgtctgaaaagactggctgggatttgaaggatgtcgatctcttcgagatcaatgaagcctttgccgttgttgccatggccgccatgcgcgatctcgacctgccgcacgacaaggtcaatattcatggcggcgcctgtgcacttggccaccccatcggcgcatcgggcgcacgtattctcgtaaccctgctggcggcacttgaaacacatggcctgaagcgcggcatcgcgggcatctgccttggcggcggcgaggcaaccgcaatgggtatcgaaaggatcatctga

SEQ ID NO: 92711 - protein, 396 aa, Brucella melitensis 16M
MSKSDPIVIVGASRTPMGGFQGDFTNAQATDLGASAIGGALAGAGLAPEAVEEVIMGCVLPAGQGQAPARQASLKAGLPLGTGATTVNKMCGSGMKAAMLAHDLILAGSADVIVAGGMESMTNAPYLLPKARGGYRMGHGQVLDHMFLDGLEDAYDKGRLMGTFAEDCAEAYQFTREAQYAFAISSLTRAQNAIKDGLFAAEITPVKVKSGRAEVEVTIDEQPGKAKLDKIPTLRPAFREGGTVTAANSSSISDGAAALLLMRASEAEKRGLTPRAVITGHATYADKPNLFSTAPIGAIRKLSEKTGWDLKDVDLFEINEAFAVVAMAAMRDLDLPHDKVNIHGGACALGHPIGASGARILVTLLAALETHGLKRGIAGICLGGGEATAMGIERII

SEQ ID NO: 92712 - DNA, 1185 bp, Pyrobaculum aerophilum str. IM2
  CDS (1)..(1185): transl_table=11
atgggcgtcgttatagtggggtacgtgaggactcccattgggaaattcggcggctcgctaaaagacgttaaatctccgcacctagccgcttttactataagaaaactgctagatagagtgggcctctccggcaaagaggtcgaggaggttatattcggctcgacgcttcaaggggggatggggcagaatttgtctagatacgcggcgttactcgcgggcctgcccgtggaggtcagcgcctacactgtgaacagagtgtgttcttccggcatgcaagccataatagaggcgtatcgggaaatcgcaatgggagacgcctctgtggtcatcgccggcggcgtggactccatgtccactcagcccatttgcctgcccgacggcgttaggtggggcttgaggcatttcataggaagaagggaggagttgagggatttaatggtatacgacggccttgtggatccgactaacggcctattaatgggggaggaggctgaaatggtggctagggagcacaaaatgaccagagaggagctagactgggtggcatatgagagccacatgagggcgtggcgcgcgacggaaaataagtggtttgacgatttagagcccatagagggagagctcggcggcgtttatgtaaaactggaaagagacgaggggataaggcccgacacgacgatggaaaaactggccaagttaaaacccgccttccggcccgacggcgttctcaccgcgggcaattccagccagctttcagacggcgccgcggcggtgttgttaatgtctgaggagaaggcgagggagatgggcgttaagcccatagccaggatattaggctacagctggcacatggtagagccctggcgcttcaccgaggcacctgtatacgccatacagaaattattgaaaaaattgggcactgaaatagactcctttgattatttcgaggccaatgaggccttcgccgttgtaaacgtgttagtgcacagaatactcggcgtgccgtatgaaaagctaaacgtattcggcggcgctatcgcccttggacaccccttgggggcctccggggcgaggatcgtcactacgctaatatctgtattgcggaataagggaggccgtaggggcatcgcggcgctgtgccacggcactggcggcggcactgccatagcgctagagcttatatag

SEQ ID NO: 92713 - protein, 394 aa, Pyrobaculum aerophilum str. IM2
MGVVIVGYVRTPIGKFGGSLKDVKSPHLAAFTIRKLLDRVGLSGKEVEEVIFGSTLQGGMGQNLSRYAALLAGLPVEVSAYTVNRVCSSGMQAIIEAYREIAMGDASVVIAGGVDSMSTQPICLPDGVRWGLRHFIGRREELRDLMVYDGLVDPTNGLLMGEEAEMVAREHKMTREELDWVAYESHMRAWRATENKWFDDLEPIEGELGGVYVKLERDEGIRPDTTMEKLAKLKPAFRPDGVLTAGNSSQLSDGAAAVLLMSEEKAREMGVKPIARILGYSWHMVEPWRFTEAPVYAIQKLLKKLGTEIDSFDYFEANEAFAVVNVLVHRILGVPYEKLNVFGGAIALGHPLGASGARIVTTLISVLRNKGGRRGIAALCHGTGGGTAIALELI

SEQ ID NO: 92714 - DNA, 1233 bp, Drosophila melanogaster
  CDS (1)..(1233)
atgtccgcccgactgctgcaggccacgcgtcgctggagcgcccatcgcaactacagctccaaaatcgccgaagttgtggtggtttcggcagcccgcacaccaattggcagcttccaaagtcaattggccccactgacggctacccaattgggagcccgtgccatcgaggcggccatcgaaaaggccggaattgcgaagaccgatgtccaggaggtgattatgggcaatgtggtatctgctggtctgggacaggcccccgcccgtcaggctgccatcttcgccggactgcccaccaatgtatgctgcaccacggtgaacaaggtgtgctcgtcgggcatgaaggccgttatgctgggcgcccaatccctgatgctcggctatgctgatgtggtcgttgccggcggtatggagtccatgtcgaatgttccctactatctgaagaggggagccacgccctatggcggcgtcaatctcaccgacggcattgttttcgatggcctctgggatgtgtacaacaagttccacatgggcaactgtgccgaaaatacggccaaaaaactggagatcacacgtcagcagcaggatgactttgccattgaatcatacaagagatcggctgccgcgtgggccaacaaggtgttccaggacgagattgccccggtgaagattcagcagaagaggaagccggagatcgtcatctcagaggatgaggagtacaagcgggtgaattttgacaagtttggacagttggccaccgttttccaaagggaaaatggcactgtgacagccggaaatgcatccaccttgaatgatggcggtgccgccgtggttttgatgagtgccgaggcagcccagaaggcgggcattaagccgctggccaggattgtggccttccaggatgcggagaccgatcccattgacttccccattgccccagctctggccattcccaaattactgaagcgtgccggcgttcgcaaggaagacgtggccatgtgggaggtcaatgaggccttctccctggtcgttttggccaatatcaagaaactggatgtggatccagccaaggttaatgttcatggaggtgccgtgtcaattggccatccaatcggcatgtccggagcccgtctggtggcccatctttcgcacagcctgaagaagggcgagctgggatgcgcctccatttgcaatggcggcggtggagcctcctccattctcatcgagaagctgtaa

SEQ ID NO: 92715 - protein, 410 aa, Drosophila melanogaster
MSARLLQATRRWSAHRNYSSKIAEVVVVSAARTPIGSFQSQLAPLTATQLGARAIEAAIEKAGIAKTDVQEVIMGNVVSAGLGQAPARQAAIFAGLPTNVCCTTVNKVCSSGMKAVMLGAQSLMLGYADVVVAGGMESMSNVPYYLKRGATPYGGVNLTDGIVFDGLWDVYNKFHMGNCAENTAKKLEITRQQQDDFAIESYKRSAAAWANKVFQDEIAPVKIQQKRKPEIVISEDEEYKRVNFDKFGQLATVFQRENGTVTAGNASTLNDGGAAVVLMSAEAAQKAGIKPLARIVAFQDAETDPIDFPIAPALAIPKLLKRAGVRKEDVAMWEVNEAFSLVVLANIKKLDVDPAKVNVHGGAVSIGHPIGMSGARLVAHLSHSLKKGELGCASICNGGGGASSILIEKL

SEQ ID NO: 92716 - DNA, 1176 bp, Encephalitozoon cuniculi GB-M1
  CDS (1)..(1176)
atgatatcccatgaggacgttgttgttgtaggagcactccgaacacccattggaagggcgacgagagggaagctcagaagccttaggaacgatgagctggttaccgctgctatccggggcatcattgagaagactgggattgaccctcgtcttatcgaagaagtcatcctcggccattgtctttcttcaatggaagggaatgtggctgcaagaatgggtgttttgagggctggagtgccggtcgagacaccagttatgatcataaacagattgtgcgggtctgggctagagtctgttgggcttattgctgagaagattagatcgggtaggatagagatagggcttgctggaggatttgagtctatgacatcctatggactgcccaaggaatacaccctgagcaggggcggtgcatgcgaagatgccgaggattgcatgctgacattaggggaggtttcggagatgctaggcaagacccacggtgtaacacgcagtgaggctgatgagtatgcagtgacaagccaaaagagggctcttgaagccaccaagaagggccattttcttgcggagatcattcccatgagggtgggagatgagactgttgagcgtgatgaagggataagggagacgtctctgggtactatcgagagtctgaagcctgtattcaggcaggatggggtttgcacgtcggccaactcctcacagctgtctgatggagcgtctgccgtgcttctgatgaaaaggagaagagctgatgagctaggtttgcctgtggttgcagagtttattgatttcattgctgtaggacttaagcccagagacatggggctgggtcctgttgttgccatcgagaaactactaaagaggaatggacttgagaaagaccagatctcgtacttcgagataaacgaagcatttgcatcccaggttctttgctgccttcggaagcttcagatcggtgaagacagggtcaataggtatggaggatccatagctcttggacacccgatcggggcttctggagcaaggattgtctgcacactgctgagtgttatgaaaaacgaggcactggaaggatatggagtggcgtctctatgtgtgggtgctgggcatggagtggctgcactgttcagaagagccgctggatccaaaccgcaagacattaaaaacacctaa

SEQ ID NO: 92717 - protein, 391 aa, Encephalitozoon cuniculi GB-M1
MISHEDVVVVGALRTPIGRATRGKLRSLRNDELVTAAIRGIIEKTGIDPRLIEEVILGHCLSSMEGNVAARMGVLRAGVPVETPVMIINRLCGSGLESVGLIAEKIRSGRIEIGLAGGFESMTSYGLPKEYTLSRGGACEDAEDCMLTLGEVSEMLGKTHGVTRSEADEYAVTSQKRALEATKKGHFLAEIIPMRVGDETVERDEGIRETSLGTIESLKPVFRQDGVCTSANSSQLSDGASAVLLMKRRRADELGLPVVAEFIDFIAVGLKPRDMGLGPVVAIEKLLKRNGLEKDQISYFEINEAFASQVLCCLRKLQIGEDRVNRYGGSIALGHPIGASGARIVCTLLSVMKNEALEGYGVASLCVGAGHGVAALFRRAAGSKPQDIKNT

SEQ ID NO: 92718 - DNA, 1188 bp, Schizosaccharomyces pombe 972h-
  CDS (1)..(1188)
atggttaacacagaggtttacattgtgtctgctgttcgcacacccatgggcagctttggcggcagtttcgcttctcttcctgccaccaaattaggctctattgccatcaagggcgctcttgaaagggtcaatattaagccttctgatgttgatgaggtgtttatgggtaatgtcgtctcagccaatcttggccaaaaccctgctcgtcaatgcgccttaggtgctggactccctcgttccatcgtttgtactactgttaacaaggtttgtgcctctggtatgaaggcaacaattctcggtgctcaaactatcatgactggaaatgctgagattgtcgttgctggtggtaccgagagcatgtcaaatgctccttactatgccccaaagaaccgttttggtgccaaatacggtaacgttgagttggttgacggtctcttacgtgatggtttatctgatgcatatgatggacttcccatgggtaatgctgccgagctttgcgctgaggaacacagcattgaccgtgccagtcaagacgcctttgccatttcttcttacaaacgtgctcaaaacgctcaagctacaaaggcatttgaacaagaaatcgtccccgtcgaggtccctgttggtcgtggtaagcccaacaagcttgttactgaggacgaggagcccaagaaccttaacgaagacaaactcaaatccgtacgtgctgtcttcaagagtaacggtaccgtcactgctgctaatgcttctaccttgaacgatggtgctagcgctcttgttctcatgtcggctgccaaagtgaaagaacttggtcttaagcctcttgctaaaattattggttggggtgaagccgctcaagatcctgagcgttttaccacttctccttcccttgctattcccaaagctctcaagcatgcaggtattgaagcttcccaagttgactattacgagatcaatgaagcctttagtgttgttgctgttgccaacaccaaaattcttggattagatcccgagcgtgttaacattaacggaggtggtgttgccatgggtcatcccttgggtagcagtggttctcgtatcatttgtactttggcatatattcttgctcagaaggatgccaagattggtgtagctgctgtttgcaatggtggtggtggtgcttcatccattgttatcgaaagagtttag

SEQ ID NO: 92719 - protein, 395 aa, Schizosaccharomyces pombe 972h-
MVNTEVYIVSAVRTPMGSFGGSFASLPATKLGSIAIKGALERVNIKPSDVDEVFMGNVVSANLGQNPARQCALGAGLPRSIVCTTVNKVCASGMKATILGAQTIMTGNAEIVVAGGTESMSNAPYYAPKNRFGAKYGNVELVDGLLRDGLSDAYDGLPMGNAAELCAEEHSIDRASQDAFAISSYKRAQNAQATKAFEQEIVPVEVPVGRGKPNKLVTEDEEPKNLNEDKLKSVRAVFKSNGTVTAANASTLNDGASALVLMSAAKVKELGLKPLAKIIGWGEAAQDPERFTTSPSLAIPKALKHAGIEASQVDYYEINEAFSVVAVANTKILGLDPERVNINGGGVAMGHPLGSSGSRIICTLAYILAQKDAKIGVAAVCNGGGGASSIVIERV

SEQ ID NO: 92720 - DNA, 1179 bp, Drosophila melanogaster
  CDS (1)..(1179)
atgtctgacgtgttcatcgtgtccgccgcccgcacgcccattggtagcttcaatggaacgctttctaaactgaaggcctccgacctgggcagcgtggtcatccaggaggtactccggcgggcgaatgtggagggccaggaggtcaacgaagtcatcttgggccaggctctaagcgccggtcagggtcagaatccagcacgtcaggcttcactcaaggcgggtctgcccattcaggtgccagcctacggcataaacatgctatgtggttccggcttaaaaactgtagcgctgggttaccaggccatccgctcgggagacgcacagattgttgtggcaggaggtcaggagagcatgtccctggctccacacgtcatgcatctgcggcagggcgtcaaaatgggtccgggcactatggtggactcgatgatccacgacggcctaaccgatgccatggagaacatacacatgggcatcactgccgagaatctggccgataagtataacatcagtcgtgaggcccaggatgcctatgccgtgctgtcgcaaaatcgagccgaggaggcccaaaaaaagggttacttcgacaaggagattgtgcccgtggagatcaaggatcgcaagggtacgaccacattcagcaaggatgagtacatcaaggcgggcagcaccgtcgagggtatacagaagctcagggcagccttcaaagagggcggctctataaccgctggcaatgcctcaggcgtcaacgactccgctgctgccgtactactgatgtccggcgaggaggtggccaggaagggtcttaagccgctggctaggattgtgggctggactcagagtggcattgagccaaaggtgatgggactgggaccagtcacagctgtggaagcattgcttcaaaagattaactggaagcgtgaggaagtggatctttacgagctgaacgaagcattcgccgcccaatcactggctgtcctgcaggacctgcagctggatgctcagaaagtaaatgtcaatggcggtgccattgccctgggccacccgattggagcttcaggtgcccgtgtcttggtcactttgctctatgcgctggagcgcaccggtggaagaaagggaatcgcatcgctctgcatcggtggcggcatgggaatcgccctggccgtggagcgcctcagctag

SEQ ID NO: 92721 - protein, 392 aa, Drosophila melanogaster
MSDVFIVSAARTPIGSFNGTLSKLKASDLGSVVIQEVLRRANVEGQEVNEVILGQALSAGQGQNPARQASLKAGLPIQVPAYGINMLCGSGLKTVALGYQAIRSGDAQIVVAGGQESMSLAPHVMHLRQGVKMGPGTMVDSMIHDGLTDAMENIHMGITAENLADKYNISREAQDAYAVLSQNRAEEAQKKGYFDKEIVPVEIKDRKGTTTFSKDEYIKAGSTVEGIQKLRAAFKEGGSITAGNASGVNDSAAAVLLMSGEEVARKGLKPLARIVGWTQSGIEPKVMGLGPVTAVEALLQKINWKREEVDLYELNEAFAAQSLAVLQDLQLDAQKVNVNGGAIALGHPIGASGARVLVTLLYALERTGGRKGIASLCIGGGMGIALAVERLS

SEQ ID NO: 92722 - DNA, 1206 bp, Streptomyces coelicolor A3(2)
  CDS (1)..(1206): transl_table=11
atgtcttctgcatcgaacggcacgacttccgtcatcgtcgcgggtgcccgcaccccgatggggcggctgctcggctccctcaagtccttctccggggccgacctcggcagcttcgcgatcaaggccgccctcggccgcgccgggatcggcggcgaccaggtccagtacgtgatcatggggcaggtgctccaggccggcgccgggcagatccccgcccgccaggccgccgtcaaggccggcatccccatgagcgtccccgcgctcacgatcaacaaggtctgcctctccggcctcgacgccatcgcactcgccgaccagctcattcgcgcgggtgaattcgacgtgatcgtcgcgggcggccaggagtccatgaccaacgccccgcacctgctccccaagtcccgcgagggctacaagtacggtgcggtccagatgatcgacgccatggcctacgacggcctgaccgactccttcgaggacatcgccatgggcgagtccacggagaagcacaacacccggctcggcatcgagcgcgccgcccaggacgagatcgccgccctgtcccaccagcgcgccgccgccgctcagaagaacggcgtcttcgacgcggagatcaccccggtcgagatcccgcagcgcaagggcgacccggtgctgttcgccaaggacgagggcatccgcggcgacaccaccgccgagtcgctcggcaagctgcgtccggccttcgccaaggacggcaccatcaccgccggctcctcctcccagatctccgacggcgcggcggccgtggtcgtgatgagccgggccaaggccgaggagctgggcctggagtggatcgcggagatcggcgcgcacggcaatgtcgcgggccccgacaactctttgcagtcgcagccgtcgaacgccatccggcacgccctcaagaaggagggcctggaggtcgccgacctcgacctcgtcgagatcaacgaggccttcgcggccgtggccgtgcagtcaatgaaggacctcggcgtgtccaccgaaaaggtgaacgtcaacggtggtgccatcgccctcggtcacccgatcggcatgtccggcgcccggctggtgctgcacctcgccctggaactgaagcggcgcggcggcggtgtgggcgcggccgcgctgtgcggcggcggcggtcagggcgacgcgctgatcgtgcgggtgcccggggcctga

SEQ ID NO: 92723 - protein, 401 aa, Streptomyces coelicolor A3(2)
MSSASNGTTSVIVAGARTPMGRLLGSLKSFSGADLGSFAIKAALGRAGIGGDQVQYVIMGQVLQAGAGQIPARQAAVKAGIPMSVPALTINKVCLSGLDAIALADQLIRAGEFDVIVAGGQESMTNAPHLLPKSREGYKYGAVQMIDAMAYDGLTDSFEDIAMGESTEKHNTRLGIERAAQDEIAALSHQRAAAAQKNGVFDAEITPVEIPQRKGDPVLFAKDEGIRGDTTAESLGKLRPAFAKDGTITAGSSSQISDGAAAVVVMSRAKAEELGLEWIAEIGAHGNVAGPDNSLQSQPSNAIRHALKKEGLEVADLDLVEINEAFAAVAVQSMKDLGVSTEKVNVNGGAIALGHPIGMSGARLVLHLALELKRRGGGVGAAALCGGGGQGDALIVRVPGA

SEQ ID NO: 92724 - DNA, 1176 bp, Xanthomonas axonopodis pv. citri str. 306
  CDS (1)..(1176): transl_table=11
atgtccgacatcgtcatcgttgctgccaaacgtactgccatcggctcgttcctcggccaattcaatgcggtgccggcacccacgctcgccgcggctgctatccagggcgcactcgcgcaatcaggcatcgcgcctgccgatatttccgaagtcatcgtcggctgcgtgctgccggccaatctgggccaggcacctgcgcgtcaggccgcgatcgccgcaggcattcctacctcgaccggcgccaccaccatcaacaaggtgtgcggctcgggaatgaaggcgatcatgttggggcacgacctgatcaaggccggctcggccagcatcgtggtggccggcggcatggagtcgatgagcaatgccccgcatctgctgcccaactcgcgcaccggcaaccgctacggcaattttcaggcggtcgatcacatggcctgggacggtctgaccaatccgtatgacggccaggccatgggcgtgttcggcgaagccactgcggagaagttcggcttcagccgcgccgaccaggatgcgttcgccatcgcctcggtggaacgcgcgcacgcggcgcagcgcagcggcgcgtttgccgacgaaatcgtgccggtgacggtggccacgcgcaagggcgacgtcgtcgtcgacagcgatgagcagccgggcaagtccgacgtggccaagattccgacgctgaagccagccttcaagaaagacggcagcgtgaccgcggccagttcctcgagtatttccgatggcgcggcaatcaccgtgctaatgagcgcggacgacgcgcaacgccgtggcgtgacgccgctggcacgcatcgttggccatgtcacccacgctcaggaaccggagtggttcaccaccgcaccggtcgctgcgatccagtcgctggtcagcaagctcggctggcgattggacgatgtggatctgttcgaaatcaacgaagccttcgccgtcgtggcgatggcaccgatcaggcaactcggcatcgcgcacgataaggtcaatgtgcatggcggcgcctgcgcattgggtcatccgatcggtgcatccggcgcgcgtttggtggtgacattggtgaacgcgttgcgcagccgcggaggcaagcgcggaatcgccacgctgtgcatcggcggcggcgaagccactgccattgctatcgaattgatttaa

SEQ ID NO: 92725 - protein, 391 aa, Xanthomonas axonopodis pv. citri str. 306
MSDIVIVAAKRTAIGSFLGQFNAVPAPTLAAAAIQGALAQSGIAPADISEVIVGCVLPANLGQAPARQAAIAAGIPTSTGATTINKVCGSGMKAIMLGHDLIKAGSASIVVAGGMESMSNAPHLLPNSRTGNRYGNFQAVDHMAWDGLTNPYDGQAMGVFGEATAEKFGFSRADQDAFAIASVERAHAAQRSGAFADEIVPVTVATRKGDVVVDSDEQPGKSDVAKIPTLKPAFKKDGSVTAASSSSISDGAAITVLMSADDAQRRGVTPLARIVGHVTHAQEPEWFTTAPVAAIQSLVSKLGWRLDDVDLFEINEAFAVVAMAPIRQLGIAHDKVNVHGGACALGHPIGASGARLVVTLVNALRSRGGKRGIATLCIGGGEATAIAIELI

SEQ ID NO: 92726 - DNA, 1191 bp, Oceanobacillus iheyensis HTE831
  CDS (1)..(1191): transl_table=11
atgagaaaatcagtaatcgtatctggtgcgcgaacaccttttgggaaatttggtggagctttaaggccgttaaaagcaacagagcttggaggtattgcaattaaagaagccatggaacgagcaaatattgcaaatgatgtcgttgatgaggtaatcatgggaaccgtattacaaggcggtcaaggacaaatcccatcacgtcaagcggcaagaattgctggtcttccatgggagacgcgatcggaaacaattaataaagtatgcgcatctggaatgcgaagtgttacgttagcagatcagttaatccgtctaggagaagaggagatcattgtagcaggtggaatggagagcatgagtaatgccccgtactttttaccggatgcacgttggggaaaccgaatgggagataaatcggttgtagatatgatggttcatgatggtcttacttgtacatttacaggaaatcatatggggaactatggtaattctacagcagaagatttagagatttctagaaagcgccaagatgcttgggcatttcgcagtcatcaaaaatcggttgaagccatcgaatcgaataagtttgctgatgagattgtacctgtagaaattcctaatcgaaaaggcgatccaataatagttgatacagatgaagcaccacgtaaagatacgacgatagataaattatcatccttacgtccagcatttgataaagagggatcgataactgcggggaatgctcctggagtaaatgatggagcggcagcatttgtcgtcatgtcggatgaaaaagctgcggaattaaataaagaaccccttgcttatattctcggtcatgcagaagttgctgtagaagcaaaggacttcccgcaaacacccggaattgtaattaataaattgttagaaaaaacgggcacttctaaagaagaaattgacctatacgaaatcaatgaagcatttgcagttgttgcgcttgcgagtggacagattgcagatatcgatgaagaaaaaataaatgtaaatggtggagccgttgcacttggtcatccaataggggcaagtggagcacgtatcattcttacgcttatccatgaattaaaacgtcgtggcggcggaaagggaatcgctgctatttgtagtggaagtgggcaaggagatgccattcttattgaagtaccagctgaaaattaa

SEQ ID NO: 92727 - protein, 396 aa, Oceanobacillus iheyensis HTE831
MRKSVIVSGARTPFGKFGGALRPLKATELGGIAIKEAMERANIANDVVDEVIMGTVLQGGQGQIPSRQAARIAGLPWETRSETINKVCASGMRSVTLADQLIRLGEEEIIVAGGMESMSNAPYFLPDARWGNRMGDKSVVDMMVHDGLTCTFTGNHMGNYGNSTAEDLEISRKRQDAWAFRSHQKSVEAIESNKFADEIVPVEIPNRKGDPIIVDTDEAPRKDTTIDKLSSLRPAFDKEGSITAGNAPGVNDGAAAFVVMSDEKAAELNKEPLAYILGHAEVAVEAKDFPQTPGIVINKLLEKTGTSKEEIDLYEINEAFAVVALASGQIADIDEEKINVNGGAVALGHPIGASGARIILTLIHELKRRGGGKGIAAICSGSGQGDAILIEVPAEN

SEQ ID NO: 92728 - DNA, 1191 bp, Brucella suis 1330
  CDS (1)..(1191): transl_table=11
atgtccaagagcgatcctattgtcatcgtcggtgcttcgcgcacccccatgggcggttttcagggtgacttcacaaatgcgcaggcaaccgaccttggcgcttccgccatcggcggcgcgcttgccggtgcaggccttgccccggaagccgtcgaggaggttatcatgggctgtgtcctgcctgctggtcagggtcaggcgcctgcgcgtcaggcctcgctcaaggccgggctgccgcttggcaccggtgccacgaccgtcaacaagatgtgcggctcgggcatgaaggccgcgatgcttgcccatgacctcatccttgccggttccgccgatgtcatcgtcgcgggcggcatggaaagcatgacaaatgccccctatcttctgcccaaggcgcgcgggggctatcgcatgggccatggacaggtgctcgaccatatgttcctcgatgggctggaagatgcctatgacaaggggcgcctgatgggcacgtttgcggaagattgcgccgaggcctaccagttcacgcgcgaggcgcaggacgcatttgcgatatcctccctgacccgcgcgcagaacgcgatcaaggatggtctttttgcggcggaaatcacgccggtcaaggtcaagtccggccgcgccgaggtggaagttaccattgacgagcagccgggcaaggcaaagctggacaagatccccacgctgcgccccgccttccgcgaaggcggcacggtaacggcggccaattcctcttccatttccgatggcgcggcagcacttctgctcatgcgcgcatcggaggcagaaaaacgtggcctcaccccgcacgcggtcatcaccggccacgcaacctatgccgacaagccaaatctcttctccacggcccccattggcgcgatccgcaaactgtctgaaaagactggctgggatttgaaggatgtcgatctcttcgagatcaatgaagcctttgccgttgttgccatggccgccatgcgcgatctcgacctgccgcacgacaaggtcaatattcatggcggcgcctgtgcacttggccaccccatcggcgcatcgggcgcacgtattctcgtaaccctgctggcggcacttgaaacacatggcctgaagcgcggcatcgcgggcatctgccttggcggcggcgaggcaaccgcaatgggtatcgaaaggatcatctga

SEQ ID NO: 92729 - protein, 396 aa, Brucella suis 1330
MSKSDPIVIVGASRTPMGGFQGDFTNAQATDLGASAIGGALAGAGLAPEAVEEVIMGCVLPAGQGQAPARQASLKAGLPLGTGATTVNKMCGSGMKAAMLAHDLILAGSADVIVAGGMESMTNAPYLLPKARGGYRMGHGQVLDHMFLDGLEDAYDKGRLMGTFAEDCAEAYQFTREAQDAFAISSLTRAQNAIKDGLFAAEITPVKVKSGRAEVEVTIDEQPGKAKLDKIPTLRPAFREGGTVTAANSSSISDGAAALLLMRASEAEKRGLTPHAVITGHATYADKPNLFSTAPIGAIRKLSEKTGWDLKDVDLFEINEAFAVVAMAAMRDLDLPHDKVNIHGGACALGHPIGASGARILVTLLAALETHGLKRGIAGICLGGGEATAMGIERII

SEQ ID NO: 92730 - DNA, 1191 bp, Shewanella oneidensis MR-1
  CDS (1)..(1191): transl_table=11
atgagtactgaactattaaaccaagagatcgttattgttgccgctaaacgcaccccaatgggtagttttcaaggcagtttgtctggcatcacttctctgagcttagcggccacagcaatcaaagccctgttagccgatacccaagttgcgcctgacaaggtcgatgaggtgttgatgggctgcgtattgccagcgggtcttggtcaagcgcctgcgcgccaagcaaccttaggggcaggtttaccgctgtctgtgggtgcaaccacagtgaacaaggtctgtggttcagggatgaaaacggtgatgcttgcccatgatttgattaaagcgggcagtgctaaggtggtgattgctggtggtatggaaagcatgagccaagcaccttacttgctcgacaaagcgcgcgctggtatacgtatgggccatggcaaagtgttagatcatatgttcctcgacggtttagaagatgcttacactggcggcgctatgggcacattcgcccagaaaaccgccgatgaatttggtatcactcgcgagcaaatggatgcgtttgctttaagctcactcgaaaaagccaacgctgccattaattctggtgctttcaaaacggagatagtgcccgtaacggtaagcgatcgccgtggtgacgtgactattgataccgatgagcagccaggtaacgctcgccctgaaaaaatccccacgttgcgtccagcctttgctaaagatggcactattactgcggcaaactccagctcgatttccgatggtgcagcggcgctgatgttaacaacgcgcgccaatgctgagcagttaggcttaactgtgctcgccaccatcaagggccacactacccatgcgcaggagcctgcactttttaccaccgcacccgttggcgcgatggcaaaactattgagtaatgtgggctggtcaaaggatgaagttgatctgtttgagatcaacgaagccttcgccatggtgactatgctggccgtttctgaattaggtttagatatgacaaaagtcaacgtgaatggcggcgcttgtgccttaggtcatcctatcggttgctcgggcgcgcgtttactggtgaccttaatccatgcacttaaagcccgcggacttaagcgcggtgtagcgtcgctctgtatcggtggtggtgaagcgacggctatggctattgaagtctaa

SEQ ID NO: 92731 - protein, 396 aa, Shewanella oneidensis MR-1
MSTELLNQEIVIVAAKRTPMGSFQGSLSGITSLSLAATAIKALLADTQVAPDKVDEVLMGCVLPAGLGQAPARQATLGAGLPLSVGATTVNKVCGSGMKTVMLAHDLIKAGSAKVVIAGGMESMSQAPYLLDKARAGIRMGHGKVLDHMFLDGLEDAYTGGAMGTFAQKTADEFGITREQMDAFALSSLEKANAAINSGAFKTEIVPVTVSDRRGDVTIDTDEQPGNARPEKIPTLRPAFAKDGTITAANSSSISDGAAALMLTTRANAEQLGLTVLATIKGHTTHAQEPALFTTAPVGAMAKLLSNVGWSKDEVDLFEINEAFAMVTMLAVSELGLDMTKVNVNGGACALGHPIGCSGARLLVTLIHALKARGLKRGVASLCIGGGEATAMAIEV

SEQ ID NO: 92732 - DNA, 1206 bp, Corynebacterium efficiens YS-314
  CDS (1)..(1206): transl_table=11
atgtccacccccaatgcgtatctggtttccggccgtcgaacccctgtcggacggtacggtggcgccctgtccgccgtgcgtcccgatgatctggcggcactgaccatcaaggcagtcgtcgaggaggccggcatcgatccggcggccgtggatgaggtcatcttcggcaacgccaacggcgccggtgaggaaaaccgcaatgtggcacgcatggcgtggctgctggccgggtacccggattccgtccccggcatcaccgtcaaccgtctgtgcgcgtcgggtatgtccgcgatcaccatggcagcgaacatgatcaaggccggtgaggctgacatcgtcgtggccggtggcgtggaatcgatgtcacgggcgccctgggtccaggagaaaccgacaaccgccttcgccaagccgggacagatctttgacacctccatcggctggcgtttcaccaacccggtgttcgcggcccaggagaagaccacctactccatgccggagaccgcggaggaggtcgcccgcgtgaagaacatcagccgcgaggacgccgacgccttcgccgtggagtcccagcgccgcgccgtggaggccatcaaggcgggacgtttcaactcggagatcgtccccgtcgaggtcaagggccgcaagggccaggtcaccgtcgtggataccgatgagggaccccgcgagagaaccaccgccgaggtgttggccaagctgcgccctgtcgtgggtgggggagaggtggtcaccgccggtaactcctcctccctcaatgacggtgcctcggcgatcctggtggtctccgagcgtgccctcgagaaatacggcctcaccgcccgcgcccgcgtggtcggtggtgccagcgtcggactggccccggagatcatgggtatgggcccggtcccggccaccaggaaggtgctggaacgcgccgactggtccatcgatgatgtggatgccgtggaactgaatgaggccttcgcctcccagtccctggcctgcatccgcgaactgggactggacaccgacaaggtcaacacctggggtggcgccatcgcactggggcacccgctgggttcctccggtgcgcgcatcaccatcaccctgctcaacagactcgagcaggagggcggcacgaagggtgtcgccaccatgtgcatcggtgtcggccagggtgccgccatcgccatcgagaaggtttag

SEQ ID NO: 92733 - protein, 401 aa, Corynebacterium efficiens YS-314
MSTPNAYLVSGRRTPVGRYGGALSAVRPDDLAALTIKAVVEEAGIDPAAVDEVIFGNANGAGEENRNVARMAWLLAGYPDSVPGITVNRLCASGMSAITMAANMIKAGEADIVVAGGVESMSRAPWVQEKPTTAFAKPGQIFDTSIGWRFTNPVFAAQEKTTYSMPETAEEVARVKNISREDADAFAVESQRRAVEAIKAGRFNSEIVPVEVKGRKGQVTVVDTDEGPRERTTAEVLAKLRPVVGGGEVVTAGNSSSLNDGASAILVVSERALEKYGLTARARVVGGASVGLAPEIMGMGPVPATRKVLERADWSIDDVDAVELNEAFASQSLACIRELGLDTDKVNTWGGAIALGHPLGSSGARITITLLNRLEQEGGTKGVATMCIGVGQGAAIAIEKV

SEQ ID NO: 92734 - DNA, 1194 bp, Pseudomonas putida KT2440
  CDS (1)..(1194): transl_table=11
atgaccctcgccaatgaccccatcgttatcgtcagcgccgtgcgcacgcccatgggcgggttgcagggcgacctcaagagcctgactgcgccgcaactgggcagcgccgccattcgtgctgccgtggaacgggccggcatcgatgccgccggtgtcgagcaggtactgttcggctgcgtgctgccggccggccagggccaggcaccggcacgccaggccgcgctgggcgccgggctggacaagcacaccacctgcaccaccctgaacaagatgtgcggctcgggtatgcaagccgcgatcatggcccatgacctgctgctggccggcaccgcagacgtggtagtggcgggtggcatggaaagcatgaccaacgcgccgtacctgctggacaaagcccgtggcggctaccgcatgggccacggcaagatcatcgaccacatgttcatggacggtctcgaagacgcctacgacaaaggccgcctgatgggtacctttgccgaggactgtgcccaggccaatgccttcagccgcgaggcccaggaccagttcgccatcgcctcgctgacccgagcgcaggaagccatcagcagcggccgttttgccgccgagatcgtgccggtggaagtcaccgagggcaaggaaaagcgcgtcatcaaggatgacgagcagccgcccaaggcgcgtctggacaagattgcgcagctcaaaccggcgtttcgtgaaggcggcaccgtgacggcggccaacgccagttcgatttccgacggcgctgcggcgctggtactgatgcgccgctccgaggccgacaaacgtggcctcaagccattggccgtcatccacggccacgccgcctttgccgacaccccggcgctgttcccgaccgccccgatcggcgcgatcgacaaactgatgaaacgcaccggctggaacctggccgaagtcgacctgttcgagatcaacgaggccttcgccgtggtcaccctggcggccatgaaacacctcgacctgccacacgacaaggtcaatatccacggcggcgcctgcgccctcggtcacccgatcggcgcttctggcgcacgtattctggtcaccctgttgtcggccttgcgccagaacaatctgcgtcggggtgtggcggccatctgcatcggcggtggcgaggccacggccatggctgttgaatgcctgtactga

SEQ ID NO: 92735 - protein, 397 aa, Pseudomonas putida KT2440
MTLANDPIVIVSAVRTPMGGLQGDLKSLTAPQLGSAAIRAAVERAGIDAAGVEQVLFGCVLPAGQGQAPARQAALGAGLDKHTTCTTLNKMCGSGMQAAIMAHDLLLAGTADVVVAGGMESMTNAPYLLDKARGGYRMGHGKIIDHMFMDGLEDAYDKGRLMGTFAEDCAQANAFSREAQDQFAIASLTRAQEAISSGRFAAEIVPVEVTEGKEKRVIKDDEQPPKARLDKIAQLKPAFREGGTVTAANASSISDGAAALVLMRRSEADKRGLKPLAVIHGHAAFADTPALFPTAPIGAIDKLMKRTGWNLAEVDLFEINEAFAVVTLAAMKHLDLPHDKVNIHGGACALGHPIGASGARILVTLLSALRQNNLRRGVAAICIGGGEATAMAVECLY

SEQ ID NO: 92736 - DNA, 1179 bp, Vibrio parahaemolyticus RIMD 2210633
  CDS (1)..(1179): transl_table=11
atgaaaaatgaaacatggattgttgccgctaaacgaacgcctatcggtgcttttcaaggggcattagcttcaaccgatgtcactgaactcggggcgacagccattcagggcgctttagcagaaagtcagcttgatgcagacaaaatagatgaagtactgatgggttgtgttctgccagctggtgtggggcaagcgccagcaagacaagcaagtcttaaagctgaaatgccacaatcgattggttgtacgacactgaacaaagtttgtggatcgggtatgaaaaccgtcatgctggcatatgaccttattcaatctggcaatgcgcatgctgtcatcgctggtggcatggaaaacatgtcgtcttctccttatctattaaagaaagcgcgtgatggtttccgtttaggtcacgagcaagtgcttgatcacatgttttatgacggtttgcaggatgcctaccaaggcgagctgatgggtgtctttgccgaacaaacagcgcaaaagtaccaattcagccgtgaaagtatggatgcatgggcgcagcagtcggtgactcgtgcgcagcaagcgattgagcaaggtttgttcaaagaagagatcgtgcctgttaacgtaaaaagtcgacgtggcgaaaccttggtggtagacgatgagcaaccgagtaaactcgacgtcactaaaattcctaccttacgccctgcgtttgctaaagatggcggcgtaacggcagccaactcaagttctatttctgatggtgcatcggcaatgatcttagtcgacagtgaatttggccgtcaggaaaaccttcaacctctagccaaaattgtcgcgtacagcacgcatgcaagacagccagatgagttcaccatcgcacccgtattcgcgattgaaacgctgttggaaaaaacgggctgggacaaatcagacgtggacctttgggaaatcaatgaagcctttgctgttgtcactcaatacgcagtgaaagtgctcgaactcgatgagaacaaagttaacccgcgcggtggtgcttgtgcgttaggtcatcctattggtgccagtggtaaccgcatcctcgtgacgttgattcacgcgcttaagcaaactggcggaaaacgtggcgttgcatcgctttgtattggtggcggtgaggcaaccgcgatcgcgattgaaatctgctaa

SEQ ID NO: 92737 - protein, 392 aa, Vibrio parahaemolyticus RIMD 2210633
MKNETWIVAAKRTPIGAFQGALASTDVTELGATAIQGALAESQLDADKIDEVLMGCVLPAGVGQAPARQASLKAEMPQSIGCTTLNKVCGSGMKTVMLAYDLIQSGNAHAVIAGGMENMSSSPYLLKKARDGFRLGHEQVLDHMFYDGLQDAYQGELMGVFAEQTAQKYQFSRESMDAWAQQSVTRAQQAIEQGLFKEEIVPVNVKSRRGETLVVDDEQPSKLDVTKIPTLRPAFAKDGGVTAANSSSISDGASAMILVDSEFGRQENLQPLAKIVAYSTHARQPDEFTIAPVFAIETLLEKTGWDKSDVDLWEINEAFAVVTQYAVKVLELDENKVNPRGGACALGHPIGASGNRILVTLIHALKQTGGKRGVASLCIGGGEATAIAIEIC

SEQ ID NO: 92738 - DNA, 1185 bp, Coxiella burnetii RSA 493
  CDS (1)..(1185): transl_table=11
atggaaaatccaattgttattgtaagtgcagcacgaacgcccatgggtcattacggcggttattttaaagagatgccagcaccagaattaggggctgcagttattaaagcggtggttgagcgtgctggtttgcaacccgcggaaattgatgaagttatcatgggctgtgttttacccgccggccaaggtcaagctccggcgcggcaagccgcactcaaagcgggtcttcccgtgagcaccccttgcactaccatcaataaaatgtgtggttcgggaatgaaggcgattatgctagcgcacgatgaaatactcgccgactcctacccacatattatcgcgggtggaatggaaaatatgtctcgcgcgccctatttaatgatgaaagcgcgcttcggttaccgtttgggacacgatcgaatttacgaccatatgatgcttgatggattggaagatgcctacgataagggaaaagcgatgggcgtttttgccgagaaatgcgtggataaatatcaatttactcgcgaagcattggataaatttgcaatcgaatccttgcttcgtgctaaaaaagccaacgaaaacggcagcttcgctccggaaatagtcccgataacaatcactcatcaacgagaaaccttgactgtggatcatgatgaaaatgccatgaaagccaatccagaaaaaattcctcaattaaaacctgtttttaaagccgatggtgctgtaaccgccgctaattccagttccatttccgatggcgctgctgccgttacattaatgcgtctatcagaagcaaaaagattaaatattcagccgctggcaaaaatcatcgggcatttcacttacgcagaagatcctagttggttcaccaccgctccgattggcgctattcgcggattattaaaaaaaatttcttggaaaaaagaagccgtggatttatttgaaatcaacgaagcctttgctgctgtcaccatggccgcgatgaaagaaatcggccttgcccataacaaggtcaacatccacggcggcgcctgcgccttaggccatcccatcggcgcatccggtgcacgtattttggtaaccttgttatacgctttacaaaaaaataatttacaacgcggcatcgcttctctgtgcatcggcggcggcgaagccacagcgattgcaattgaaaggggattttaa

SEQ ID NO: 92739 - protein, 394 aa, Coxiella burnetii RSA 493
MENPIVIVSAARTPMGHYGGYFKEMPAPELGAAVIKAVVERAGLQPAEIDEVIMGCVLPAGQGQAPARQAALKAGLPVSTPCTTINKMCGSGMKAIMLAHDEILADSYPHIIAGGMENMSRAPYLMMKARFGYRLGHDRIYDHMMLDGLEDAYDKGKAMGVFAEKCVDKYQFTREALDKFAIESLLRAKKANENGSFAPEIVPITITHQRETLTVDHDENAMKANPEKIPQLKPVFKADGAVTAANSSSISDGAAAVTLMRLSEAKRLNIQPLAKIIGHFTYAEDPSWFTTAPIGAIRGLLKKISWKKEAVDLFEINEAFAAVTMAAMKEIGLAHNKVNIHGGACALGHPIGASGARILVTLLYALQKNNLQRGIASLCIGGGEATAIAIERGF

SEQ ID NO: 92740 - DNA, 1203 bp, Streptomyces avermitilis MA-4680
  CDS (1)..(1203): transl_table=11
atgtctggaacgaacagcacgacctcggtgatcgtcgcgggtgcacgcaccccgatgggccgtttgctcggctcgctgaagtccttctccggagccgacctcggcggcttcgcgatcaagtccgccctcgaccgtgcggggatcggcggcgaccaggtgcagtacgtgatcatgggccaggtgctgcaggccggggcggggcagatcccggcacgccaggccgcggtcaaggcgggcattccgatgagcgtcccggcgctcacgatcaacaaggtgtgtctgtccgggctcgacgcgatcgcgctcgcggaccagctgatccgcgccggtgagttcgatgtcgtcgtcgccggtggtcaggagtccatgaccaacgccccgcatctgctgccgaagtcccgtgagggctacaagtacggcgcggtccagatgatcgacgccatggcgtacgacggtctgacggacgccttcgagaacatcgccatgggcgagtccacggagaagcacaacacgcggctcgggatcggccgcgcggaccaggacgccgtggccgccctgtcgcaccagcgggccgccgccgcgcagaagaacgggatcttcgaggccgagatcacgcccgtggagattccgcagcggcgcggtgagccggtggtcttcagccaggacgagggcatccgcggcgagacgacggccgagtcgctcggcaagctgcggcccgccttcaccaaggacggcacgatcacggccggttcctcctcgcagatctcggacggtgcggcggccgtggtcgtgatgagcaaggccaaggcgcaggagctcggcctggagtggatcgcggagatcggcgcccacgggaatgtggcgggaccggacaactctttgcagtcgcagccgtccaacgcgatccagcacgcgctgaagaaggagggtctcgcggtcgacgatcttgatctgatcgagatcaacgaagccttcgccgcggtcgcggtgcagtcgatgaaggacctcggggtgtccaccgaaaaggtgaacgtcaacgggggcgcgatcgccctgggacacccgatcggcatgtccggtgcccggctcgtgctgcacctggcgctggagctgaagcggcggggcggcggcgtgggcgcggcggcgctgtgcggtggcggcgggcagggtgacgcgctgatcgtgcgggtacccaaggtctga

SEQ ID NO: 92741 - protein, 400 aa, Streptomyces avermitilis MA-4680
MSGTNSTTSVIVAGARTPMGRLLGSLKSFSGADLGGFAIKSALDRAGIGGDQVQYVIMGQVLQAGAGQIPARQAAVKAGIPMSVPALTINKVCLSGLDAIALADQLIRAGEFDVVVAGGQESMTNAPHLLPKSREGYKYGAVQMIDAMAYDGLTDAFENIAMGESTEKHNTRLGIGRADQDAVAALSHQRAAAAQKNGIFEAEITPVEIPQRRGEPVVFSQDEGIRGETTAESLGKLRPAFTKDGTITAGSSSQISDGAAAVVVMSKAKAQELGLEWIAEIGAHGNVAGPDNSLQSQPSNAIQHALKKEGLAVDDLDLIEINEAFAAVAVQSMKDLGVSTEKVNVNGGAIALGHPIGMSGARLVLHLALELKRRGGGVGAAALCGGGGQGDALIVRVPKV

SEQ ID NO: 92742 - DNA, 1197 bp, Arabidopsis thaliana
  CDS (1)..(1197)
atgaatgttgatgaatcagatgtttgcattgtgggtgttgcacgtactccaatgggtggctttctcggatctctttcatctttacctgccacaaagcttggatctttagctattgcagctgctttgaagagagcaaatgttgatccagctcttgttcaagaagttgtctttggcaatgttcttagtgctaatttgggtcaagctcctgctcgtcaagctgctttaggtgcaggaatccctaactctgttatctgtactacagttaacaaggtttgtgcatcaggcatgaaagcggtaatgattgctgctcaaagtatccagttagggatcaatgatgtagttgtggcgggtggtatggaaagcatgtctaatacaccaaaatatttggcagaagcaaggaagggatctcgttttggtcatgattctttagtagatggaatgttgaaggatggactatgggatgtctataacgactgtgggatgggaagctgtgcagaattatgcgctgagaagtttcagattacaagggagcagcaagatgactatgcagttcagagttttgagcgtggtattgctgcccaggaagctggcgccttcacatgggaaatcgtcccggttgaagtttctggaggaagaggtaggccatcaaccattgttgacaaggacgaaggtcttgggaagtttgatgctgcaaaattgaggaaactccgtcctagtttcaaagagaatggagggactgttacagctggaaatgcgtctagcataagtgatggtgcagctgcccttgtcctagtgagcggagagaaggctcttcagctaggacttctagtattagcaaaaattaaagggtatggtgacgcagctcaggaaccagagtttttcactactgctcctgctcttgctataccaaaagccattgcacatgctggtttggaatcttctcaagttgattactatgagatcaatgaagcatttgcagttgtagcacttgcaaatcaaaagctactcgggattgctccagagaaagtgaacgtaaatggaggagctgtctccttaggacaccctctaggctgcagtggcgcccgtattctaatcacgttgcttgggatactaaagaagagaaacggaaagtacggtgtgggaggagtgtgcaacggaggaggaggtgcttctgctctagttcttgagctcctttga

SEQ ID NO: 92743 - protein, 398 aa, Arabidopsis thaliana
MNVDESDVCIVGVARTPMGGFLGSLSSLPATKLGSLAIAAALKRANVDPALVQEVVFGNVLSANLGQAPARQAALGAGIPNSVICTTVNKVCASGMKAVMIAAQSIQLGINDVVVAGGMESMSNTPKYLAEARKGSRFGHDSLVDGMLKDGLWDVYNDCGMGSCAELCAEKFQITREQQDDYAVQSFERGIAAQEAGAFTWEIVPVEVSGGRGRPSTIVDKDEGLGKFDAAKLRKLRPSFKENGGTVTAGNASSISDGAAALVLVSGEKALQLGLLVLAKIKGYGDAAQEPEFFTTAPALAIPKAIAHAGLESSQVDYYEINEAFAVVALANQKLLGIAPEKVNVNGGAVSLGHPLGCSGARILITLLGILKKRNGKYGVGGVCNGGGGASALVLELL

SEQ ID NO: 92744 - DNA, 1245 bp, Arabidopsis thaliana
  CDS (1)..(1245)
atggctgcttttggagatgacattgtgattgtagcggcatatcgtaccgccatttgcaaagcgagacgtggaggtttcaaagacactcttcctgatgatcttcttgcttctgttcttaaggctgtagtggaaagaacatctttggatccaagtgaagttggtgatatcgttgttggtaccgtgatagcgcctggttctcagagagcaatggagtgtagagttgcagcttattttgctggttttcctgactccgtgccagttagaactgtcaatagacaatgctcatcaggactacaagcagttgctgatgttgctgcttccattagagctggttattacgacattggtattggtgctggagtggaatcaatgtcaactgatcatattcctggaggcggctttcatggctctaatccaagagcacaggatttcccaaaagcccgtgattgtttgcttccaatgggaattacttctgaaaacgttgcagaaaggttcggtgtcacaagagaagagcaagatatggctgcggtggagtctcacaaacgcgctgcagctgcaatcgcgtctggtaaactcaaggatgaaatcattcctgttgctactaagattgtggaccctgagactaaagcagagaaggcaatcgtcgtatctgttgatgacggtgtacgtccaaactcaaacatggcagatttggcaaagctgaagactgtctttaaacagaacggttccaccacagctggcaatgctagtcagatcagtgatggtgctggagcagtactgctaatgaagagaagtttggctatgaagaagggacttcccattcttggagtattcaggagttttgctgttactggtgtggaaccatctgtaatgggtattggtccagctgttgccattcccgctgcaactaagctcgcagggctcaacgtcagcgatattgatctattcgagatcaatgaggcatttgcatctcagtatgtgtactcttgcaagaagttagagctggatatggaaaaggtcaatgttaatggaggagccattgctattggccatcccctgggtgctacaggagctcgatgtgttgcgacattgttgcacgagatgaagcggagaggaaaagattgccgctttggagtaatctcaatgtgcataggcactggaatgggagctgcagctgtttttgagaggggagactctgttgataacttgtccaacgctcgtgtggctaacggggatagtcattag

SEQ ID NO: 92745 - protein, 414 aa, Arabidopsis thaliana
MAAFGDDIVIVAAYRTAICKARRGGFKDTLPDDLLASVLKAVVERTSLDPSEVGDIVVGTVIAPGSQRAMECRVAAYFAGFPDSVPVRTVNRQCSSGLQAVADVAASIRAGYYDIGIGAGVESMSTDHIPGGGFHGSNPRAQDFPKARDCLLPMGITSENVAERFGVTREEQDMAAVESHKRAAAAIASGKLKDEIIPVATKIVDPETKAEKAIVVSVDDGVRPNSNMADLAKLKTVFKQNGSTTAGNASQISDGAGAVLLMKRSLAMKKGLPILGVFRSFAVTGVEPSVMGIGPAVAIPAATKLAGLNVSDIDLFEINEAFASQYVYSCKKLELDMEKVNVNGGAIAIGHPLGATGARCVATLLHEMKRRGKDCRFGVISMCIGTGMGAAAVFERGDSVDNLSNARVANGDSH

SEQ ID NO: 92746 - DNA, 1182 bp, Bordetella bronchiseptica RB50
  CDS (1)..(1182): transl_table=11
atgtccgatcccattgttatcgtttccgtcgcccgcacgcccatgggcggcatgctgggcagcctgtccggcctggccgcccacgagctgggctcggccgccatcaaggcggccatcgagcgcgccggcatcaagcccgaacaggtcgatgaagtcatcatgggcaacgtgctgcaggccggccagggccaggcgcccgcccgccaggccgcgctcggcgccggcctgccgctgggcgtgggctgcaccacgatccacaaggtgtgcggctcgggcctgaaggccgccatgttcggccacgacctgctgaccgcgggctcggtcgacgtcgtggtcgccggcggccaggaaagcatgagcaacgcgccctacctgctgctcaagggccgccagggctaccgctacggccacaacacggtgtacgaccacatggccctggacggcctggaagacgcctatgaccgcggcaaggcgatgggcgtattcgccgaggactgcgccaccaagtacagcttcacgcgcgagcagcaggacgccttctcgctcgaatcgctgcgccgcgcgcgcgccgccaacgaggatggcagcttcaagtgggagatcgcgccggtaaccgtggccggccgcaagggcgatacggtgatcgataccgacgaggcgcccaccaaggccatgcccgagaagatcccgacgctcaagccggctttcaagaaggatggcaccgtcaccgccgccaactcgtcgtcgatctccgacggcgcggcggccatggtgctgatgcgcgcctccaccgccgagaaactgggcgtcaagccgctggcccgcatcgtcgcccatgcccagcatgcgcaggagccgaactggttcaccaccgccccggtcggcgcgctgaagaacctgttcaagaaaaccggctggcaagccagcgacgtggatctgtacgagatcaacgaagccttcgccgtggtcaccatggcggccatgaaggacttcgacctgccgcacgacaaggtcaacgtgcatggcggcgcgaccgcgctgggccaccccatcggcgcatcgggtgcgcgcctgatggccacgctggtcggcgcgctgcgcaagaccggcggcaagcgcggcgtggccacgctgtgcatcggcggcggcgaagccgtcgcgatggccatcgaaatgctgtaa

SEQ ID NO: 92747 - protein, 393 aa, Bordetella bronchiseptica RB50
MSDPIVIVSVARTPMGGMLGSLSGLAAHELGSAAIKAAIERAGIKPEQVDEVIMGNVLQAGQGQAPARQAALGAGLPLGVGCTTIHKVCGSGLKAAMFGHDLLTAGSVDVVVAGGQESMSNAPYLLLKGRQGYRYGHNTVYDHMALDGLEDAYDRGKAMGVFAEDCATKYSFTREQQDAFSLESLRRARAANEDGSFKWEIAPVTVAGRKGDTVIDTDEAPTKAMPEKIPTLKPAFKKDGTVTAANSSSISDGAAAMVLMRASTAEKLGVKPLARIVAHAQHAQEPNWFTTAPVGALKNLFKKTGWQASDVDLYEINEAFAVVTMAAMKDFDLPHDKVNVHGGATALGHPIGASGARLMATLVGALRKTGGKRGVATLCIGGGEAVAMAIEML

SEQ ID NO: 92748 - DNA, 1185 bp, Chromobacterium violaceum ATCC 12472
  CDS (1)..(1185): transl_table=11
atgcaacaacaggaaatcgtgatcgtgggcatggcgcgcaccgccatgggcggcttccagggcgcgctgtccggtctgaccgccagccagctgggcgcggccgcgatccgcgccgcggtggagcgcgcaggcgtctccgccggcgatgtggacgaagtgatcatgggctgcgtgctgccggccggccagggccaggccccggcgcgccaggcggccctgggcggtggcttgccgcagtccacgccgtgcaccaccatcaacaagatgtgcggctccggcatgaaggcgctgatgatggcgcatgaccaattgctggccggcaacggcggcgttgtggtggccggcggcatggagagcatgagcaacgcgccctatctgatgcccaaggcccgcggcggcctgcgcctgggtcatggcgaaatcaaggaccacatgttcctggacggcctggaggatgcttatcagaagggcacgctgatgggggtgttcgccgagcagtgcgccgagaaatacggcttcagccgccaggaccaggatgagttcgccatcgcctcgctgacccgcgcccagcaggcgatcaagggcggccagttcaaggacgagatcgccgctgtcacggtgccgggccgcggcggcgacacggtggtggacaccgacgagcagccgctgaaggccaatctggacaagatcccgaccttgaagccggcattcaagaaggacggcaccgtgaccccggccaactccagctccatctccgacggcggcgccgcgctggtgttgatgacggcggccgaggcggccaaacgcggcctgaagcccatcgcccgcgtggtcggccacagcagcttcgcccacgagccgggctggttcaccaccgccccggtgcacgccattgaaaagctgctggccaagaccggctggagggccggcgaggtcgatctgtacgagatcaacgaagccttcgccgtggtgacgatggcggcgatgcacgacctgaagctgccgcacgacaaggtgaacgtgcatggcggcgcttgcgcgctgggccatccgatcggcgcgtccggcgcccgcatcgtgatctcgctgctgtccgcgctgaaacagcgcggcggcaagcgcggcgtggccagcctgtgcataggcggcggcgaagccaccgcgctggcggtcgagctgatctaa

SEQ ID NO: 92749 - protein, 394 aa, Chromobacterium violaceum ATCC 12472
MQQQEIVIVGMARTAMGGFQGALSGLTASQLGAAAIRAAVERAGVSAGDVDEVIMGCVLPAGQGQAPARQAALGGGLPQSTPCTTINKMCGSGMKALMMAHDQLLAGNGGVVVAGGMESMSNAPYLMPKARGGLRLGHGEIKDHMFLDGLEDAYQKGTLMGVFAEQCAEKYGFSRQDQDEFAIASLTRAQQAIKGGQFKDEIAAVTVPGRGGDTVVDTDEQPLKANLDKIPTLKPAFKKDGTVTPANSSSISDGGAALVLMTAAEAAKRGLKPIARVVGHSSFAHEPGWFTTAPVHAIEKLLAKTGWRAGEVDLYEINEAFAVVTMAAMHDLKLPHDKVNVHGGACALGHPIGASGARIVISLLSALKQRGGKRGVASLCIGGGEATALAVELI

SEQ ID NO: 92750 - DNA, 1188 bp, Rhodopseudomonas palustris CGA009
  CDS (1)..(1188): transl_table=11
atgacccacgatcctatcgttatcgtcggctccgcgcgcaccccgatgggcggctttcagggcgagctgaaggacgccaccgcatcccagctcggcgcggctgctatttcggccgcggtcgtgcgcgccggcctgaagccggatgcgatcgacgaagtcgtgttcggctgcgtgctgccggccggccagggccaggccccggcgcgccaggcgtcgctcggcgccggcctgccgctctcggccggctgcaccacggtcaacaagatgtgcggctccggcatgaaggccgcgatgttcgcgcatgatctgttgatcgccggcagcgccaccgtcgcagtcgccggcggcatggagagcatgaccaacgcgccgtatctgctcgaccgcgcgcgcggcggctatcgcatgggccacggccgggtgatcgaccacatgttcctcgacggcctggaagacgcctacgacaaggggcggctgatggggaccttcgccgaggactgtgcgcaaagctatcagttcacccgcgagacccaggacaatttcgccatcacttcgctgacccgtgcccaggcggcgatcaaggacggctcgttcgcgcgcgagatcacgccggtgacgatcaaggccggcaagtcggaagtcaccgtgaccaccgacgagcagccgctgaaggccaagctcgaaaagatcccgacgctgaagccggcatttcgcgaaggcggcaccgtgacggcggcgaactcgtcgtcgatctcagacggcgccgcggcgctggtgctgatgcgccgctcggaggccgacaagcgcggcctgaagccgctcgcggcgatcgtcggccattccactcacgcgcatgagccggcgctgttcgccaccgcgccgatcggcgcgatccgcaagctcagcgaacgcaccggctggaatctcgccgacgtcgatctgttcgaagtcaacgaggcgttcgcggtggtggcgttggcggcgatgcacgatctcggcctgccgcacgacaaggtcaacgtccatggcggcgcctgcgcgctcggccatccgatcggcgcctccggtgcacgcgtgctggtgacgctgctggcggcgctggagaagcacgacctcaagcgcggcatcgcctcgctgtgcatcggcggcggcgaagccaccgctgtcgcggtcgagcggctgtcgtga

SEQ ID NO: 92751 - protein, 395 aa, Rhodopseudomonas palustris CGA009
MTHDPIVIVGSARTPMGGFQGELKDATASQLGAAAISAAVVRAGLKPDAIDEVVFGCVLPAGQGQAPARQASLGAGLPLSAGCTTVNKMCGSGMKAAMFAHDLLIAGSATVAVAGGMESMTNAPYLLDRARGGYRMGHGRVIDHMFLDGLEDAYDKGRLMGTFAEDCAQSYQFTRETQDNFAITSLTRAQAAIKDGSFAREITPVTIKAGKSEVTVTTDEQPLKAKLEKIPTLKPAFREGGTVTAANSSSISDGAAALVLMRRSEADKRGLKPLAAIVGHSTHAHEPALFATAPIGAIRKLSERTGWNLADVDLFEVNEAFAVVALAAMHDLGLPHDKVNVHGGACALGHPIGASGARVLVTLLAALEKHDLKRGIASLCIGGGEATAVAVERLS

SEQ ID NO: 92752 - DNA, 1176 bp, Bdellovibrio bacteriovorus HD100
  CDS (1)..(1176): transl_table=11
atggaaaatgtcgtaattgtgagcagcgtaagaacccctgtagcttctttccaaggaggctttgcctctgttcctgcaccaaaactgggtgcagcagccatcaaagaagccatcactcgcgcaggtgtttctgctgacgaaatcgatgagtgcatcatgggcgaagtcctgactgcaggtgtcggccaggctccagcgcgtcaagcggcgttgggtgcaggtttgaaaaactccactccgtgcatgaccatcaacaaagtgtgcggctccggccttaaatccgtgatgctggcagcagactctatcgctttgggacacactaaaattgcagtggcaggcggtcaggaaaacatgactttggctccacacttgcttgaaaactcccgctccggttaccgcatgggtccaacgcaaatgaccgactccatgatcaaagacggcctttgggatccatacaacaacttccacatgggtaatgcagcggaaatctgcgtgaaagagcacaacttcactcgtgaagaacaagacgctttcgcgattgattcctacaaaaaagctcaggacgcgtgggcgaaaaacgttttcaaaaacgaaatcgccccggttgtggttgaaggccgcaaaggtgctgtgaccgtggataaagacgaagagccgttcaacacgaacttcgacaaaatcccgggtctgaaacctgcattcgacaaagccggcaccatcacggcggccaatgcttccaaaatcaacgacggtgctgcagcgcacgttttgatgtctgagtctgaagcgaaaaaacgcggcatcaaacctctggcgaaaatcgtggcacacgctacattcgctcacgagccaaaatacttcacaactgctccagtgggcgcgatcaaagccgctctgaacaaagccaacctgaaagtgggcgatgtggatctttgggaaatcaacgaagccttcgccgttgtgactcaagtggcgatgaaagagcttgaaatcccggcttccaaagtaaacatccacggtggtgctgtggctatcggtcacccgatcggcgcttctggcgcgcgtatcctggcgaccttggttcacgctttgcacactcacaacaaacgctacggccttgccactttgtgcatcggtggcggcgaagcggtggcactgatcatcgagaaagcgtaa

SEQ ID NO: 92753 - protein, 391 aa, Bdellovibrio bacteriovorus HD100
MENVVIVSSVRTPVASFQGGFASVPAPKLGAAAIKEAITRAGVSADEIDECIMGEVLTAGVGQAPARQAALGAGLKNSTPCMTINKVCGSGLKSVMLAADSIALGHTKIAVAGGQENMTLAPHLLENSRSGYRMGPTQMTDSMIKDGLWDPYNNFHMGNAAEICVKEHNFTREEQDAFAIDSYKKAQDAWAKNVFKNEIAPVVVEGRKGAVTVDKDEEPFNTNFDKIPGLKPAFDKAGTITAANASKINDGAAAHVLMSESEAKKRGIKPLAKIVAHATFAHEPKYFTTAPVGAIKAALNKANLKVGDVDLWEINEAFAVVTQVAMKELEIPASKVNIHGGAVAIGHPIGASGARILATLVHALHTHNKRYGLATLCIGGGEAVALIIEKA

SEQ ID NO: 92754 - DNA, 1218 bp, Arabidopsis thaliana
  CDS (1)..(1218)
atggctccgcctgtctctgatgattccctacagcctcgagatgtttgtgttgtgggagtggcgcgaacgcctataggggacttccttggctccctctcgtctttgactgctacaagacttgggtccatagccatccaagccgcacttaagagagcacatgttgatccggcccttgtggaagaggtcttctttggcaatgtcttaactgccaatcttgggcaagcaccagcaagacaggctgcacttggtgctgggattccctattctgtgatctgcaccactatcaacaaagtttgtgctgcaggaatgaaatctgtaatgctagcgtctcaaagtatccagctcggcttgaatgatattgttgttgctggtgggatggagagcatgtcaaacgtacctaagtacctcccggacgcaagaaggggttctcgattaggtcatgatactgttgttgatggtatgatgaaagatggactttgggatgtctataatgactttggaatgggagtttgtggagaaatatgcgctgaccagtaccgtattacaagagaagaacaggatgcttatgctatccagagctttgagcgtggtattgctgcgcaaaacactcagttgttcgcttgggaaattgttccggtcgaagtttccactggaagagggaggccttcagttgttattgacaaggatgaaggattggggaagtttgatgcagccaagttaaaaaagcttagaccaagtttcaaggaggatgggggatcagtcactgctggaaatgcatcaagcataagtgatggtgcggcagcgttagtgctagtgagtggagagaaggctcttgagcttggactgcatgttatcgctaagattagaggatacgctgatgctgctcaggcaccagagttattcacaaccacgccagctcttgctattcctaaagctataaagcgggctggtttggatgcatctcaagtggattattatgaaataaacgaagcattttctgtggtagctctagccaatcagaaactactgggattagatcctgaacggctcaatgcgcatggaggggctgtttcactgggacatccattgggctgtagcggtgctcgtatcttggtcacattattgggggtgttgagagcaaagaagggaaagtatggagtggcatcaatatgcaacggaggaggaggagcatcagcacttgtccttgagttcatgtaa

SEQ ID NO: 92755 - protein, 405 aa, Arabidopsis thaliana
MAPPVSDDSLQPRDVCVVGVARTPIGDFLGSLSSLTATRLGSIAIQAALKRAHVDPALVEEVFFGNVLTANLGQAPARQAALGAGIPYSVICTTINKVCAAGMKSVMLASQSIQLGLNDIVVAGGMESMSNVPKYLPDARRGSRLGHDTVVDGMMKDGLWDVYNDFGMGVCGEICADQYRITREEQDAYAIQSFERGIAAQNTQLFAWEIVPVEVSTGRGRPSVVIDKDEGLGKFDAAKLKKLRPSFKEDGGSVTAGNASSISDGAAALVLVSGEKALELGLHVIAKIRGYADAAQAPELFTTTPALAIPKAIKRAGLDASQVDYYEINEAFSVVALANQKLLGLDPERLNAHGGAVSLGHPLGCSGARILVTLLGVLRAKKGKYGVASICNGGGGASALVLEFM

SEQ ID NO: 92756 - DNA, 1221 bp, Arabidopsis thaliana
  CDS (1)..(1221)
atggctccgcctgtctctgatgattccctacagcctcgagatgtttgtgttgtgggagtggcgcgaacgcctataggggacttccttggctccctctcgtctttgactgctacaagacttgggtccatagccatccaagccgcacttaagagagcacatgttgatccggcccttgtggaagaggtcttctttggcaatgtcttaactgccaatcttgggcaagcaccagcaagacaggctgcacttggtgctgggattccctattctgtgatctgcaccactatcaacaaagtttgtgctgcaggaatgaaatctgtaatgctagcgtctcaaagtatccagctcggcttgaatgatattgttgttgctggtgggatggagagcatgtcaaacgtacctaagtacctcccggacgcaagcagaaggggttctcgattaggtcatgatactgttgttgatggtatgatgaaagatggactttgggatgtctataatgactttggaatgggagtttgtggagaaatatgcgctgaccagtaccgtattacaagagaagaacaggatgcttatgctatccagagctttgagcgtggtattgctgcgcaaaacactcagttgttcgcttgggaaattgttccggtcgaagtttccactggaagagggaggccttcagttgttattgacaaggatgaaggattggggaagtttgatgcagccaagttaaaaaagcttagaccaagtttcaaggaggatgggggatcagtcactgctggaaatgcatcaagcataagtgatggtgcggcagcgttagtgctagtgagtggagagaaggctcttgagcttggactgcatgttatcgctaagattagaggatacgctgatgctgctcaggcaccagagttattcacaaccacgccagctcttgctattcctaaagctataaagcgggctggtttggatgcatctcaagtggattattatgaaataaacgaagcattttctgtggtagctctagccaatcagaaactactgggattagatcctgaacggctcaatgcgcatggaggggctgtttcactgggacatccattgggctgtagcggtgctcgtatcttggtcacattattgggggtgttgagagcaaagaagggaaagtatggagtggcatcaatatgcaacggaggaggaggagcatcagcacttgtccttgagttcatgtaa

SEQ ID NO: 92757 - protein, 406 aa, Arabidopsis thaliana
MAPPVSDDSLQPRDVCVVGVARTPIGDFLGSLSSLTATRLGSIAIQAALKRAHVDPALVEEVFFGNVLTANLGQAPARQAALGAGIPYSVICTTINKVCAAGMKSVMLASQSIQLGLNDIVVAGGMESMSNVPKYLPDASRRGSRLGHDTVVDGMMKDGLWDVYNDFGMGVCGEICADQYRITREEQDAYAIQSFERGIAAQNTQLFAWEIVPVEVSTGRGRPSVVIDKDEGLGKFDAAKLKKLRPSFKEDGGSVTAGNASSISDGAAALVLVSGEKALELGLHVIAKIRGYADAAQAPELFTTTPALAIPKAIKRAGLDASQVDYYEINEAFSVVALANQKLLGLDPERLNAHGGAVSLGHPLGCSGARILVTLLGVLRAKKGKYGVASICNGGGGASALVLEFM

SEQ ID NO: 92758 - DNA, 1182 bp, Bacillus cereus ATCC 10987
  CDS (1)..(1182): transl_table=11
atgagtaaaacagttattttaagtgctgcaagaacaccggttgggaaatttggagggtctttaaaagatgtaaaagcaacagaacttggagggattgcaattaaagcggcgcttgaaagagcaaatgtttctgctagtgatgttgaggaagttatattcggaacggttattcaaggtggacagggacaaattccatcacgccaagcggcgagggctgctggaatcccttgggaagtgcagacggaaacagtgaataaagtttgtgcgtcggggcttcgtgcggttacgttagcggatcaaattattcgtactggcgatcaatcattgattgtagctggtggtatggagtcgatgagtaacagtccttacattttacgaggagcaagatggggatacagaatgggcaacaacgaagtcgttgatttaaacattgctgacggtttaacatgcgcattttctggtatacacatgggtgtttatggcggagaagttgcgaaggaagatggaatttctcgcgaagcgcaagatgaatgggcatatcgtagccaccaacgtgcggtttcagcacataatgaaggacgttttgaagaggaaatcgtgccagtaacgattccgcaaagaaaaggcgatcctattgtcgttgcaaaggatgaggcgccacgcgcggatacaacaattgaaaagttagcaaaattaaaacctgtatttgataaaacagcgacagtgacagctggtaatgcaccaggcttaaacgatggtggtgctgcacttgtattaatgagcgaagacagagcgaagcaagaaggaagaaagccgttagcgacaattttggcacatacagcaattgcagtggagtctaaagatttcccgagaacgccaggttatgcaattaacgcattgcttgaaaaaacaggaaagacaattgaagacatcgatttattcgagattaatgaagcatttgcagcagtagcaattgcaagtacagagattgcgggaattgatccagaaaaattgaatgtaaatggcggcgcagtggcgatggggcatccgattggagcaagcggagcgcgcattatcgttacactaatccatgcactgaagcaacgcggcggcggaattggaattgcttcgatttgtagcggtggtggtcaaggtgatgcagtgatgattgaagttcactaa

SEQ ID NO: 92759 - protein, 393 aa, Bacillus cereus ATCC 10987
MSKTVILSAARTPVGKFGGSLKDVKATELGGIAIKAALERANVSASDVEEVIFGTVIQGGQGQIPSRQAARAAGIPWEVQTETVNKVCASGLRAVTLADQIIRTGDQSLIVAGGMESMSNSPYILRGARWGYRMGNNEVVDLNIADGLTCAFSGIHMGVYGGEVAKEDGISREAQDEWAYRSHQRAVSAHNEGRFEEEIVPVTIPQRKGDPIVVAKDEAPRADTTIEKLAKLKPVFDKTATVTAGNAPGLNDGGAALVLMSEDRAKQEGRKPLATILAHTAIAVESKDFPRTPGYAINALLEKTGKTIEDIDLFEINEAFAAVAIASTEIAGIDPEKLNVNGGAVAMGHPIGASGARIIVTLIHALKQRGGGIGIASICSGGGQGDAVMIEVH

SEQ ID NO: 92760 - DNA, 1218 bp, Apis mellifera
  CDS (1)..(1218)
atgagaatttttttgatcaaccaacgattatatagttctaaagtaaaattaaatgatgtcgttatagttagtgcaactagaacacctatgggatcatttctgggagagttatctgatttatctgcaccaaaacttggagctataactatacaagcagcagtagaacgagctggaattcctaaagataaaattacagaagtatatatgggaaatgtttgtcaagcttttctgggtcaagcaccagcaaggcaagctacattatttgcaggactttctaaatcaacaatatgcacaactgttaataaagtttgtgctagtggcatgaaaagcatcatgcttgcttctcaatcattacaatgtgggcatcaagaaattgttcttgctggtggtatggaatcaatgtctaatgtaccattttatcttcctcgaaaggaaattaaatatggaagtataaaattagagatgggtattgtatttgatggtttaactgatgtttataataaatttcatatgggaaattgtgcagaaaatgttgctaaaaaattaaatattactcgtgatgaacaagatgaatatgctattaacagttataaacgcagtgctgcagcatatgtaaacaaaatatttcaaaatgaacttgtttctgttcctgtgcctcaaaaaaaaggcaatcctaataaaatatttaatgaggatgaagaatataaaaaagttgattttgttaaatttgcaaaattgaatacagtttttcagaaaaatggtacaataactgctggaaatgcatcaactttaaatgatggagctgctgcattaattttgacaactacaactattgctgaaaaaatgaatttaaaacctttagcacgaattattgcatttcaagatactgcaattgaacccattgatttttctattgcaccatcttttagtatttctaagttattagaaaatactggagttaataaaaatgatatagctctttgggagattaatgaagcttttagtgtagtagtaattgcaaatcaaaaattactagatcttgatcctaataaagtaaatattcatggtggtgctgtatctcttggtcatcctattggtatgtctggagctcgtattgtagtacatttagtacatgctttaaaaactggagaaaagggtattgcatctatttgcaatggaggcggtggcgcttcatcaatcttaattgaaaaattgtga

SEQ ID NO: 92761 - protein, 405 aa, Apis mellifera
MRIFLINQRLYSSKVKLNDVVIVSATRTPMGSFLGELSDLSAPKLGAITIQAAVERAGIPKDKITEVYMGNVCQAFLGQAPARQATLFAGLSKSTICTTVNKVCASGMKSIMLASQSLQCGHQEIVLAGGMESMSNVPFYLPRKEIKYGSIKLEMGIVFDGLTDVYNKFHMGNCAENVAKKLNITRDEQDEYAINSYKRSAAAYVNKIFQNELVSVPVPQKKGNPNKIFNEDEEYKKVDFVKFAKLNTVFQKNGTITAGNASTLNDGAAALILTTTTIAEKMNLKPLARIIAFQDTAIEPIDFSIAPSFSISKLLENTGVNKNDIALWEINEAFSVVVIANQKLLDLDPNKVNIHGGAVSLGHPIGMSGARIVVHLVHALKTGEKGIASICNGGGGASSILIEKL

SEQ ID NO: 92762 - DNA, 1194 bp, Strongylocentrotus purpuratus
  CDS (1)..(1194)
atgtctgatccagttgttatcgtttcagccgttcgcactgcgattggcagtctgaatggagtactgtcgactattccagctcatgatctgggaaccatagtcatcaaggaagccctgcagaggtcaaaggtcagaagcagtgatgtgtcagaggtcatcatgggtcaggtgtacacagcaggtcaaggccagaaccctgctagacaggccagtatgaatgcagggataccagtcgaggtaccagcatataacatgaacttgctgtgtggttctggcctgaagacaattattctaggggcacaggcaatcatgtgtggggaatcttccattgtggttgcagggggtcaggaaagcatgagccaggtgccccatgcagtccatcttcgtagtggtttatctggcgtcagtgacaagcctttggttgatttaatagtgcacgatggcctgatggatgcattcaataactaccacatgggaattacagctgaaaacctggccaagaaatggaaaatcacacgtgaacagcaggaccagttcgctctggggtcgcagctcaaggccgagaaggcccagaaagacggcgtcttcgctacagagattgtcaccgtgccgaccaagagccgcaagcgcaaggccacggtagagtacgacgttgatgagtacccaaggaaggggtcaaccatcgagggaatggctaaactcagatcctgctttatcgaggatgcgacaggaacagttactgcgggaaattcatgcggtatgaatgacggagcagcagcagtggttctcatgaagcagtccgaggctcagaaaaggggcgtggcacctctagcaaggatagcctcgtggggccaggccggggtggatccagctatcatggggtctggtcctattcctgccatcaagaaagctcttgagaaagcaggctggaacattggtgatgttgatctgttcgagttgaatgaggtatttgcagcacaggctctcacagtcacgaaggagcttggtattgacatgtccaaggtcaatatctatgggggagccatagccctgggccaccccttagccatgtcaggaactcgcatcgtggtcaccctactcaacgccatgaaaaggaccaatgtcacgaagggcttggctgctatctgcgtagggggagggatgggcattgccatttgtgtagaagcattttag

SEQ ID NO: 92763 - protein, 397 aa, Strongylocentrotus purpuratus
MSDPVVIVSAVRTAIGSLNGVLSTIPAHDLGTIVIKEALQRSKVRSSDVSEVIMGQVYTAGQGQNPARQASMNAGIPVEVPAYNMNLLCGSGLKTIILGAQAIMCGESSIVVAGGQESMSQVPHAVHLRSGLSGVSDKPLVDLIVHDGLMDAFNNYHMGITAENLAKKWKITREQQDQFALGSQLKAEKAQKDGVFATEIVTVPTKSRKRKATVEYDVDEYPRKGSTIEGMAKLRSCFIEDATGTVTAGNSCGMNDGAAAVVLMKQSEAQKRGVAPLARIASWGQAGVDPAIMGSGPIPAIKKALEKAGWNIGDVDLFELNEVFAAQALTVTKELGIDMSKVNIYGGAIALGHPLAMSGTRIVVTLLNAMKRTNVTKGLAAICVGGGMGIAICVEAF

SEQ ID NO: 92764 - DNA, 1185 bp, Strongylocentrotus purpuratus
  CDS (1)..(1185)
atgtctgatccagttgtcatcgtttctgccgttcgcactgcaattggtagtctgaatggagtattgtcaactgtagcagcccatgatctgggaaccatagtcatcaaggaagccctgcaaaggtcaggggtcagtagcagtgatgtgtcagaggtcatcatgggtcaggtgtatacggcaggtcaaggccagaaccctgccagacaggccagtgtgaatgcagggataccagttgaggtaccagcaactaacgtcaacatgctgtgtggttccggcctgaggacaatagtactaggagcacaggcgatcatgtgtggggactcttccattgtggttgcagggggtcaggaaagcatgagccaggcgccccatgcagcccatcttcgtagcggtctgtccttcggtgacaagcctttggtggatctgttagtaaatgatggccttatggatgcattcaataattaccacatgggaattacagctgaaaacctggccaagaaatgggaaatcacacgtgaacagcaggaccagtttgctctggggtcgcagctcaaggccgagaaggcccagacagaaggcatctttgctacagagatcgtcactgtgccgattaagagccgcaaggccacggtagaggtcaacgttgacgagtacccaaggaaggggtcaaccatcgaggggatgactaaactcagatcgtgctttatcaaggatgcaacgggaacggttactgctggcaacgcatctggtatcaacgacggagcagcagcagtggttctcatgaagctctccgaggctcagaagaggggcgtggcacctctagcaaggatagtctcatggggccaggctggggtggatccagctatcatggggtctggtcctattcctgctatcaagaaagctcttgagaaagcaggctggagccttggtgatgttgacctgtttgaactgaatgaggcgtttgcagcgcagtctctcacagtcaccaaggagcttggtattgacacctcaaaggtcaatatctacggaggagccatagccctgggccaccccttagccgtgtcgggcacccgcatcatcgtcaccctactcaacgccatgaagaggaccaatgccaagaagggcttggctgcactctgtatcgggggagggatgggcattgccatgtgtgtagaaacttcatag

SEQ ID NO: 92765 - protein, 394 aa, Strongylocentrotus purpuratus
MSDPVVIVSAVRTAIGSLNGVLSTVAAHDLGTIVIKEALQRSGVSSSDVSEVIMGQVYTAGQGQNPARQASVNAGIPVEVPATNVNMLCGSGLRTIVLGAQAIMCGDSSIVVAGGQESMSQAPHAAHLRSGLSFGDKPLVDLLVNDGLMDAFNNYHMGITAENLAKKWEITREQQDQFALGSQLKAEKAQTEGIFATEIVTVPIKSRKATVEVNVDEYPRKGSTIEGMTKLRSCFIKDATGTVTAGNASGINDGAAAVVLMKLSEAQKRGVAPLARIVSWGQAGVDPAIMGSGPIPAIKKALEKAGWSLGDVDLFELNEAFAAQSLTVTKELGIDTSKVNIYGGAIALGHPLAVSGTRIIVTLLNAMKRTNAKKGLAALCIGGGMGIAMCVETS

SEQ ID NO: 92766 - DNA, 1200 bp, Nasonia vitripennis
  CDS (1)..(1200)
atgactactatcactaaaggaattttcattgttgctgccaagcgcacaccctttggaaaaatgggtggagcttttactggtaaaagtataacagagttatcagtggttgcatctaacgcagccattcaagctgccaatctgaagcctgaacaaattgataacgtggtatttggaaatgttctgcctttgtcatcttctgatggtgcgttcatgcccagacacgtattattaaagtgtggaattcctcttgagaagccagctttaggtgtcaatcggctgtgtggttctggtttccaggcaatcgtcagtggtgctcaaagcattctgactggagaagcaaaggttgtgctaactggaggtgctgagaatatgagccagatgccatttgtggtacgcaatgttcgttttggaacagttttggggcaaaaacatgagtttgaagattccctctggctaggattacttgacacgcactgtggtatgcctatgggcatgacagctgaaaagcttggagctcaatttggagtcaccaggaaagaagttgatgagtttgctttaagaagccaacacacatggaaagctgccaacgatgcaggctatttcaaagctgaaatagcacctgtaactttgaaatcaaagaagggagaagtatctgtaaccgtggatgagcatccaagacctcaaacaaaaattgaagatctttcaaaacttccttcaatcttcaagaaagatggattagtcactgcaggaacagcatctggagtctgtgatggagctggagtagtcattcttgccagtgaagatgctgttaaagctaatggactcaagccaatagcacgtttggttggttacagtactgttggtgttgatccaactattatgggaattggaccgtctccagccattaaaaatttattgaaggctgctggaaaatcgttaaacgatatggaattggttgagattaatgaagcctttggagctcagacacttgcttgtgctaaagatctaaatcttgatatcaacaagcttaatgtaaatggtggtgctattgctgttggacatcctcttggagcttctggatctcgcattactggtcatttagttcatgaactgaggagaagaaacgctggcaagtttgctattgggtcagcttgcattggaggagggcaaggtattgctgttatggttgaagctctttaa

SEQ ID NO: 92767 - protein, 399 aa, Nasonia vitripennis
MTTITKGIFIVAAKRTPFGKMGGAFTGKSITELSVVASNAAIQAANLKPEQIDNVVFGNVLPLSSSDGAFMPRHVLLKCGIPLEKPALGVNRLCGSGFQAIVSGAQSILTGEAKVVLTGGAENMSQMPFVVRNVRFGTVLGQKHEFEDSLWLGLLDTHCGMPMGMTAEKLGAQFGVTRKEVDEFALRSQHTWKAANDAGYFKAEIAPVTLKSKKGEVSVTVDEHPRPQTKIEDLSKLPSIFKKDGLVTAGTASGVCDGAGVVILASEDAVKANGLKPIARLVGYSTVGVDPTIMGIGPSPAIKNLLKAAGKSLNDMELVEINEAFGAQTLACAKDLNLDINKLNVNGGAIAVGHPLGASGSRITGHLVHELRRRNAGKFAIGSACIGGGQGIAVMVEAL

SEQ ID NO: 92768 - DNA, 1416 bp, Nasonia vitripennis
  CDS (1)..(1416)
atgtcaggactcgtcgcgaagaatcttccccgcttccaccacgtcgcaccccaagccacttttatctgggatccgtcgcgttttaatcgaaaaagttatgcaactgtgtctaaaccatctgcgccagtgagaaagaacatagtctatgttgatggagttcgaactccatttttgctatcaaacacagattacagcaagctcatagcgcatgatcttgcaagagaaactcttgtaaatctgcagaagaagacaggtatcccgaaagatgccatcgactatgttatttatggtactgttatgcaggaagtaagaacttcaaacattgctcgcgaagctgcccttgcagctggttacagcgagcacacaccagctcacactgtcactatggcttgcattagtagtaatgtggccctgaccaccggcataggcctaatccactctggaatatatgataccattgttgctggaggtgttgaattcatgtctgatatcccaattaggcacagcagagccatgagatcattgatgttgagagcaaataaggctaagacaccaatgcagaaacttgctcttctggccacaatcagaccaggacactttgttccagatctaccagctgttgctgaattttctaccaatgaaactatgggacacagtggtgacagacttgcagctgcatttaaagtttctcgagaggaacaggatgagtatgccctgcgctcgcatactttagcagctcaagcccaccagaatggacacttcactgacatggtgccatttgtagttcctggagttaaaaacgctgttgacaaggacaatggtatcagagtatcaaccaaggagcaattggcaaagcttaaacctgcttttgtgaaaccctatggaacagtcacagctgcaaatgcatcattccttactgatggtgcttcagctggtttgattatgactgaagaaaaagctaagcaacttggactgaaacccaaagcctatttaagagagttcacctatgtctctcaggatcccaaagatcaacttttgctgggacctgcttatgccattcccaaagttctggagaaagctggactttctctgaaagacattggagtttgggaagtacatgaggcctttgctgcacaaattttggccaatctgaaggctcttgactctgaattcttcgctaaaacgtatctgaaacgtcagcaaaaagttggcgttcccgatttgaagaaatggaacgcatggggaggttctctttctatcggacatccctttgcggccactggtgtacgattagcgactcacactgctaacagaatgatcaaggaagatcaacaatttggtctcattgcagcatgtgcggctggtggacagggagttggcatgataatggaaagacatccagatgccaagatttaa

SEQ ID NO: 92769 - protein, 471 aa, Nasonia vitripennis
MSGLVAKNLPRFHHVAPQATFIWDPSRFNRKSYATVSKPSAPVRKNIVYVDGVRTPFLLSNTDYSKLIAHDLARETLVNLQKKTGIPKDAIDYVIYGTVMQEVRTSNIAREAALAAGYSEHTPAHTVTMACISSNVALTTGIGLIHSGIYDTIVAGGVEFMSDIPIRHSRAMRSLMLRANKAKTPMQKLALLATIRPGHFVPDLPAVAEFSTNETMGHSGDRLAAAFKVSREEQDEYALRSHTLAAQAHQNGHFTDMVPFVVPGVKNAVDKDNGIRVSTKEQLAKLKPAFVKPYGTVTAANASFLTDGASAGLIMTEEKAKQLGLKPKAYLREFTYVSQDPKDQLLLGPAYAIPKVLEKAGLSLKDIGVWEVHEAFAAQILANLKALDSEFFAKTYLKRQQKVGVPDLKKWNAWGGSLSIGHPFAATGVRLATHTANRMIKEDQQFGLIAACAAGGQGVGMIMERHPDAKI

SEQ ID NO: 92770 - DNA, 1185 bp, Nasonia vitripennis
  CDS (1)..(1185)
atgtgcgaccccaaggatgtcgttatcgtgtcagctgttcgcacccctataggttccttctgtggctcgctatcatcgctgaaggcatcggatcttggcagcattgtaatcaaggaaagcttggccagagccaatttgaagcctaccgatgtctccgaagtgataatgggacaaggactgacggcaggacaggggcagaatccagcgagacaggcttccatacaagctggtcttcctattactgtaccagcttatcttgtcagcatgttgtgtggatcaggcctcaagtctattatgaatggttaccaagcaatcaagagtggggagagcgaagtaattgtggctggtggacaagagagcatgagtaaagctcctcacgcaattcatcttagagatggagtaaaaatgggtgatgcaacaatggttgataccatgctggttgatggccttactgatgttttcaacaatattcacatgggtgttactgctgaaaatctggctaaaaaatatgctattagcagagaggagcaagatgaatttgctgcccgatctcaacataaagctgaaattgcgatgactaaagggtactttgacaaagaaatcattccagtgcctgtgacaattcgaagaaaaacgaccattgtatccaaggatgaattcccaaaaccaggtacaactgcaaaagatcttgcaggattgaaacctgtgtttgtcaaagatggaacagtaactcctggcaacgcgtcaggaataaacgatggagcggcagcggttgttctaatgtcaagcgagactgccactaaaaaaggactaaaaccaatggcccgcatagtcgcgatgaccgtggttggcctcgagcccgatatcatgggttacggacccgttcccgcagtcgaattactgctcaaaaaagcccaatggaagaaggaagaggtagacttatttgaattgaatgaagcctttgctgctcaatccattgcatgtgaacgcaatcttggagtagatcctgaaaaagttaatattagtggcggagctattgctcttggtcaccctattggtgcttcaggtgcaagaattgtcgtgaccttgctctacttgctggaaagaacaggaggaaagaaaggtgttgcatccctttgtataggtggaggtatgggtattgctattgctgttgagagactttaa

SEQ ID NO: 92771 - protein, 394 aa, Nasonia vitripennis
MCDPKDVVIVSAVRTPIGSFCGSLSSLKASDLGSIVIKESLARANLKPTDVSEVIMGQGLTAGQGQNPARQASIQAGLPITVPAYLVSMLCGSGLKSIMNGYQAIKSGESEVIVAGGQESMSKAPHAIHLRDGVKMGDATMVDTMLVDGLTDVFNNIHMGVTAENLAKKYAISREEQDEFAARSQHKAEIAMTKGYFDKEIIPVPVTIRRKTTIVSKDEFPKPGTTAKDLAGLKPVFVKDGTVTPGNASGINDGAAAVVLMSSETATKKGLKPMARIVAMTVVGLEPDIMGYGPVPAVELLLKKAQWKKEEVDLFELNEAFAAQSIACERNLGVDPEKVNISGGAIALGHPIGASGARIVVTLLYLLERTGGKKGVASLCIGGGMGIAIAVERL

SEQ ID NO: 92772 - DNA, 1233 bp, Nasonia vitripennis
  CDS (1)..(1233)
atgtcttctctaagtcgagtatctctgcttcaaaagagattttacagttccaaagtaaaattgaacgatgttgttattgttagtgctgcaaggactccaatgggatccttccttggatccctttcatctatgtctgccaccaaactaggagctgtagccatacaggctgcaattgaaagagctggcatcgctaaggagcaagtcaaagaagtttacatgggcaatgtgtgccaagcttaccttggacaagcaccagccaggcaagcaacgttatttgcaggtctgccaaaatctactatatgtacaactgtaaataaggtatgcgcaagtggaatgaagagtgtcatgctagcttcccaagcactacagtgtggacatcaagatattgttcttgctggtggcatggaatctatgtccaatgttccattttacttgaagcgtggagaaactacttatggaggtgtcaaactagaggatggtattgtgtttgatggactaacagatgtatataataagttccacatgggcaactgtgctgaaaatacagccaaaaaactaggaatatctcgtgagcaacaagacgaatttgccatcaatagttacaaacgaagtgctgcagcttatgaacaaaatgcgttcaaggacgagttagtacccgttaatgtaccacaaaagaagggtaaaccagatgtagtattcagtgcagatgaagaatacaagagggtaaactttgagaaatttggaaaattattaacggtattccagagagaaaacggaactgtcacagcaggaaacgcatcgacattgaatgatggatctgctgctcttattctcaccactgcagataatgcacaaaagcttaatcttaaacctttggcaagagttgttggtttccaagatgctgctacggaaccaattgattttccaattgcccctgccttagccattcccactttgttgcaaaatgcaggattgaacaaaaatgacattgctttgtgggaaattaacgaagctttcagtgtcgttgtcgttgccaaccaaaaattactggacattgatccagctaaagtaaatgttcatggaggagctgtttcattaggacatcctattggaatgtctggagcccgaattattgtccatttggtacatgctttgaaagcaggagagaagggagtcgcatctatctgtaacggtggtggtggtgcatcatcgattttaattgaaaagctgtaa

SEQ ID NO: 92773 - protein, 410 aa, Nasonia vitripennis
MSSLSRVSLLQKRFYSSKVKLNDVVIVSAARTPMGSFLGSLSSMSATKLGAVAIQAAIERAGIAKEQVKEVYMGNVCQAYLGQAPARQATLFAGLPKSTICTTVNKVCASGMKSVMLASQALQCGHQDIVLAGGMESMSNVPFYLKRGETTYGGVKLEDGIVFDGLTDVYNKFHMGNCAENTAKKLGISREQQDEFAINSYKRSAAAYEQNAFKDELVPVNVPQKKGKPDVVFSADEEYKRVNFEKFGKLLTVFQRENGTVTAGNASTLNDGSAALILTTADNAQKLNLKPLARVVGFQDAATEPIDFPIAPALAIPTLLQNAGLNKNDIALWEINEAFSVVVVANQKLLDIDPAKVNVHGGAVSLGHPIGMSGARIIVHLVHALKAGEKGVASICNGGGGASSILIEKL

SEQ ID NO: 92774 - DNA, 1197 bp, Anopheles gambiae str. PEST
  CDS (1)..(1197)
atggcagcactgacgaaaggagttttcattgtggcggccaagcgtaccgctttcggcacgttcggcggagtgttcaagaacaccaacgcaacgcagctgcagacggttgcggccaaggcggcgttggatgcggccggccttaagcccgatcaggtcgattccgtcaacattggccaggtgctggtactgtcctcgaccgatggtgccttcctgccgcgtcacgtgtcgctcggctgtggcattccgatcgagcgaccggctctcggcgtgaaccggctgtgcggttccggcttccaggcggtggtgaacggagcgcaggacatcctggtcggtgctgcccacgtttcgcttaccggaggagtcgacaacatgtcccagacaccgtacacgctgcgcaacagtcgtttcggcattccgctcggcactagcccggccctggaggatgctctgtggaccggcctgacggactcgtactgcaagctgccgatggcactgacagccgaaaatctggccgaaaagcacaaggttccgcgcgaaaaggtggacgagtttgcgtaccggtcgcagcagctctggaagaaggcgaacgacgaaggagtgttcaagacggaaatcaccccgttcaaactgaaggtgaagggcaaggaggttgactttgccgtcgatgagcatccgcgcccccagaccacgctcgaggggctgaacaagttgccgtctctgttcaagaagaatggttgcgtcactgccggcaccgcttcgggtatctgtgatggtgccgcgtcggtggtggtcgcttcggaggaagcgctcaagaagtacaacctgaccccgctggcacgactggtggcgtacagcacggtgggtgtaccgccggagattatgggcatcggaccggtgcccgcgatccagaacgtgctgaaggtggccggactgaagatggacgatattgatctgttcgagattaatgaagcgttcggtgtgcagacgctggcctgcgccggcgagctcggactggacatcaacaagctcaacctgaacggtggtgcgatcgcgctcggccatccgctcggtgcgtccggatcgcgcatcactggccacctggtgcatgagctgaaacgcaagaacctcaagcgtgccatcggatcggcctgcattggaggtggacagggtattgcgctgctgctggagtcggtctag

SEQ ID NO: 92775 - protein, 398 aa, Anopheles gambiae str. PEST
MAALTKGVFIVAAKRTAFGTFGGVFKNTNATQLQTVAAKAALDAAGLKPDQVDSVNIGQVLVLSSTDGAFLPRHVSLGCGIPIERPALGVNRLCGSGFQAVVNGAQDILVGAAHVSLTGGVDNMSQTPYTLRNSRFGIPLGTSPALEDALWTGLTDSYCKLPMALTAENLAEKHKVPREKVDEFAYRSQQLWKKANDEGVFKTEITPFKLKVKGKEVDFAVDEHPRPQTTLEGLNKLPSLFKKNGCVTAGTASGICDGAASVVVASEEALKKYNLTPLARLVAYSTVGVPPEIMGIGPVPAIQNVLKVAGLKMDDIDLFEINEAFGVQTLACAGELGLDINKLNLNGGAIALGHPLGASGSRITGHLVHELKRKNLKRAIGSACIGGGQGIALLLESV

SEQ ID NO: 92776 - DNA, 1185 bp, Anopheles gambiae str. PEST
  CDS (1)..(1185)
atgacgtcagcaggagaagttttcatcgtgtcggccgccagaaccccgatcggtaatttcatgggcacactcgcgtcgcttagtgccgccgatcttggtgcggtggccgtgaaagaggtgctgcagcgagccagcgtcgatccggccgatgtgagcgaggtcattctcggccaagccctaacggccggccagggacagaacccggcccgccaggcttccattaaagcgggcgtaccgaaggaagtcccagcgtacaacatcaacatgctgtgcggctccggtctgaaaacggttgccctcggctatcaggcgatccgggccggtgatgctaccgtcgtcgtcgctggcggacaagagtccatgtccaaggcaccgcatgtgatgcatatgcgcagtggcaccaaaatgggcgaggccaagatggtcgattcgatgctgaacgacggcctgacggatgcgttctacgatctgcacatgggcattacggcggaaaatctagccaaagagttcgacattggccgagaggcgcaggatgcattcgccgccaagagccaacagctggctgaagaatctcaacagaaaggatactttaccgaggagatcgtaccggtggaggtggcgggccgcaaggaaacgatcaagtttgcggtggacgagtacccgaagcatggtaccacggcggaagggctggccaagctgcggccgtgcttcattaaggacggtaccgttacgcccggtaacgcgtccggtattaacgattctgccgccgccgttctgctgatgtccggcgaggaggttcaaaagcggaacgccaaaccgatggcaaagatcgttgcctacgcgcaaacgggaatatgcccgaaaacgatgggcgctggcccgatctcggccgtacaggctgtgcttcaaaaagccggctggaagctggaagaggtcgatctgtttgagctgaacgaagcattcgcagcccaggcactggccgtcaacaagggtcttggtgtagacccggccaaggttaacgttggtggaggagccatcgctctcggacatcccattggagcttcgggctgccgagtactggttacgctgctctacgcactcaagcgaacaggcggcaagaagggtgttgcatccttgtgcgttggcggcggtatgggtgtcgccatggcggtggaaatggtgtga

SEQ ID NO: 92777 - protein, 394 aa, Anopheles gambiae str. PEST
MTSAGEVFIVSAARTPIGNFMGTLASLSAADLGAVAVKEVLQRASVDPADVSEVILGQALTAGQGQNPARQASIKAGVPKEVPAYNINMLCGSGLKTVALGYQAIRAGDATVVVAGGQESMSKAPHVMHMRSGTKMGEAKMVDSMLNDGLTDAFYDLHMGITAENLAKEFDIGREAQDAFAAKSQQLAEESQQKGYFTEEIVPVEVAGRKETIKFAVDEYPKHGTTAEGLAKLRPCFIKDGTVTPGNASGINDSAAAVLLMSGEEVQKRNAKPMAKIVAYAQTGICPKTMGAGPISAVQAVLQKAGWKLEEVDLFELNEAFAAQALAVNKGLGVDPAKVNVGGGAIALGHPIGASGCRVLVTLLYALKRTGGKKGVASLCVGGGMGVAMAVEMV

SEQ ID NO: 92778 - DNA, 1302 bp, Magnaporthe grisea 70-15
  CDS (1)..(1302)
atgattccaaagagcagccggtcggtattccacaccacctccactctgtcgtcatcactccgatgcggcacgaggcggcaattcagctcgcgaggtgcattgcaacaagaaatcagggacgcatacataatcagcgcttcaaggacaccgactgcaaagttcaatggctccttcaccaccgtccccgcgcctaagcttggcgccgttgccatcaaatccgctctcgaaaagtcacgagtgcccgtctcgaacatcagcgatgtctacatgggcaacgttctgcagggctccgtcggccagtcccccgctcgacaagccgctatattcgccggcctgccatcatcggtcgaggctatcacgataaacaaagtatgtgcgtcgggtctcaagtcggtcgtgtttgctgcgcaaaatatccagcttgggctggcagaagctcaggtcgccggtggtatggagaacatgtccagggtgccgtactacttgccaaggagcagcggcctgcccgcttttggcaacgtccaactggaggacggcctgatcaaggacggcctcacggatgtttatgatcagttccacatgggaaactgcgccgagaacacggtgaagaagcacggtatcacaagggagatgcaggaccagtacgccattcagtcatatgagcgggcacaggccgcctggaaggccaatgcgttcaaggacgaaattgcgccagtgactgtgtcgtcaagaaaaggtgacaaggtcattgataccgatgaaggatacctcgatatcaagttggacaaggtgccaaccttgaagcctgcttttgttcgtgatggtactggtacagtgacggctgcgaactcgtcgacgctcaacgatggtgcgagcgcccttgttcttggaagcaaagccattgcgcaggagtatggatccggctcccgcgtgctggcaaagatttgcgggtctgcagatgctgccattgatccgatcgacttcccagttgctcctgccgaagcggtgccgattgcactgaagcgagcgggaattacgaaagaccaagtggccgtctgggagttcaacgaggcgtttgccgcggtcattaaggccaatgagaagatacttggccttgagaaggcacgcgtcaaccccctaggcggcgccatctctttgggccatgccctgggaagttccggatctcgcattctggtaactttgctccaccaacttaagcctggcgagtacggcgtagcagccatttgcaacggaggtggagctgccacagccatggttgtgcagaggattgagtccgtatga

SEQ ID NO: 92779 - protein, 433 aa, Magnaporthe grisea 70-15
MIPKSSRSVFHTTSTLSSSLRCGTRRQFSSRGALQQEIRDAYIISASRTPTAKFNGSFTTVPAPKLGAVAIKSALEKSRVPVSNISDVYMGNVLQGSVGQSPARQAAIFAGLPSSVEAITINKVCASGLKSVVFAAQNIQLGLAEAQVAGGMENMSRVPYYLPRSSGLPAFGNVQLEDGLIKDGLTDVYDQFHMGNCAENTVKKHGITREMQDQYAIQSYERAQAAWKANAFKDEIAPVTVSSRKGDKVIDTDEGYLDIKLDKVPTLKPAFVRDGTGTVTAANSSTLNDGASALVLGSKAIAQEYGSGSRVLAKICGSADAAIDPIDFPVAPAEAVPIALKRAGITKDQVAVWEFNEAFAAVIKANEKILGLEKARVNPLGGAISLGHALGSSGSRILVTLLHQLKPGEYGVAAICNGGGAATAMVVQRIESV

SEQ ID NO: 92780 - DNA, 1251 bp, Magnaporthe grisea 70-15
  CDS (1)..(1251)
atggccgttgaacgtcttggctccattctcaaacacctcaccccgggcaatgccctttcaaccatcacatctaaaaacgacgacgacatcgtcattacctatgccgctcgtaccccactaggcaaagcccgcaagggcggcttcaaggacacctcgctcgagtacatggtgtttgcgctcttggaccaagtgcggcaacgcagcaagatcgacccgagcctcgtcgaggacatttgcatgggcaatgtctcagatggcaaggccgcctacaagctccgcgccgccgcccttgccgccggcttccccaacacacactccgcctcgtccgtcaacaggttttgctcgtcgggcctcaaggcgacggccgatatcgcacatgccatcagcaacggcagcatcgaggtcggtattgccctaggtgccgagagcatgtccatcggcggtgacgcgttagatcagccctttgacgaggatgtcacctcgcaaaaccaggagtcgaaggactgcatgatgcccatgggctggacgtcagagaacgtttcgagcgacttcggtatcagccgcgaggaaatggacaagttcgctgccctcagcttccagaaggctgagaaggcacaaaatgccggctggttcgacgacgaaattgttccgatccgcaccaaggtcaagggccctgacggcgaggtcaaggaggtcacgctgacaaaggacgagggcatcaggcccggcacaacagcggagagtctgggaaagatccgcgccgcgttcccgcagtggggaagcacgaccacgggaggaaacgctagccaggtgacggatggtgccgcagcggtgttgctaatgaagcggtcaacggccaacaagcttgggcagcccatcatggccaagtacgtcgggtcgacgacggcaggtctggcgccgcgcatcatgggaattggccccactgtcgccattcccaaactactggccaagcacggcatcacgctggctgactgcgacgttgtcgagatcaatgaggcgtttgccagcatggcggtctactgccgcgacaacctcggtctcgacgccgagaccaagatgaacccacgcggtggtgccatcgcactcggacacccgctcggagcgaccggtacgaggcagatcgttactggtctgagcgagtgcaggcggacgggcaagaagatcttattgaccagcatgtgcatcggcacgggtatgggcatggctgggttgttcgttaatgagcagtag

SEQ ID NO: 92781 - protein, 416 aa, Magnaporthe grisea 70-15
MAVERLGSILKHLTPGNALSTITSKNDDDIVITYAARTPLGKARKGGFKDTSLEYMVFALLDQVRQRSKIDPSLVEDICMGNVSDGKAAYKLRAAALAAGFPNTHSASSVNRFCSSGLKATADIAHAISNGSIEVGIALGAESMSIGGDALDQPFDEDVTSQNQESKDCMMPMGWTSENVSSDFGISREEMDKFAALSFQKAEKAQNAGWFDDEIVPIRTKVKGPDGEVKEVTLTKDEGIRPGTTAESLGKIRAAFPQWGSTTTGGNASQVTDGAAAVLLMKRSTANKLGQPIMAKYVGSTTAGLAPRIMGIGPTVAIPKLLAKHGITLADCDVVEINEAFASMAVYCRDNLGLDAETKMNPRGGAIALGHPLGATGTRQIVTGLSECRRTGKKILLTSMCIGTGMGMAGLFVNEQ

SEQ ID NO: 92782 - DNA, 1251 bp, Gibberella zeae PH-1
  CDS (1)..(1251)
atggctgctgaacgtattggctcaatcatcaagcacttggcccctgggtcagcgcttaacagcatccagtccaagaaccccgacgatatcgtcatcactctcgccgtgcgaacaccgctcacaaaggccaagaagggcggcttcaaggacacatcacttgaatacatggtctatgctattctgaagcaagtccgagaacgatcgaaccttgaccctgcccttgttgaggatatctgcctcggaaacgtctctgatgtcaaggccgcctacaaggtccgcgcctctgctcttgcagctggtttccccaacaccgccggtgcctcttccatcaaccgattctgctcctccggtctcaaggccaccgccgatatcgcccactccatctccaatggctccatcgaagtcggtatcgccatgggtgccgaacagatgtccatcggtggcgacgcgcttgacaagcccttcgacgaggccgttacatcacaaagccaggaggctgtcgactgcatgcagcccatgggttggacaagcgagaacgtgagcaaggactttggcgttacccgtgagatgatggacaagttcgccgccggaagcttccaaaaggctgaggctgcgcaaaaggctggttggttcgcagatgagattgtgcccattaccaccaaggtcaagggccccgatggccaggagaaggaggtcactcttacacaagatgagggtatccgacccggtaccactgctgagagcctctccaagattcgcgctgctttccctcaatggggtggcgccaccaccggcggtaacgccagtcagatcaccgacggagctgccgccgtgttgttgatgaagcgatctactgccattaagctgggtcagcctatcatggctaagtatgttggatctactgttgctggtcttgcccctcgtatcatgggtattggccccagcgtcgccattcccaagctcctcgcccagcacaacatctccatggatgatattgatatcgtcgagatcaacgaggcatttgcttccatggctgtttactgccaggacaagcttggcctcacatcagaaaagcttaacccccgtggaggagctattgctctgggccaccccctgggtgctactggcgccagacagattgtgacaggtttggctgagtgcaggcggcagaagaagaagatgcttctgacaagcatgtgtatcggcacaggccagggcatggctggtctgttcgtgaacgagcaggtctag

SEQ ID NO: 92783 - protein, 416 aa, Gibberella zeae PH-1
MAAERIGSIIKHLAPGSALNSIQSKNPDDIVITLAVRTPLTKAKKGGFKDTSLEYMVYAILKQVRERSNLDPALVEDICLGNVSDVKAAYKVRASALAAGFPNTAGASSINRFCSSGLKATADIAHSISNGSIEVGIAMGAEQMSIGGDALDKPFDEAVTSQSQEAVDCMQPMGWTSENVSKDFGVTREMMDKFAAGSFQKAEAAQKAGWFADEIVPITTKVKGPDGQEKEVTLTQDEGIRPGTTAESLSKIRAAFPQWGGATTGGNASQITDGAAAVLLMKRSTAIKLGQPIMAKYVGSTVAGLAPRIMGIGPSVAIPKLLAQHNISMDDIDIVEINEAFASMAVYCQDKLGLTSEKLNPRGGAIALGHPLGATGARQIVTGLAECRRQKKKMLLTSMCIGTGQGMAGLFVNEQV

SEQ ID NO: 92784 - DNA, 1248 bp, Gibberella zeae PH-1
  CDS (1)..(1248)
atgactgtgacacaacttagatccgctggccggctggcccagcttgctggacatgaacttcaagacgcctatattctgagcgctgcccgaacccctaccgcaaagttcaatggctctttcctatcagtatcagctcccaagcttggcgctgttgcgatcaaggccgccctagaaaagtcaaaggtccccgtcgagaagatcaccgatgtgtatatgggcaacgtccttcagggctctgtcggtcaagcgcctgcccgacaggctgtcatcttcgctggtctacccaaggagatcgaggcaacaacgattaacaaggtctgcgcatctggactaaaggccgttactttggctgcccagaacatccaaatgggtctctccgaggctcagatcgccggtggaatggagaacatgtcccaagtcccatactatgtgtcacgcgccagcggtcttcctgcctttggccacgtcaagatggaggatggtcttattaaggatggtttgaccgacgtctacgaccaattccacatgggcaactgcgccgagaacacagttaagaaccacaacattacccgagagcagcaagatgagtacgccattcagtcataccgcaacgcacaaaaagcctgggaggacaaggcatttgccgacgagattgcgcctgtcactgtcaagtcacgcaagggagagactgttatcgacaccgacgagggcttcaaggatgtcaagttcgacaagatcccctcgcttaagcccgctttcgttcgcgatggaagcggcacggtcacagccgccaactcctcaactcttaacgacggtgccagtgctcttgtcctaggaagcaaggccattgcccagcagtacggttcaggctcccgagtcttggccaagatctgcggttacgctgatgctgctaccgcacccattgacttccctgtcgctcccgccaaggctgtccccatcgccctcgagcgtgctggcattaccaaggaccaggttgctatttgggagttcaacgaggcttttgccagcgttatcttggccaactccaagattctgggtcttgagggtgccaaggtcaaccctctgggaggtgccatctcactaggtcatgctctgggtagctctggctcgcgaatccttactacccttcttcaccagcttaagcctggtgagtatggtgttgctgctatttgcaacggtggtggcgctgcgactgcccttgttgtgcagcgtgttgagtccgtataa

SEQ ID NO: 92785 - protein, 415 aa, Gibberella zeae PH-1
MTVTQLRSAGRLAQLAGHELQDAYILSAARTPTAKFNGSFLSVSAPKLGAVAIKAALEKSKVPVEKITDVYMGNVLQGSVGQAPARQAVIFAGLPKEIEATTINKVCASGLKAVTLAAQNIQMGLSEAQIAGGMENMSQVPYYVSRASGLPAFGHVKMEDGLIKDGLTDVYDQFHMGNCAENTVKNHNITREQQDEYAIQSYRNAQKAWEDKAFADEIAPVTVKSRKGETVIDTDEGFKDVKFDKIPSLKPAFVRDGSGTVTAANSSTLNDGASALVLGSKAIAQQYGSGSRVLAKICGYADAATAPIDFPVAPAKAVPIALERAGITKDQVAIWEFNEAFASVILANSKILGLEGAKVNPLGGAISLGHALGSSGSRILTTLLHQLKPGEYGVAAICNGGGAATALVVQRVESV

SEQ ID NO: 92786 - DNA, 1191 bp, Gibberella zeae PH-1
  CDS (1)..(1191)
atggccaaccttccccccgtctacatcgtctctactgcccgtacccccatcggctctttccttggctctctgtcaagccagaccgctgttcaactgggttcagtcgccatcaagggagccgtcgagcgtgccggtatcaagcctgaggatgtcgatgaggttttctttggcaatgttctctccgctggtgttggtcaaggccctgcccgccagtgtgcccttggcgctggtctccctcaaaccgtcatcgccacaaccgtgaacaaggtctgcgcttcttcgctcaaggccatcatccttggtgcccagaacatcatgctcggcacctccgatatcgttgttgctggtggaaccgagtccatgtccaacactcctcactacctccccaacctccgaaacggtgccaagtacggcgaccagaccctcgtcgacggtgtcctcaaggacggtctgaccgactccttcaagaaggaccacatgggtatctctgctgagctctgtgtcgatgaccacgacctcacccgtgaggctcaggacgagtacgccatcaactcttacaagaaggcccaggctgctactgaggctggtctcttcactgagattgtccctgtcgagatccctggtggccgtggcaagcccgccatcaaggtcgagcgtgacgacgaggtcaagaacctgaacgttgacaagctcaaggccatgcgccctgctttcaagcctgacggtaccgtcactgctcccaacgctgcccccatcaacgatggtgccgccgccgttgtcctcgtttctgaggccaagctcaaggagctcaaccttaagcccgttgccaagattcttggttggggtgatgctgagcgtgagcctgagcgtttcactatcgctcctgctctggctattcccaaggctatcaagcacgccggcttgaccgccgagcaggttgagtactacgagatcaacgaggccttctctgccgttgccctcgccaacatgaagatcctcggccttaaccctgaccaggttaacgtctacggtggttccgttgccattggccaccctctcggctgctctggtgctcgtattgtcaccacccttacctccgtacttaaggagaggaaggccaagatcggtgccgttggtatctgcaacggtggcggtggtgcttccgctatggtcattgagaacctgcaataa

SEQ ID NO: 92787 - protein, 396 aa, Gibberella zeae PH-1
MANLPPVYIVSTARTPIGSFLGSLSSQTAVQLGSVAIKGAVERAGIKPEDVDEVFFGNVLSAGVGQGPARQCALGAGLPQTVIATTVNKVCASSLKAIILGAQNIMLGTSDIVVAGGTESMSNTPHYLPNLRNGAKYGDQTLVDGVLKDGLTDSFKKDHMGISAELCVDDHDLTREAQDEYAINSYKKAQAATEAGLFTEIVPVEIPGGRGKPAIKVERDDEVKNLNVDKLKAMRPAFKPDGTVTAPNAAPINDGAAAVVLVSEAKLKELNLKPVAKILGWGDAEREPERFTIAPALAIPKAIKHAGLTAEQVEYYEINEAFSAVALANMKILGLNPDQVNVYGGSVAIGHPLGCSGARIVTTLTSVLKERKAKIGAVGICNGGGGASAMVIENLQ

SEQ ID NO: 92788 - DNA, 1143 bp, Gibberella zeae PH-1
  CDS (1)..(1143)
atgggcgtcaccgaccgcattattcagattggaggccagatctctggcaacccgaccgctggcggtcgcgagaagatcctccagaagaaccctgatgatatcgttgtcaccgccgcctgccgaagcgcattcaccaagggtggccgtggtggtttcaaggacacccacgctgctgacttgatggccggagtcctcaaggctatcctcgaccgttcaaagatcaaccccgcgctcgtcgaggacctatgtgtcggcactgtgcttgcccccggtggtggtgcgactgagatgcgagctgccagcttggtcgccggcttccccgagtccatcgccgtccgaaccctcaaccgacagtgctcttctggtctccaggccaccgtcgatgtcgccaaccagatcaagactggcatgatcgatatcggtattggtgctggtgttgagagcatgtccatcaactacggtcccggtgctgtcgacactttcgccgcctcatcataccagaaggccctcaaggcccaaaaagagggtctctttgacgaggagattgctcccctcaaggtcaagttcgaggacaaggagggtaacaccaaggaaatcaccgtctccaaggatgacggtgtccgagagggcatcaccgtcgagtccctcggcaagatccgccctgcctttgccaaggatggatccatccacgctggtaacgccagtcagatctctgatggtgccgctgctgttcttctcatgaagcgatctaccgctgagaagctcggacaaaagatcatcggcaagtacgtctgcgcttcaattgtcggtgtcaagcccctccttatgggtcagggtccctggaaggctatccccaaggctctcgacctcgctggtatctccaaggatgatgtcgacatctgggagatcaacgaggcttttgccagccagtgcttgtggtgcgccaatgagctgggtattcctcaagagaagatcaaccccaagggaggtgccattgcctttggtcaccctctgggttgcaccggtgcccgacaagtctctaccctactatatgagctgaagagaactggccagaaggtcggcgcgacatctatgtgtgtaggaactggtatgggtatggctgccatctgggtggccgagtaa

SEQ ID NO: 92789 - protein, 380 aa, Gibberella zeae PH-1
MGVTDRIIQIGGQISGNPTAGGREKILQKNPDDIVVTAACRSAFTKGGRGGFKDTHAADLMAGVLKAILDRSKINPALVEDLCVGTVLAPGGGATEMRAASLVAGFPESIAVRTLNRQCSSGLQATVDVANQIKTGMIDIGIGAGVESMSINYGPGAVDTFAASSYQKALKAQKEGLFDEEIAPLKVKFEDKEGNTKEITVSKDDGVREGITVESLGKIRPAFAKDGSIHAGNASQISDGAAAVLLMKRSTAEKLGQKIIGKYVCASIVGVKPLLMGQGPWKAIPKALDLAGISKDDVDIWEINEAFASQCLWCANELGIPQEKINPKGGAIAFGHPLGCTGARQVSTLLYELKRTGQKVGATSMCVGTGMGMAAIWVAE

SEQ ID NO: 92790 - DNA, 1200 bp, Apis mellifera
  CDS (1)..(1200)
atgtctcttgtaacaaaaggaatatttattgtagctgcaaagcgtactccatttggttcatttggtggtaaatttatgaacaaaaatgcaactgatttatcagtaattgctgctaaatctgctttgcaatctgcaaagttaaatcctgaaaaagtagataatgttatttttggacatgtattaccaatatcatcaagtgatggaggttttttaacacgtcatgttgcattaaaatctggtataccattagaaaaaccatcattttcattaaatagattatgtggttctggatttcaatcaattgtcagtggtgcacagagtattttattaggagaatctaagatagttttaacaggaggagtagaaaacatgagtcaagttccatttagtgtaagaaatattcgatttggtacaagtttaggacaaaaatatcagtttgaggatagtttatggcttggattttcagatacttattgcaatttaagtatgggtgaaactgcagaaaaacttggatcacaatataatttaaaaagacaagaagtagatgaatttgctttaagaagtcaacaattatggaaagctgctaatgatgctggtcgttttaatgaagagattgcacctgttacaataactgtgaaaaagcaagatattgttgttaatacagatgaacatccacggcctcaaacgactcttcaaaatttaagtaaattaccttctatttttaagaaagatggtttagttacagcaggatcttcatctggtatttctgatggtgcaggagttattattttagcgagtgaagaagttattaaaacagaacaacttacaccactggcacgtttggtgggatatagtgttgtaggtgtagaacctagtattatgggaattggtccagttccagctatacaaaaacttcttaaaattacaaataaaactttaaatgatattgaacttatcgagattaatgaagcatttggaagtcaaacattggcatgtgttaaagagttgaaattggatattaataaattaaacgtggatggtggatctattgctcttggacatccattggctgcatctggtagtagaattactgcacatttagtacatgaattaagaagaagaaaaactggaagcttaggaattggttctgcttgcattggtggaggtcaaggaatagctttgatgatagaagcactttaa

SEQ ID NO: 92791 - protein, 399 aa, Apis mellifera
MSLVTKGIFIVAAKRTPFGSFGGKFMNKNATDLSVIAAKSALQSAKLNPEKVDNVIFGHVLPISSSDGGFLTRHVALKSGIPLEKPSFSLNRLCGSGFQSIVSGAQSILLGESKIVLTGGVENMSQVPFSVRNIRFGTSLGQKYQFEDSLWLGFSDTYCNLSMGETAEKLGSQYNLKRQEVDEFALRSQQLWKAANDAGRFNEEIAPVTITVKKQDIVVNTDEHPRPQTTLQNLSKLPSIFKKDGLVTAGSSSGISDGAGVIILASEEVIKTEQLTPLARLVGYSVVGVEPSIMGIGPVPAIQKLLKITNKTLNDIELIEINEAFGSQTLACVKELKLDINKLNVDGGSIALGHPLAASGSRITAHLVHELRRRKTGSLGIGSACIGGGQGIALMIEAL

SEQ ID NO: 92792 - DNA, 1230 bp, Candida glabrata CBS 138
  CDS (1)..(1230)
atggctgagaggttaaagaacattggaagtcacttgcttggtggcagtcagggtcctagtgtcaaggagcaacatccggacgatgttgttattgttgctgctaacaggtctgctattgcgaaggggtttaaaggtagtttcaaggacgtcaacactgactatctgctcactgtgtttttgaaagagttcatcgacacgttccctccacagttgagggacaacttggacttgattggggaagttacatgtggtaatgtgttgaatcctggtgctggtgcgactgaacatagaggtgctatgttggcagcaggtctgccttacaccacgcccttcatggctttgaacagacagtgctcctcgggtcttactgctgtgaacgatattgcaaacaagatcaaggctggccagattgatgtcggtctcgccgctggtgtcgagtcgatgacccagaactacgcttcttctaacccactgggccgtatctctgacgagttgaagtccgacaagaacgcacgtaagtgtctaatccctatgggtatcactaacgaaaatatagccaaggggtttgagatcactagggaaatgcaggacgagttcgctgcagcttcttaccaaaaggcctccaacgccgttcagtccggtgtcttcaaggatgaaatcttgcccatcactctaccagacggcaaagttgtagacgtcgatgagggtcctagagcaaatgtcactgccaaatcattaggcggactaaagccagctttcatcaaagaaaccggtaccactactgctggtaatgcctctcaagtgtcagatggtgttgctggtgttctattggcgcgtagatcggtggctaacaaactaaaactaccaattctaggtcgctatgttgcattccaatctgtaggtgtgccacctgagatcatgggtgtcggcccggcctacgccatcccaagagtactacaagatgttggaattactgttgatgatgttgatgttttcgaaattaacgaagcatttgcagcccaggcactatactgtataaacaagttgggaatcaacttgaagaaagttaatcctcgtggtggtgcaattgcattgggtcatccactaggttgcacaggtgccagacaaattgccacaatactacgtgaactagaaaagggacaagtcggtgttgtaagcatgtgtattggtacaggtatgggtgccgcagcggtctttgtcaaggaatga

SEQ ID NO: 92793 - protein, 409 aa, Candida glabrata CBS 138
MAERLKNIGSHLLGGSQGPSVKEQHPDDVVIVAANRSAIAKGFKGSFKDVNTDYLLTVFLKEFIDTFPPQLRDNLDLIGEVTCGNVLNPGAGATEHRGAMLAAGLPYTTPFMALNRQCSSGLTAVNDIANKIKAGQIDVGLAAGVESMTQNYASSNPLGRISDELKSDKNARKCLIPMGITNENIAKGFEITREMQDEFAAASYQKASNAVQSGVFKDEILPITLPDGKVVDVDEGPRANVTAKSLGGLKPAFIKETGTTTAGNASQVSDGVAGVLLARRSVANKLKLPILGRYVAFQSVGVPPEIMGVGPAYAIPRVLQDVGITVDDVDVFEINEAFAAQALYCINKLGINLKKVNPRGGAIALGHPLGCTGARQIATILRELEKGQVGVVSMCIGTGMGAAAVFVKE

SEQ ID NO: 92794 - DNA, 1197 bp, Candida glabrata CBS 138
  CDS (1)..(1197)
atgagtgatactgtctacattgtttctgctgccagaaccccaattggttctttccaaggtgcgttggcctccaagactgctgttgacctaggtgtcattgcagttaagggtgctatgcagaaagtgccacaattgaaccctgaatccgactacgacgaagtgttctttggtaatgttatatctgctaacttgggtcaaaatgccgccagacaagttgccctaggtgctggtttgaagaacggcattgttgccacctcagttaacaaagtgtgtgcttccgctatgaagagtataatccttggtgcccaagccatcaagtgtggtactgcagatgttgttatcgctggtggttgtgaatctatgaccaacgccccatactacatgcctgccgctcgtgctggtgccagattcggtgaaaccaagatggtggatggtattcaaagagacggtctgaacgatgcttacgaccaccaaccaatgggtgtccacgctgagaagtgtgcccgcaactgggaaatcacccgtgaacaacaagatgactttgccattgcctcttaccaaaaggctcaaaaggcccaacaagaaggtaagttcgacaacgaaatcgttccagttaccatcaagggtttcagaggtaagccagacacccaagtcacaaaggatgaagaaccaactaagctaaatgttgacaagttgagatccgctagaactgtattccaaaaggaaaatggtactgtcactgcaccaaatgcttctccaatcaacgatggtgctgctgctgtcatcttagtctctgaaaagaagttgaaggaactaaacctaacaccattggccactttgaagggttggggtgaagctgcccacgatccagctgacttcacatgggctccatccttggccattccaaaggccctaaagcatgctggtgttgctgatatcagccaagtcgattacattgaactaaacgaagctttctccgttgttggctgtgccaacactaagatcttgaaggttgatccagccaaggtcaatgtctatggtggtgctgttgccattggccatcctctaggttgttctggtgctagagtcgttgtcacattgctatctgtgttacaacaggaaggtggtaagattggtgttgctggtatctgtaacggtggtggtggtgcttcctctgttgttatcgaaagggtctag

SEQ ID NO: 92795 - protein, 398 aa, Candida glabrata CBS 138
MSDTVYIVSAARTPIGSFQGALASKTAVDLGVIAVKGAMQKVPQLNPESDYDEVFFGNVISANLGQNAARQVALGAGLKNGIVATSVNKVCASAMKSIILGAQAIKCGTADVVIAGGCESMTNAPYYMPAARAGARFGETKMVDGIQRDGLNDAYDHQPMGVHAEKCARNWEITREQQDDFAIASYQKAQKAQQEGKFDNEIVPVTIKGFRGKPDTQVTKDEEPTKLNVDKLRSARTVFQKENGTVTAPNASPINDGAAAVILVSEKKLKELNLTPLATLKGWGEAAHDPADFTWAPSLAIPKALKHAGVADISQVDYIELNEAFSVVGCANTKILKVDPAKVNVYGGAVAIGHPLGCSGARVVVTLLSVLQQEGGKIGVAGICNGGGGASSVVIERV

SEQ ID NO: 92796 - DNA, 1197 bp, Kluyveromyces lactis NRRL Y-1140
  CDS (1)..(1197)
atgtctgataacgtatacattgttgctgctgcaagaactccaattggttctttccaaggttctttgtcctctaagaactgtgtcgatctaggttctgctgctgtcaaaggtgctttagctcaagttccagagatcgatccaagcactgtcgaggaaatcatcttcggtaacgttatatctgctaatgttggtcaagcaccagctagacaagtggcattagctgctgggttgggaaaacacattgtcgccagtactgttaacaaggtttgtgcttctggtatgaaagctatcatcttgggtgctcaggccattaagaccggttctgccgatattattgttgctggtggtgctgaatcaatgtccaatgccccatactacttgtcgtctcaccgtagtggtgctagatttggtgaaagcaaagtcattgatggtattcaaagagatggtttgaacgatgcttacgacggtcaggccatgggtgttcatgctgagaaatgtgccagtgactacgatttcagcagagaagaacaagacgattttgccattcaatcttaccaaaaggcccaattggctcaatctcaaggtaagttcgacaaggagatcgttcctatcactatcaaaggtttcagagggaaaccggatacccaggtgacgaaagatgaagaaccaagtaagttgaacgttgaaaaattgagatctgctagagctgtgtttgccgcaaatggtaaaggtactgtcacagcaccaaacgcttctccaattaacgatggtggtgctgccgtgatcttggtttctgaaaagaaattgaaggaactaaacttgaaaccattggctttgatcaagggttggggtgaagctgctcatgaaccggctgatttcacttgggcaccatccttggctgttccaaaagctttgaaacatgccggcgtcccagatatttcctctgttgatttcgtagaattgaacgaagccttctcagttgttggtttggtcaacaccaagaaattgggcattgatgcagctaaggttaacgtttatggtggtgccgttgctctaggtcatccattgggttgctctggtgctagagtcgttgtcaccttggctaacattctaaaccaagaaaacggtaagattggtgtcgccggtatctgtaacggtggtggtggtgcttcttccatcgttctagaaagagtttaa

SEQ ID NO: 92797 - protein, 398 aa, Kluyveromyces lactis NRRL Y-1140
MSDNVYIVAAARTPIGSFQGSLSSKNCVDLGSAAVKGALAQVPEIDPSTVEEIIFGNVISANVGQAPARQVALAAGLGKHIVASTVNKVCASGMKAIILGAQAIKTGSADIIVAGGAESMSNAPYYLSSHRSGARFGESKVIDGIQRDGLNDAYDGQAMGVHAEKCASDYDFSREEQDDFAIQSYQKAQLAQSQGKFDKEIVPITIKGFRGKPDTQVTKDEEPSKLNVEKLRSARAVFAANGKGTVTAPNASPINDGGAAVILVSEKKLKELNLKPLALIKGWGEAAHEPADFTWAPSLAVPKALKHAGVPDISSVDFVELNEAFSVVGLVNTKKLGIDAAKVNVYGGAVALGHPLGCSGARVVVTLANILNQENGKIGVAGICNGGGGASSIVLERV

SEQ ID NO: 92798 - DNA, 1215 bp, Kluyveromyces lactis NRRL Y-1140
  CDS (1)..(1215)
atggctagcagacttcaacaattagagaaacatttgacaggacgcagttctgaaaaggatataaagagtaagaatccggacgatgtggttgttgtagctgcgtatcgttcagctattggtaaagggttcaaaggaggattcaaagatgttaacacggattatttacttacacagtttctgaaggaattttttgagaaagttgacattgataagagtgtcattgaagaaattgcgtgtggtaatgtgttgaatcccggtgcaggtgcgacagaacatagagctgcgatgttagctgctggtttgccatatcaaactccgttagtggctattaacagacagtgttcctcagggttaactgccgttaacgacgttgcaaataagatcatttctgggcagatcaatgtagggttggctatcggggtggaatctatgtctaagaactatggtccgaaggctcttgggtctatatcaaatgagttgaaatcgaacacggctgctgctaagtgtatgataccaatgggatttactaatgaaaacgttgctaagaagttccaaatttcaagagaagaccaggacaaatttgccctggagtcattctataaagcggaaagggctgtctcacagggattgtttaaagatgaaatcatccctattgaactaccagacggatctataattgcgcaggacgaaggtcctagaaagggcgtcactttcgaatcgttacaaaagattaaacctgcatttgtgaaggaaacaggtgtgacaactgccggtaacgcttctcagatatcagatggtgttgctggtgtgttgctaatgagaagatccatggccatgaaattgggtttggaaatcgttggtaagtacgttgcgttccaggcagtaggtgttccacctgagatcatgggtgttggcccagcatatgcgattccaagagtcctcaaagactgtggtttaaatgtcaacgatgttgatgtttacgagattaatgaggcctttgcagggcaggccattttctgtgtcaaccatctaaaaatcgacaagaagaaattgaacccaaggggaggcgcgattgccttaggtcatcctttgggctgcactggtgccagacaagtcgctaccatattaagggaattagacgctggtcaaattggtgttgttagcatgtgtatcggtactggtatgggagctgctgcagtcttcgtcaaggagtga

SEQ ID NO: 92799 - protein, 404 aa, Kluyveromyces lactis NRRL Y-1140
MASRLQQLEKHLTGRSSEKDIKSKNPDDVVVVAAYRSAIGKGFKGGFKDVNTDYLLTQFLKEFFEKVDIDKSVIEEIACGNVLNPGAGATEHRAAMLAAGLPYQTPLVAINRQCSSGLTAVNDVANKIISGQINVGLAIGVESMSKNYGPKALGSISNELKSNTAAAKCMIPMGFTNENVAKKFQISREDQDKFALESFYKAERAVSQGLFKDEIIPIELPDGSIIAQDEGPRKGVTFESLQKIKPAFVKETGVTTAGNASQISDGVAGVLLMRRSMAMKLGLEIVGKYVAFQAVGVPPEIMGVGPAYAIPRVLKDCGLNVNDVDVYEINEAFAGQAIFCVNHLKIDKKKLNPRGGAIALGHPLGCTGARQVATILRELDAGQIGVVSMCIGTGMGAAAVFVKE

SEQ ID NO: 92800 - DNA, 1239 bp, Debaryomyces hansenii CBS767
  CDS (1)..(1239)
atggatagattaaatcaagttttagggcatttatctccatctgcaactaatcacataacttcgaaaaaccccgatgatgtggtgattgttgcatcttatcgtacagcaattggaaaagggtttaaaggaagcttcaaggatgttgggagtgactatattttattgaagtttctagaagcattccttgccaaaacccaggttaatcctaatttaattgaggatattgcttgcgctaatgtactcaaggttcgttccggtatctgtgaacatagagctgccgccataagcgctggtattccatacaccacccccattatagccataaatagacagtgtgggtctggattggtagctataggtgatatagcaaataaaataatatcgggagaaattgattgcggtctagctgttggtgtggaatcgatgactaaagactttggattgggtcaatcagttgtgtcaaaagctctcgaggatcacccagaaatgataaaatctaagattcctatggggatcaccaacgagaatattgctatcaagtacaatatctcacgcaaacaacaggatgaatttgcagctaaatctttccagaaggctgaaaaagcattggcttcaggtgtctttgctgatgaaatattgcctgttgaatcattaattgaagaaaaggatggccaaggtaatgtttcttttaaaaaaattatagttgataaagacgaaggtgttcgtaagggagtcactgcagaatccttgggcaaattacgcccatcatttaagaaggatggcctgacccatgctggtaactcttctcaagtaagtgatggagcagcaggtgttttacttatgagacgttcttttgctgaagaaaatggatttaaaattgaaggtaagtttgttagatgtgtttctgttggtgttcctccagaaatcatgggggttggtccagcaatggctattcctcatattctcaagaaaactaacttagtagtggatgatattgcagcctttgaaatcaatgaagcttttgctacacaatgtttgtactcaattaaagcctgcaatataccagaagagaaagtgaacatcaatgggggggctattgccttgggccatccagtgggtgtaactggggctagacaatatgctacaatcttaagattattgaagccaggtgatattggtttaacctcaatgtgtattggttcaggtatgggctctgctagtatagtagttaaagaataa

SEQ ID NO: 92801 - protein, 412 aa, Debaryomyces hansenii CBS767
MDRLNQVLGHLSPSATNHITSKNPDDVVIVASYRTAIGKGFKGSFKDVGSDYILLKFLEAFLAKTQVNPNLIEDIACANVLKVRSGICEHRAAAISAGIPYTTPIIAINRQCGSGLVAIGDIANKIISGEIDCGLAVGVESMTKDFGLGQSVVSKALEDHPEMIKSKIPMGITNENIAIKYNISRKQQDEFAAKSFQKAEKALASGVFADEILPVESLIEEKDGQGNVSFKKIIVDKDEGVRKGVTAESLGKLRPSFKKDGLTHAGNSSQVSDGAAGVLLMRRSFAEENGFKIEGKFVRCVSVGVPPEIMGVGPAMAIPHILKKTNLVVDDIAAFEINEAFATQCLYSIKACNIPEEKVNINGGAIALGHPVGVTGARQYATILRLLKPGDIGLTSMCIGSGMGSASIVVKE

SEQ ID NO: 92802 - DNA, 1212 bp, Debaryomyces hansenii CBS767
  CDS (1)..(1212)
atgtcagctgctagtttattaaaaaagaaggggtcagatatcgttgtcttatcagccttaagatcacctgttacaagatgtgttaaaggcggaaatgctaaaatgtacccagaagagttgttatatcagatcttgaaaggctctgtcgatagatgtaatattaacccagaattgattgatgatatcttaattggtacggtcttgcaaactttaggtggacagaaagcgtcggctcttgcagtgaaatctgcaggtttcccaatcaagactaccgtaaatacggttaatcgtcaatgtgcttcttctgctcaggctttatcatacagtgcaggctcaattttgactggtgaaaatcagtttgcaattgcagccggtgtcgaatcaatgacgcatgattatttccctcacagaggtatcccaacaaggatttatcaaccattcaaagatgaggcaagctcagaagctcaaaatgtgttgatgcctatgggtattaccagtgaaaacgttgctaaaaaatttggtatttcaagggaagaccaggatgcctttgctcttcaatcacacttaaaggcaaataaggccactgaatctggtcatttcttaaacgagattatacctattaaagctagaactaataacgaagatgaacctttaaacatagtagaagtctcgaaagatgatggggttcgcggaggttctactttagaaaaattagcatctttaaagccagtttttgcggaagacggtactaccacagctggtaattcatctcaaatctccgatggagcatctgctgtcattattaccacaagggacaacgcagaaaagattggagttaaaccaattgcaagatttgttggctcgtccgttgctggtgttccatctgatttaatggggattggtccttctgcagcagttcctcaattattaaacagattgaaggtagatatcaacgatatcgatattttcgaattaaatgaagcattcgcctctcaatctctttattgtattaacaaattgggtattaatcacgataaagttaacccatatggtggtgctattgcaattggtcatccattaggagctactgggggaagagttatttcaactttattgaatggcttaagagcgcagaataaagaattaggggtaatttccatgtgcacctcaaccggtcaaggttatgccgccttgttcgctaatgaagcttaa

SEQ ID NO: 92803 - protein, 403 aa, Debaryomyces hansenii CBS767
MSAASLLKKKGSDIVVLSALRSPVTRCVKGGNAKMYPEELLYQILKGSVDRCNINPELIDDILIGTVLQTLGGQKASALAVKSAGFPIKTTVNTVNRQCASSAQALSYSAGSILTGENQFAIAAGVESMTHDYFPHRGIPTRIYQPFKDEASSEAQNVLMPMGITSENVAKKFGISREDQDAFALQSHLKANKATESGHFLNEIIPIKARTNNEDEPLNIVEVSKDDGVRGGSTLEKLASLKPVFAEDGTTTAGNSSQISDGASAVIITTRDNAEKIGVKPIARFVGSSVAGVPSDLMGIGPSAAVPQLLNRLKVDINDIDIFELNEAFASQSLYCINKLGINHDKVNPYGGAIAIGHPLGATGGRVISTLLNGLRAQNKELGVISMCTSTGQGYAALFANEA

SEQ ID NO: 92804 - DNA, 1206 bp, Debaryomyces hansenii CBS767
  CDS (1)..(1206)
atgtcttcagtctatatcgtttctactgctcgtactccaatcggtgcatttcaagggggattatcatcgttaacatattcagatttaggatcacatgctgttcatgccgctttgaagaaggttccacaaattaaggcagaagatgttgaagaaatcatatttggtggtgtcttacaagctaacgttggtcaagctccagctaggcaagttgctttaaaagctgggttaccagaatcgattgtggccaccacggttaataaggtttgtgcctcgggtatgaagtcgattattttgggagcgcaaactattttgaccggtactgcggatatcgttgtcgctggtggtgctgaatctatgtcgaacacaccatactacgtgccatctgctagaggtggtgccagatacggtgacgcggttatggttgatggggttcaaaaggacgggttgttggatgtgtatgaaaacaagttgatgggtgttgctgctgaaaaatgtgccaaggaccatagcttcaccagagacgaccaagacaacttcgctatcggttcatacaccaaggctgcggacgcacaaaatgccggtaagttcgataacgaaatcgcacctgttaccatcccaggtaagagaggcaagccagatgtggttgtcgctaacgacgaagaaattaagaacttcgacgaacctagattgagatctgctagagctgtcttccaaaaggaaaatggtaccgttactgctccaaatgcatcttcgttgaacgacggtggtgctgctgttatcttggtctctgaaaagaaattgaaggaattgaacttgaagcctttggctaaaatttctggttggggtgaagccgccagagctccaattgatttcacaattgctccatccttggcaattccaaaggctttgaaacacgccaacctctccatggacgatattgacttctttgaattaaacgaagccttttcagtcgttggtttagctaacgctaagatctgtaacattccatctaagaaattgaatgtttacggtggtgctgtcgccttaggtcacccattaggttgttctggtgccagaattgttgtcaccttattatcagtcttggctcaagaaggtggtaaaattggtgtcgccggtgtctgtaatggtggtggtggtgcatcttctatcattattgaaagatttgaccatgactccaaattataa

SEQ ID NO: 92805 - protein, 401 aa, Debaryomyces hansenii CBS767
MSSVYIVSTARTPIGAFQGGLSSLTYSDLGSHAVHAALKKVPQIKAEDVEEIIFGGVLQANVGQAPARQVALKAGLPESIVATTVNKVCASGMKSIILGAQTILTGTADIVVAGGAESMSNTPYYVPSARGGARYGDAVMVDGVQKDGLLDVYENKLMGVAAEKCAKDHSFTRDDQDNFAIGSYTKAADAQNAGKFDNEIAPVTIPGKRGKPDVVVANDEEIKNFDEPRLRSARAVFQKENGTVTAPNASSLNDGGAAVILVSEKKLKELNLKPLAKISGWGEAARAPIDFTIAPSLAIPKALKHANLSMDDIDFFELNEAFSVVGLANAKICNIPSKKLNVYGGAVALGHPLGCSGARIVVTLLSVLAQEGGKIGVAGVCNGGGGASSIIIERFDHDSKL

SEQ ID NO: 92806 - DNA, 1179 bp, Yarrowia lipolytica CLIB122
  CDS (1)..(1179)
atggagcccgtctacattgtttctactgctcgaacccccattggttcttttctgagctcgctgagcggccagacctacgtggatctgggagcccatgccgtgaaggccgcactcgccaagaccgacatcaagcccgaccaggtcgacgagatcatcttcggtaacgttctctccgccggcgtcggacaggcccctgctcgacaggttgccctcaaggctggtctccctgacaccattgtcgctaccaccgtcaacaaggtctgtgcctccggtatgaaggccatcatccagggtgcccaggccatcatgaccggatctgccgacattgtcattgctggcggtgccgagtccatgtccaacgtgccccactacgtgcaggcccgtgtcgctaacaagtacggcaacggctctctggtcgacggtatccagcgagacggtctgtttgacgcctacgatggccaggccatgggtgtggccgctgaggtctgtgctgacacccactccatctcccgagaggagcaggacgagtttgccattggctcttacaagaagacccaggctgcctatgccgccggcaagtttaaggacgagattgcccccattgagctgcccggcttccgaggcaagcctggtgtcgttgtctccgaggacgaggagtacaagaacctcaacgaggacaagctcaagtctgcccgaactgtttttaagaaggacggtaccgtgactgcccccaacgcctcccctatcaacgacggtggagctgccgtcattctggcctctgctgccaaggtcaaggagcttggtcttaagcccctgctcaagattgtctcttggggcgaggctgccaacgagcccgtcaagttcaccactgctcccgctctggccgtccccgttgccctcaagcgagctggtctcgaggccaaggacattgacttttacgagttcaacgaggccttctctgttgttggtatcgccaacaccaagctgcttggtctggactccagcaaggtcaacgtctacggaggtgctgttgccattggtcaccctctgggctgctctggtgcccgagtcattgtcactctcaactctgttctgcaccaggaaggcggcaagtacggatgtgctgccatctgcaacggtggtggtggcgcttcctctatcattgttgagaagtgttag

SEQ ID NO: 92807 - protein, 392 aa, Yarrowia lipolytica CLIB122
MEPVYIVSTARTPIGSFLSSLSGQTYVDLGAHAVKAALAKTDIKPDQVDEIIFGNVLSAGVGQAPARQVALKAGLPDTIVATTVNKVCASGMKAIIQGAQAIMTGSADIVIAGGAESMSNVPHYVQARVANKYGNGSLVDGIQRDGLFDAYDGQAMGVAAEVCADTHSISREEQDEFAIGSYKKTQAAYAAGKFKDEIAPIELPGFRGKPGVVVSEDEEYKNLNEDKLKSARTVFKKDGTVTAPNASPINDGGAAVILASAAKVKELGLKPLLKIVSWGEAANEPVKFTTAPALAVPVALKRAGLEAKDIDFYEFNEAFSVVGIANTKLLGLDSSKVNVYGGAVAIGHPLGCSGARVIVTLNSVLHQEGGKYGCAAICNGGGGASSIIVEKC

SEQ ID NO: 92808 - DNA, 1401 bp, Apis mellifera
  CDS (1)..(1401)
atgttttttcttgtcaaaaataaatttttaatgaaaggaggatttcctaaatatggttctataataaaatatttaaaaacaaataataaattatatgcaactaaaagtaatgttactaaaaatattgtatttattgatggtgtaagaacaccatttttacattctggaacaagttacaaaaacttgatggcatatgaccttgccagacattcattagtggctttacaaaagaaaattaaatttcctaaagaaattgttgaatatattgtttatggtacagtaattcaagaagtaaaaacttcaaatattgctagagaagcagctttaacagcaggatatagtgatcgtattcctgcacatacagtaactatggcatgcatcagtagtaatcaagctcttacaactggtatgggtttgatagcatgtggtgtatacgatgtaatcatagcaggaggagtggaatttttatcagatataccaattagacatagcagacatatgagaacattgatgttacaagctaataaagcaaaaacaattggagaaaagctaacactttttactagtatcagagcagcacattttgtaccagatttacctgcagtagcagaattttctagtaatgaaacaatgggacatagtagtgatagattagcagctgcatttggaatatcaagaaaagaacaagatgaatatgctttacgttcacatactttagctgctaaagcacaacaacaaggatacctgacagatatagttccctataaaattccaaatgtaaatgaggtaataaacaaagacaatggtattcaagtttcaacaaaagaaaaattagcaaaattgaaaccagcatttgttaaaccatatggaacagttactgctgctaattcttcttttttaactgatggtgcatcagcagctttaataatgacagaagaaaaagctcttcaacttggtcttactccaaaagcatatttaagaaattttatttatgtttcccaagatcctattgatcaattactcttgggaccatcttatgctataccacaggtattacaaaaagcaaaattaaatgttaaagatattggagtgtgggaaatacatgaagcttttgctggacaaattttagctaatttgaaagctttagattctgatttgtttgcacaaaagtatttaggaagatctttaaaagtaggaataccagatctcaataagtggaatgcatggggtggatctttgtcaattggtcatccatttgcagcaactggaattcgattagctagtcatacagctaatcgacttattaaagaagatcaacaatttggattaattgcagcttgtgcagctggaggacagggtgtaggtatgattatggaaagatatcctggtgctaaagtttaa

SEQ ID NO: 92809 - protein, 466 aa, Apis mellifera
MFFLVKNKFLMKGGFPKYGSIIKYLKTNNKLYATKSNVTKNIVFIDGVRTPFLHSGTSYKNLMAYDLARHSLVALQKKIKFPKEIVEYIVYGTVIQEVKTSNIAREAALTAGYSDRIPAHTVTMACISSNQALTTGMGLIACGVYDVIIAGGVEFLSDIPIRHSRHMRTLMLQANKAKTIGEKLTLFTSIRAAHFVPDLPAVAEFSSNETMGHSSDRLAAAFGISRKEQDEYALRSHTLAAKAQQQGYLTDIVPYKIPNVNEVINKDNGIQVSTKEKLAKLKPAFVKPYGTVTAANSSFLTDGASAALIMTEEKALQLGLTPKAYLRNFIYVSQDPIDQLLLGPSYAIPQVLQKAKLNVKDIGVWEIHEAFAGQILANLKALDSDLFAQKYLGRSLKVGIPDLNKWNAWGGSLSIGHPFAATGIRLASHTANRLIKEDQQFGLIAACAAGGQGVGMIMERYPGAKV

SEQ ID NO: 92810 - DNA, 1254 bp, Aspergillus nidulans FGSC A4
  CDS (1)..(1254)
atggccaccgaacgcctaaactccatcctctctcacctccgcccaggaaataagggcgtcgccgctatcacgcaaaagaatcctgacgacgtcgtcataaccctctccctccgcacgcctctcacaaaagctcgcaagggcggctttaaagacacagaactcgattaccttgtctacgccttgctgaaggaagtgatcgcgaagtcccagatcgaccctaacttgatcgaagacgtctgcctcggcaatgtcaatgatggcaaagctgcctatctcgtccgggccgcctccctcgccgctggaattccacacacagccggcgcatcctcggtgaaccgcttctgttcttccggattgaaagcagtccaggatatcgcaaatcagatttcgctgggggccattgatatcggtgtcgctgttggtgcggagatcatgtccgctggcggtgacaggcttaacaagcctttcaatgaagaggtgctgaagaaccaggaggcggcggactgtatgcagccgatggggcagacaagcgagaatgtcggcaaggacttcaacatcagccgagcacagcaggatgtgtacgcggcggaatctttccggagagctgaggtcgcgcagaaggcgggctggttcgatgatgagatcgtgccgataacgacccgcgtcaaggatccgaagaccggcgaggaacgatctgtgactcttaccaaggacgacggtgttcgctatggaacaaccgtcgaatccctctcaaagattcgacctgcgttcccccagttcggtgataagagtaccggcggaaactcgagccaggttacggacggtgcggcggctgtccttctcatgagacgcagcaaggcgattgaacttgggcagccgatcctggcgaaattcgtcggcgcgactgttgcgggtgtcccgccgcgcgtcatgggcattggacccacggctgcgattccgaagctgttgagcaagttcaatctcgacaagaatgacgtagatatctacgaaattaatgaggcctttgcgtcgatggcggtgtattgcgttgaaaagttgggtctggaccatgcgaaggttaatcctaggggtggtgcaattgcgttgggacacccgctcggcgcgactggggcgaggcaaatcgcgactattctaagcgaagcgaggagaacgaaggccaaggtacttgttacgagtatgtgcattggcactggtcaaggcatggctggattatttgtaaacgagcaggtttaa

SEQ ID NO: 92811 - protein, 417 aa, Aspergillus nidulans FGSC A4
MATERLNSILSHLRPGNKGVAAITQKNPDDVVITLSLRTPLTKARKGGFKDTELDYLVYALLKEVIAKSQIDPNLIEDVCLGNVNDGKAAYLVRAASLAAGIPHTAGASSVNRFCSSGLKAVQDIANQISLGAIDIGVAVGAEIMSAGGDRLNKPFNEEVLKNQEAADCMQPMGQTSENVGKDFNISRAQQDVYAAESFRRAEVAQKAGWFDDEIVPITTRVKDPKTGEERSVTLTKDDGVRYGTTVESLSKIRPAFPQFGDKSTGGNSSQVTDGAAAVLLMRRSKAIELGQPILAKFVGATVAGVPPRVMGIGPTAAIPKLLSKFNLDKNDVDIYEINEAFASMAVYCVEKLGLDHAKVNPRGGAIALGHPLGATGARQIATILSEARRTKAKVLVTSMCIGTGQGMAGLFVNEQV

SEQ ID NO: 92812 - DNA, 1206 bp, Aspergillus nidulans FGSC A4
  CDS (1)..(1206)
atgtttcgttctgccttaaagaaaacccccaacgacatcgtcctcctctccgccgtccggtcacctataacccgcgccttcaaaggcggtttccgtgactcgcacccagaggacctcctaattccaatcctccaggcctcacttcagcgtgccaatatctccccagacagcgtcaatgacgtgctcatcggcaatgtccttgcagaactcggcttcgccaagacgggtcgtaccgcactcaatgccgcgggctttaatcctacaaagactacattccacaccgtcaatcgacagtgcagtagtagtctgcaggcgattacgcatattgcgcacgcgatcgcagtagggcagatcgaggtcgggattgccgggggcgtggagagcatgagcaggaattacaatccggctcggggcattccaagagacgtgagtccgttgttgaaagagtgtggagtgaaagaggcgaccgattgccttttgccgatgctggtgacgagtgagaatgttgcaaagaggtacggggtcggtaggacggagcaggatcagtttgcagcagagagccagagaaaggctgtggttgcgcaggaggagggtaggtttagcgagatcgtgccggttagggcaaggaggcttagctcggagacggagaatgagacgtttgagtttgtcgatagggatgatggggttaggcagggggtgactgttgagaagttggcggcgttgaagccggttctggaagggggtgcttctaccgccgggaactcctcccaaatttccgatggcgcttccataacgattcttgccagccgcgcctgggctgaatcccacggtctaaggcctattgcccgttttgccggaacccaggtggccggctgtgcccctgacgagatgggcatcgggcccatcgacgctatcaagaggctgtacaagcacagcggggtctcacagagcgatgtggatatttttgagctgaacgaggcgtttgcgagccagagtatccattgtatcagggagctaggcattgatatggccaaggtaaatccgaacggaggagcgattgcactgggccacccgatcggcgcgacaggggccagacagacggctacgttgttggcagagctggcgaggtcagataaggaggttggggtggtgagtatgtgtgctagtacgggaatgggggttgcaagtttgttcatccgggagtag

SEQ ID NO: 92813 - protein, 401 aa, Aspergillus nidulans FGSC A4
MFRSALKKTPNDIVLLSAVRSPITRAFKGGFRDSHPEDLLIPILQASLQRANISPDSVNDVLIGNVLAELGFAKTGRTALNAAGFNPTKTTFHTVNRQCSSSLQAITHIAHAIAVGQIEVGIAGGVESMSRNYNPARGIPRDVSPLLKECGVKEATDCLLPMLVTSENVAKRYGVGRTEQDQFAAESQRKAVVAQEEGRFSEIVPVRARRLSSETENETFEFVDRDDGVRQGVTVEKLAALKPVLEGGASTAGNSSQISDGASITILASRAWAESHGLRPIARFAGTQVAGCAPDEMGIGPIDAIKRLYKHSGVSQSDVDIFELNEAFASQSIHCIRELGIDMAKVNPNGGAIALGHPIGATGARQTATLLAELARSDKEVGVVSMCASTGMGVASLFIRE

SEQ ID NO: 92814 - DNA, 1254 bp, Aspergillus nidulans FGSC A4
  CDS (1)..(1254)
atgtctggtgcgcagcagcgtttgatccaagtggcttcccacatcgggcccaagaagggcgtttccgccatcacagaaaagaaccccgatgatgtcgtcgtaacatgtgcactccgcagcgctctgaccaaaggcggtaagggagggttcaaggataccgctgcagccgatattctggccggtgttttcaagggcgtgattgaccgcagcggtatcgatcctagcctcgttgaggatatttcagtcggtaccgtcctcgcccctggaggcggagctacggagttccgggctgcggcgctcgttgctggcttccctgagaccacagccgtcaagggtctgaaccgtcaatgctcgagcggtctgcaggctattgtggacattgccaatgcgatcaagacgggtatgattgaagttggtattggtgccggtgtggagagcatgacttcgcaatatggccccggcgccgttactgagttctctgaactcctcgaaaaccacgaagaagctgccaactgcaaagttcccatgggtgtcctctccgagcagatggccaaagaccgaaacatctcccgcgccgcacaagacgcctttgccgcgtcatcataccaaaaggccgtaaaggcccaaaaagcaggcctcttcaacgaagaaatccttccccttgatgtcaagtggacagaccccaagacgaacgaggagaagaccattaccgtcaaggctgatgacggcatccgcgacggcatcaccgcggagtcgctcggtaaaatccgcccggcctttgccaaggacggatccatccacgctggtaacgcgtcgcaaatctctgatggcgctgccgctgtcctgcttatgaagcgctcgaccgctgaacgtcttggccagaagatcatcggcaagttcgtctgcgctagcgttgtcggcgtcaagccgctgcttatgggcattggtccctggaaggctatccctgttgcacttcagaaggcgggcatcacgaaggacgatgtcgacatctttgagatcaacgaggccttcgcgtcgcagtgtgtgtggtgcatcaatgaacttgggctacctgaggagaagatcaaccctaagggtggtgctattgcctttggtcacccgcttggatgcacgggagcacgtcagatcagcacgttgctcacggagctgaagcgcacagacaagaaggttggcgttactagtatgtgtgttggaactggtatgggtatggctgccgtctgggttagggagtaa

SEQ ID NO: 92815 - protein, 417 aa, Aspergillus nidulans FGSC A4
MSGAQQRLIQVASHIGPKKGVSAITEKNPDDVVVTCALRSALTKGGKGGFKDTAAADILAGVFKGVIDRSGIDPSLVEDISVGTVLAPGGGATEFRAAALVAGFPETTAVKGLNRQCSSGLQAIVDIANAIKTGMIEVGIGAGVESMTSQYGPGAVTEFSELLENHEEAANCKVPMGVLSEQMAKDRNISRAAQDAFAASSYQKAVKAQKAGLFNEEILPLDVKWTDPKTNEEKTITVKADDGIRDGITAESLGKIRPAFAKDGSIHAGNASQISDGAAAVLLMKRSTAERLGQKIIGKFVCASVVGVKPLLMGIGPWKAIPVALQKAGITKDDVDIFEINEAFASQCVWCINELGLPEEKINPKGGAIAFGHPLGCTGARQISTLLTELKRTDKKVGVTSMCVGTGMGMAAVWVRE

SEQ ID NO: 92816 - DNA, 1242 bp, Aspergillus nidulans FGSC A4
  CDS (1)..(1242)
atggcctctccaatcccccgcggccttcgccaggtcctccaaaaatcgccttcggacatcgttatcctctcatctctccgcactcccgtcactcgtgcaaagaagggcggttttaaggatgcttatccggaagagcttctcgctcatgttttacgcgcgacgctggaggccaacccaaatcttgaccccgctctgatcgaggatgtgtgcatcggctccgtgcttcaagaactcggaggcgcgaaggcaggccgaatggcccagatccacgccggtttccctcacagcgtccccttccacacaatcaaccggcaatgttcatctggtttggctgctatttcaactattgggaacagcattcgggcaggagctctcaacattggtgttggtggaggaatggagtcgatgaccagaaactacggctcgcgcgctatccccactgttctgtggcctgagctcaaggaatcgccctcaaaggattcgagggattgtatcatgcctatgggaatcacctctgagaacgtcgcttctcggtacggtatcagcagggaggaccaggacgcgttcgctgccaactcgcacaagaaggctgcggctgcgcaaaatgctggactattcgactcggagatcgttcccgtaaagactctttcctacgatgctcagaaccctgaagccccgcctacggagataactgtcactaaggatgacggtgttcgcgccaacatttctgtcgagaagatggcctctttgaagccggctttctctgaaactggctccagcactgccggaaacagctcccaggttagcgatggtgctgccgctgctctgttgatgcgtcgatctaccgccacggaactcggcctgacttcgtccatcaaggcccgctgggtcggcacagccgttgctggttgtgcccctgatgagatgggtgttggccctgcagttgccattcccaagctccttcagatgcttgacgttaatatttcggacgttggcatctgggagctcaacgaggctttcgcgtcccaggctctgtactgtgctcgtaagttgggtattgatgaggccaagattaaccccaagggtggcgccattgcgattggtcaccctcttggtgccactggagccagacaggtcgcgaccctgttacctgagcttgagcgtaccggccaggaaatcggtgttgttagcatgtgtatcggaactggcatgggtatggccggcatgtttgttcgggagtaa

SEQ ID NO: 92817 - protein, 413 aa, Aspergillus nidulans FGSC A4
MASPIPRGLRQVLQKSPSDIVILSSLRTPVTRAKKGGFKDAYPEELLAHVLRATLEANPNLDPALIEDVCIGSVLQELGGAKAGRMAQIHAGFPHSVPFHTINRQCSSGLAAISTIGNSIRAGALNIGVGGGMESMTRNYGSRAIPTVLWPELKESPSKDSRDCIMPMGITSENVASRYGISREDQDAFAANSHKKAAAAQNAGLFDSEIVPVKTLSYDAQNPEAPPTEITVTKDDGVRANISVEKMASLKPAFSETGSSTAGNSSQVSDGAAAALLMRRSTATELGLTSSIKARWVGTAVAGCAPDEMGVGPAVAIPKLLQMLDVNISDVGIWELNEAFASQALYCARKLGIDEAKINPKGGAIAIGHPLGATGARQVATLLPELERTGQEIGVVSMCIGTGMGMAGMFVRE

SEQ ID NO: 92818 - DNA, 1266 bp, Aspergillus nidulans FGSC A4
  CDS (1)..(1266)
atgtcatcaccccagcagcgactctcttctatttcaaaccagctctcgggctcgagtgctgccgcctccagggagaaactgttggccaagaaccctgacgatgtggtaatcacgctcgctgttcgaacgccgctcaccaaggcgagaaagggtggtctcaaggacactcgtcttgatgacctgcttatctcgttactgacgagtgtgcgtgaaaggtccaagctggatccgaatctcgtcgaagatgtctgcgtcggcaacactctctgccctggccaggcatatgttgcgcgctctgccgtgctcgcagcaggattccctataacaaccgctgcatcagttgccaaccgtttctgctcttctggattgctggcgattcagaacatcgcaaaccagatcattgccggctcaattgatatcggaattgcagtaggtgctgagagcatgagcaccaatgccgacggtggcgcaccggacctgtccgaggcgatcttgtcgcaccccatcgcgtcgcaaaacacgcaacccatgggccagacatccgagaatgtggccggtcagttcggtatcgcccgcgagcagcacgatcaattcgctgccaaaagctatcagaaggcggagcgtgcccagaaggcgggatggttcgaggacgagatcgtccccgtcaagacgcagatcaaggaccccaagactggcgaaatcaaatccatcatcgttgatagggatgacggtatccgctatggcacaacagctgagtctctggggaagattcgctctgcgttccctcagtggaagccaagcaacactactggtggaaatgccagtcaaatcactgatggtgcagcggcgcttgtgctcatgaagcgatctcgtgcacaggagcttggccagcctattctaggcaagtttgccggagcaaccgttgttggtttggaacccaggatcatgggaattggccctacctatgccattcccaagattctctcgaagttcggtttgaccaacaatgaagtcgacatttttgaaatcaatgaggcgtttgcatcaatgggcgtttactgcgttcagaaacttggtttggatgaggctaaggttaaccctcgtggtggtgctattgccttcggtcatcccctcggtgccacaggcgctcgacaggttgtgactgccctatccgagttgcgacgaacgaacaaaagggtagccgtcacctccatgtgtgttggaacaggcatgggtatggctggtatctttgtttccgaacattag

SEQ ID NO: 92819 - protein, 421 aa, Aspergillus nidulans FGSC A4
MSSPQQRLSSISNQLSGSSAAASREKLLAKNPDDVVITLAVRTPLTKARKGGLKDTRLDDLLISLLTSVRERSKLDPNLVEDVCVGNTLCPGQAYVARSAVLAAGFPITTAASVANRFCSSGLLAIQNIANQIIAGSIDIGIAVGAESMSTNADGGAPDLSEAILSHPIASQNTQPMGQTSENVAGQFGIAREQHDQFAAKSYQKAERAQKAGWFEDEIVPVKTQIKDPKTGEIKSIIVDRDDGIRYGTTAESLGKIRSAFPQWKPSNTTGGNASQITDGAAALVLMKRSRAQELGQPILGKFAGATVVGLEPRIMGIGPTYAIPKILSKFGLTNNEVDIFEINEAFASMGVYCVQKLGLDEAKVNPRGGAIAFGHPLGATGARQVVTALSELRRTNKRVAVTSMCVGTGMGMAGIFVSEH

SEQ ID NO: 92820 - DNA, 1209 bp, Candida albicans SC5314
  CDS (1)..(1209): transl_table=12
atggtcccacctgtttatattgtttctactgctagaactccaattggttcatttcaaggtacattatcatctttaacttattcagatttaggtgctcatgctgtcaaagctgctttgaacaaagtccctcaaatcaaaccagaagatgttgatgaaattgtatttggtggtgttttacaagccaatgttggtcaagctccagctagacaagttgccttgaaggcaggtttaactgataaaattgttgccagtactgttaacaaagtttgtgcttctggtttgaaagctattataattggtgctcaaaacattatttgtggcactagtgatattgttgttgttggtggtgctgaatccatgaccaacacgccatactacttgccaactgctagaaatggtgctagatttggtgattccactttaattgatggtattcaaaaagatggtttgttggatgtttacgaacaaaaattaatgggtgttgccgctgaaaaatgtgctgctgaccatggattcaccagagaacaacaagatgaatttgctatcaaatcatatcaaaaagctggtaatgcattaaagcaaggtaaattcaaccaagaaatcgctccagttactattaaaggtgttagaggtaaaccagatgttgttgttgaaaaagatgaagaaattgaaaaattcaatgaagccaaacttaagtcagctagagccgttttccaaaaagaaaatggtactgttactggtccaaatgcttctaagattaatgatggtgctgctgcattgattttagtttctgaagcaaaattgaaagaattgggtttaaaacctttagctaaaatcaatggttggggtgaagccgccagaaatccaattgatttcacaattgctccagctttagctgttccaaaagctgtcaagcacgctggtttgactcttgatcaagttgatttctttgaattgaatgaagccttttccgttgttggtttagccaatgctgaaatatgtcaaattccattagaaaaattgaatgcttatggtggtgctgttgccttgggtcatcctcttggttgttctggtgcaagaattgttgtcactttattgtctgtcttgattcaagaaggtggtaaaattggttgtgctggtgtttgtaacggtggtggtggtgcctcatctattgttattgaaaaagtcgatagtgactttaaattgtaa

SEQ ID NO: 92821 - protein, 402 aa, Candida albicans SC5314
MVPPVYIVSTARTPIGSFQGTLSSLTYSDLGAHAVKAALNKVPQIKPEDVDEIVFGGVLQANVGQAPARQVALKAGLTDKIVASTVNKVCASGLKAIIIGAQNIICGTSDIVVVGGAESMTNTPYYLPTARNGARFGDSTLIDGIQKDGLLDVYEQKLMGVAAEKCAADHGFTREQQDEFAIKSYQKAGNALKQGKFNQEIAPVTIKGVRGKPDVVVEKDEEIEKFNEAKLKSARAVFQKENGTVTGPNASKINDGAAALILVSEAKLKELGLKPLAKINGWGEAARNPIDFTIAPALAVPKAVKHAGLTLDQVDFFELNEAFSVVGLANAEICQIPLEKLNAYGGAVALGHPLGCSGARIVVTLLSVLIQEGGKIGCAGVCNGGGGASSIVIEKVDSDFKL

SEQ ID NO: 92822 - DNA, 1227 bp, Candida albicans SC5314
  CDS (1)..(1227): transl_table=12
atggatagattaaatcaattaagtggtcaattaaaaccaacttcaaaacaatcccttactcaaaagaacccagacgatgttgtcatcgttgcagcatacagaactgccatcggtaaaggtttcaaagggtctttcaaatctgtgcaatctgaattcatcttgactgaattcttgaaagaatttattaaaaagactggagtcgatgcatctttgattgaagatgttgctattggtaacgttttgaaccaagctgctggtgccaccgaacacagaggtgctagtttggctgcaggtattccttacactgcagctttccttgccatcaacagattgtgttcctcagggttaatggccatttctgacattgccaacaaaatcaaaaccggtgaaatcgaatgtggtcttgctggtggtattgaatccatgtctaaaaactatggtagtccaaaagttattccaaagattgacccacacttggctgatgacgaacaaatgagtaaatgtttgattccaatgggtatcaccaacgaaaatgttgctaatgaattcaacattccaagagaaaaacaagatgcctttgctgctaaatcttatagtaaagccgaaaaagccatctcctctggagctttcaaagatgaaatcttaccaatcagatccattatcagatccccagacggttctgaaaaagaaatcattgtcgataccgacgaaggtccaagaaagggtgttgacgctgcttccttgagcaaattgaaaccagcatttggtggtactaccactgccggtaacgcttctcaaatttcagatggtgctgctggtgttttattgatgaagagaagtttggctgaagccaaaggttacccaattgttgctaaatacattgcttgttcaactgttggtgttccgccagaaatcatgggtgttggtccagcttacgccattccagaagtgttgaagagaactggattgactgtggatgacgttgatgtgtttgaaatcaacgaagcttttgctgctcaatgtctttactcagctgaacaatgtaatgttccagaagaaaaattgaacataaacggtggtgccatcgctttaggtcatcctcttggttgtactggtgccagacaatatgccactatcttgagattgttgaaaccaggtgaaattggtttgacttctatgtgtatcggtagtggtatgggtgctgcctccatattgattaaggaatag

SEQ ID NO: 92823 - protein, 408 aa, Candida albicans SC5314
MDRLNQLSGQLKPTSKQSLTQKNPDDVVIVAAYRTAIGKGFKGSFKSVQSEFILTEFLKEFIKKTGVDASLIEDVAIGNVLNQAAGATEHRGASLAAGIPYTAAFLAINRLCSSGLMAISDIANKIKTGEIECGLAGGIESMSKNYGSPKVIPKIDPHLADDEQMSKCLIPMGITNENVANEFNIPREKQDAFAAKSYSKAEKAISSGAFKDEILPIRSIIRSPDGSEKEIIVDTDEGPRKGVDAASLSKLKPAFGGTTTAGNASQISDGAAGVLLMKRSLAEAKGYPIVAKYIACSTVGVPPEIMGVGPAYAIPEVLKRTGLTVDDVDVFEINEAFAAQCLYSAEQCNVPEEKLNINGGAIALGHPLGCTGARQYATILRLLKPGEIGLTSMCIGSGMGAASILIKE

SEQ ID NO: 92824 - DNA, 1182 bp, Candida albicans SC5314
  CDS (1)..(1182): transl_table=12
atgttcaagaaatcagctaatgatattgttgttattgcagcaaagagaactccaatcaccaagtcaattaaaggtgggttgagtagattatttcctgaggaaatattatatcaagtggttaagggtactgtatcagattcacaagttgatttaaacttgattgatgatgtgttagtcggtacggtcttgcaaactttagggggacagaaagctagtgccttggccattaaaaagattggattcccaattaagaccacggttaatacggtcaatcgtcaatgtgctagttctgctcaagcgattacttatcaagcaggtagtttgcgtagtggggagaatcaatttgctattgctgctggagtagaaagtatgactcatgattattttcctcatcgtgggattcccacaagaatttctgaatcatttttagctgatgcatccgatgaagctaaaaacgtcttgatgccaatggggataaccagtgaaaatgttgccactaaatatggaatttctcgtaaacaacaagatgagtttgcccttaattctcatttgaaagcagacaaggctacaaaactgggtcattttgcaaaagaaatcattcctattcaaacaacggatgaaaacaaccaacacgtttcaataaccaaagatgatggtataaggggaagttcaacaattgaaaagttgggtggcttaaaacctgtgttcaaggatgatgggactactactgctggtaattcctcgcaaatttcagatggagggtctgctgtgattttaactactcgtcaaaatgctgagaaatcgggagtaaagccaatagctagatttattggttcgtcagtagctggtgttccttcgggacttatgggaattggtccatcggctgctattcctcaattgttgtcgagattaaatgttgacacgaaagacattgatatttttgaattgaacgaggcatttgcatcccaactgatttattgtattgaaaaattgggtcttgattatgataaagtcaatccatatggtggagctatagccttgggacatccattaggagccactggcgcaagagttacggcaacgttgcttaatggattaaaagatcagaataaagagttgggtgtcatctcaatgtgcacatccacaggtcaaggatacgctgccttgtttgctaacgagtag

SEQ ID NO: 92825 - protein, 393 aa, Candida albicans SC5314
MFKKSANDIVVIAAKRTPITKSIKGGLSRLFPEEILYQVVKGTVSDSQVDLNLIDDVLVGTVLQTLGGQKASALAIKKIGFPIKTTVNTVNRQCASSAQAITYQAGSLRSGENQFAIAAGVESMTHDYFPHRGIPTRISESFLADASDEAKNVLMPMGITSENVATKYGISRKQQDEFALNSHLKADKATKSGHFAKEIIPIQTTDENNQHVSITKDDGIRGSSTIEKLGGLKPVFKDDGTTTAGNSSQISDGGSAVILTTRQNAEKSGVKPIARFIGSSVAGVPSGLMGIGPSAAIPQLLSRLNVDTKDIDIFELNEAFASQSIYCIEKLGLDYDKVNPYGGAIALGHPLGATGARVTATLLNGLKDQNKELGVISMCTSTGQGYAALFANE

SEQ ID NO: 92826 - DNA, 1233 bp, Candida albicans SC5314
  CDS (1)..(1233): transl_table=12
atgtcatccaaacaacaatacttgaagaagaatcctgacgatgtcgttgtcgttgcagcatacagaactgctttaaccaaaggtggaagaggtggattcaaagatgttggatctgatttccttttgaaaaaattgactgaagaatttgttaaaaaaactggtgttgaccctaaaatcattcaagatgctgccattggtaatgtcttgaacagaagagctggtgatttcgaacatagaggtgcattattatctgctggattaccttattcagttccatttgttgcccttaacagacaatgttcatctgggttaatggccatttctcaagtggccaacaagatcaagactggtgaaattgaatgtggtttagctggtggtgttgaaagtatgacaaaaaactatggtccagaagcattgattgctattgaccctgcttatgaaaaagacccagaatttgttaaaaacggtattccaatgggtattactaatgaaaatgtttgtgccaaattcaatatttcaagagatgttcaagatcaatttgctgctgaatcttatcaaaaagctgaaaaggcacaaaaagaaggtaaatttgatgatgaaattttaccaattgaagttttccaagaagatgaagatgctgaagatgaagacgaagatgaagatgaagatgctgaaccaaaagaaaaattggttgttattagtaaagatgaaggtattagaccaggtgttactaaagaaaaattggctaaaattaaaccagctttcaaatctgatggtgtatcttcagctggtaactcttcacaagtttccgatggtgctgccttggtgttattgatgaaacgttcatttgctgaaaagaatggattcaaaccattggctaaatacatttcttgtggtgttgctggtgtcccaccagaaattatgggtattggtccagctgttgccattccaaaagttttgaaacaaactggattatcagtcagtgatattgatatttatgaaatcaatgaagcatttgccggtcaatgtttgtactcaattgaaagttgtaatattccaagagaaaaagtcaatcttaatgggggtgctattgccttgggtcaccctcttggttgtactggtgctagacaatacgctactattttaagattgttaaaaccaggtgaatttggtgtgacttctatgtgtattggtactggtatgggtgctgcttctgttttggttagagaataa

SEQ ID NO: 92827 - protein, 410 aa, Candida albicans SC5314
MSSKQQYLKKNPDDVVVVAAYRTALTKGGRGGFKDVGSDFLLKKLTEEFVKKTGVDPKIIQDAAIGNVLNRRAGDFEHRGALLSAGLPYSVPFVALNRQCSSGLMAISQVANKIKTGEIECGLAGGVESMTKNYGPEALIAIDPAYEKDPEFVKNGIPMGITNENVCAKFNISRDVQDQFAAESYQKAEKAQKEGKFDDEILPIEVFQEDEDAEDEDEDEDEDAEPKEKLVVISKDEGIRPGVTKEKLAKIKPAFKSDGVSSAGNSSQVSDGAALVLLMKRSFAEKNGFKPLAKYISCGVAGVPPEIMGIGPAVAIPKVLKQTGLSVSDIDIYEINEAFAGQCLYSIESCNIPREKVNLNGGAIALGHPLGCTGARQYATILRLLKPGEFGVTSMCIGTGMGAASVLVRE

SEQ ID NO: 92828 - DNA, 1257 bp, Ustilago maydis 521
  CDS (1)..(1257)
atggctcagcgaatcactcagcttgcttcgcatctcgacccacgctcgtggtcaggcaagggtctgcacgctcacatggtcaagaacgactcggacgttgtcattgtcgccgccggacgtacgcccttcaccaaagcctacaagggatccatgaaggactcgaagttcgaccttctttgctacgagttcttcaaatcgctcattgcttcgtccgccatcgacccggctctcattcaagacatcgtggttggaaatgtgcacaacgacgaggcgccctactacgtgcgtgctgccgctctcgctgccgggattcccaacacgacgccggcgattgtggtcaaccgattctgctcttctggtctcatggcgatccgcactatcgccaacggtatccaggctggtgagatcgagtgtggtctggcgtgtggtatcgaacacatgtcgacacagcccaagcgacccacggtcatctcagaggaactgagcagggtcagccaggaggcagacgactgtaagatgcccatgggctggacctcggagaatgtcgccaaagactttaacatttcgcgcgcaaagatggacgagtatgcggcgcgttctcacctgcgtgcgattcaggcgcagtcgcagggcaaatttgatgccgagatcttccccatttccgtccccactgttggcaaggacggtgcgaaacagacgacagtagtgagcgcggacgagggaccgcgtgccggaacgacggccgaatcactcggcaaaatcaagtcggctttccctcagtgggcaccgtccaacaccaccgggggtaacgcttcgcagatcaccgacggcgctgctggcgtcatcctcatgcgtcgttcgctcgccaacaagctcggcctgaaagtgctcggaaagtacgtctcgtgtgctgttactggtctcgaaccacgaatcatgggaatcggtcccagctcggccatcccagctctcctcgcacagaccggcgtaaagcaagacgaggtcgatctgttcgagatcaacgaagccttcgccagcatgtacgtctactgtgtcgaaaagctgggcctcgaccccgaaaaggtcaacgtcaacggcggtgcctgcgctcttggtcaccctctcggtgctacaggcgccaggttggtcgttaccgcattgaaggagttggagaggagacagcagaaggtcgccgtcgtctccatgtgtattggactcggcatgggcgctgctggtctgattctcagggaggactga

SEQ ID NO: 92829 - protein, 418 aa, Ustilago maydis 521
MAQRITQLASHLDPRSWSGKGLHAHMVKNDSDVVIVAAGRTPFTKAYKGSMKDSKFDLLCYEFFKSLIASSAIDPALIQDIVVGNVHNDEAPYYVRAAALAAGIPNTTPAIVVNRFCSSGLMAIRTIANGIQAGEIECGLACGIEHMSTQPKRPTVISEELSRVSQEADDCKMPMGWTSENVAKDFNISRAKMDEYAARSHLRAIQAQSQGKFDAEIFPISVPTVGKDGAKQTTVVSADEGPRAGTTAESLGKIKSAFPQWAPSNTTGGNASQITDGAAGVILMRRSLANKLGLKVLGKYVSCAVTGLEPRIMGIGPSSAIPALLAQTGVKQDEVDLFEINEAFASMYVYCVEKLGLDPEKVNVNGGACALGHPLGATGARLVVTALKELERRQQKVAVVSMCIGLGMGAAGLILRED

SEQ ID NO: 92830 - DNA, 1245 bp, Ustilago maydis 521
  CDS (1)..(1245)
atggcttttcgaagtagccctgttgcacgaaaaggcttgcagagccttttgcaaaagcgagccgacgatgtcgtgtttaccaccgcgctgcgaacgcccatcgcacgtatgaagaagggcttcaaagatgcttaccccgaagagctcctcgcacacgtgctgcaacgcacccgtgaaaggctcgaatctcgcggcgttgacaagaatatcatcgaagacatttgcacgggcaccgtcttgatggagctcggtggagccaagtcgggacgtatggcagcacttcacgccggtatgcccatcacttcggcttacaagacagtcaaccgacaatgcgctagttcgctgcagagcatcactgacatcgccaacgccatccgagctggagaaatccagtgtggtattgcggcaggtgttgagtcgatgacgcgcaattacggctcgcgagctatcccggtcgatctgagcccgtggctcaaggagtctgagtccgtcgacgcgcgcgactgcatcttgccaatgggcgagacttcggaacgagtggcggaacaatggaacatcagccgtgagcgacaagaccagttcgctgccgagtcgcaccgcaaagccgatgctgcccagcaggatggacgcctcgcatccgagatcgaacccatcgaggtgcgctggatagacacagagacgggcaaggagggcaagaagctgatcagccaggatgaaggcatccgcccaggtaccacgttggaatcgcttggcaagctcaagccttttatgcgcgctgatggtaggagcaccgccggcaactcgtcgcaagtgagcgacggagccgttgcgctcacaatggctcgacgagatgtagccgaagcggcggggatggagatcttgggccgttgggtaggcactgctaccaagggcgtcaagccagatgtgatgggtattgggcccgccgaggctgtgcccaaactgctcgaacgcttccagctcaagacggacgacgtggatctctgggagctcaacgaggcgtttgcatctcagtcgttgatggtgatggacacgctcaagctggatgctgctaaggtgaacccgaagggtggcgcgattgcgttgggtcacccgttgggcgcctcgggaggacgattggtgacgagtttgcttgccgagctgcgcaggacgggtcaacaggtgggtgtagctacgctctgctgtggtactggctacggtaaggcatcgctcgtcattgccgagtag

SEQ ID NO: 92831 - protein, 414 aa, Ustilago maydis 521
MAFRSSPVARKGLQSLLQKRADDVVFTTALRTPIARMKKGFKDAYPEELLAHVLQRTRERLESRGVDKNIIEDICTGTVLMELGGAKSGRMAALHAGMPITSAYKTVNRQCASSLQSITDIANAIRAGEIQCGIAAGVESMTRNYGSRAIPVDLSPWLKESESVDARDCILPMGETSERVAEQWNISRERQDQFAAESHRKADAAQQDGRLASEIEPIEVRWIDTETGKEGKKLISQDEGIRPGTTLESLGKLKPFMRADGRSTAGNSSQVSDGAVALTMARRDVAEAAGMEILGRWVGTATKGVKPDVMGIGPAEAVPKLLERFQLKTDDVDLWELNEAFASQSLMVMDTLKLDAAKVNPKGGAIALGHPLGASGGRLVTSLLAELRRTGQQVGVATLCCGTGYGKASLVIAE

SEQ ID NO: 92832 - DNA, 1212 bp, Ustilago maydis 521
  CDS (1)..(1212)
atgtccgccgcccagcagcgccacggaaagaagaacattcttgccgagcacgatgacgatgtggtcattgtctcggctctgcgaacgcccatcaccaaggccaagaagggcggtctctcacagtgtgctcccgaggagatgctcggctggacgctcaagggtgtccttgctgagtccaagatcgaccccaagttgattgaggatgtcgccgtcggaactgtcctcgctcccggtggtggttccactcaggcacgtatgggctcgctttgggccggcattcctaacactgccggttgcaacagtttgaaccgtcagtgctcgtctggtcttgcagccgtcaaccagattgccaaccagatcgccctaggccagatcgatatcggcattggctctggtgtcgagtcgatgacgctcaactacggcgctggtgtcatgccctccaagatgtcggacgccgtcatggagaacgaggaagccgccgactgcttgatgcccatgggtatcacttcggagaatgtcgccaagaagtacaacattgaccgaaccaagcaagacactttcgctgccgagtccttcgctcgcgccgcagctgcgcaaaaggccggcaaattcaagagcgaaattgtcacagtcaagtacacggacgacgatggcaacgagcgaaccgtcgatgctgacgatggcatccgcgagggtgtcactgttgagtcgctcgccaagcttaagcccgccttcgccaaggacggcttcacccacgctggtaacgcttcgcaagtcagtgacggagctgcctcggtcttgctcgctcgtcgcagcgccgccaagaagcacggtctgcccatcctcggcaagttcgtcacctgtgccgttgtcggtgttccccccaacattatgggcgttggtcccgcgtacgccatccctcgcctctttgagctgacaggtctcaccaaagatgacattgacatctatgagatcaacgaggcatttgcctcgcaggcgctcttttcgattgagcacattggaatcgacaagaagaaggtcaaccctgtcggaggtgctatcgctatgggccaccctctcggtgccaccggtgcgcgacaaattgccaccggtcttgccgaggccaagcgccagggaggcaagaagctcattgtcacctctatgtgcgtcggtaccggtatgggttgtgccgctctcatcgtgtcggcttga

SEQ ID NO: 92833 - protein, 403 aa, Ustilago maydis 521
MSAAQQRHGKKNILAEHDDDVVIVSALRTPITKAKKGGLSQCAPEEMLGWTLKGVLAESKIDPKLIEDVAVGTVLAPGGGSTQARMGSLWAGIPNTAGCNSLNRQCSSGLAAVNQIANQIALGQIDIGIGSGVESMTLNYGAGVMPSKMSDAVMENEEAADCLMPMGITSENVAKKYNIDRTKQDTFAAESFARAAAAQKAGKFKSEIVTVKYTDDDGNERTVDADDGIREGVTVESLAKLKPAFAKDGFTHAGNASQVSDGAASVLLARRSAAKKHGLPILGKFVTCAVVGVPPNIMGVGPAYAIPRLFELTGLTKDDIDIYEINEAFASQALFSIEHIGIDKKKVNPVGGAIAMGHPLGATGARQIATGLAEAKRQGGKKLIVTSMCVGTGMGCAALIVSA

SEQ ID NO: 92834 - DNA, 1188 bp, Ustilago maydis 521
  CDS (1)..(1188)
atggcgagtcaggcattcattgtagcggccaagcgaactccgtttggagcgttcggtggcaagctcgctggcttcagcgcttcgcagctgggtggtcttgcgtccaaggcggcactctctgagctgccctcctcgaccaaggtcgacgctacgattttcggtaatgttcacgcgagcgacagtacagctgcatacctggcgcgtcacgttggacaccatgcgggactgcccgtgacagtgcctgctttgacggtgaaccgactgtgcggatcgggttttcagagcatcatcaatgctgtccacgagatccgcgtgggcgactcggccgtcgtgctgaccggcggtaccgagtccatgtctcaggcgccgtacactctgtccggcgtgaggtttggcaacacgaggtacggccaggatctcaagttggtcgactcgctcgccgcggcattgacggatcaggttcctacgccgacaccgatgggtatcacggctgaaaacttggcggccaagtatggcatcacgagacagcagtgtgacgagtacgcgttgcagtcgcaacagcgctaccagaaggcgttggcagacggagcgttcaaggacgaaattgtgcctgtcgagatcaagtcaaagaaagctaccgagagcttccaagtggacgaacacccgcgtgccaagaccactgtggaaagtctcggaaagctccccagcgttttcaagaaggaaggcaccgtttctgccggtaatgccagtggtatctgcgacggtgcagccgccaacgttatcgcttcggaggaagcgctgaacaagttcggcctgaagcctttggcacgtattgtttcgtacggtgtcactgcctgcgaacccagcatcatgggaatcgggcccgtcgaagcgtccaagctggcgcttagccgcgccggactcaaggtgtcggacatggatctcatcgaggtcaacgaggccttcgcagcgcagttcctgtccgtccagaaggagctcgagctgcccaacgacaagactaacgtcttcggtggcgcgatcgccctcggtcaccctcttggcgctagtggcgctaggatcatggctaacctcacgcacaatttgatcaggctcgacaagaagtatgcgctcggcgccgcgtgcatcggcggaggccagggtatcgccatcatcatcgagcgcgtctaa

SEQ ID NO: 92835 - protein, 395 aa, Ustilago maydis 521
MASQAFIVAAKRTPFGAFGGKLAGFSASQLGGLASKAALSELPSSTKVDATIFGNVHASDSTAAYLARHVGHHAGLPVTVPALTVNRLCGSGFQSIINAVHEIRVGDSAVVLTGGTESMSQAPYTLSGVRFGNTRYGQDLKLVDSLAAALTDQVPTPTPMGITAENLAAKYGITRQQCDEYALQSQQRYQKALADGAFKDEIVPVEIKSKKATESFQVDEHPRAKTTVESLGKLPSVFKKEGTVSAGNASGICDGAAANVIASEEALNKFGLKPLARIVSYGVTACEPSIMGIGPVEASKLALSRAGLKVSDMDLIEVNEAFAAQFLSVQKELELPNDKTNVFGGAIALGHPLGASGARIMANLTHNLIRLDKKYALGAACIGGGQGIAIIIERV

SEQ ID NO: 92836 - DNA, 1227 bp, Ustilago maydis 521
  CDS (1)..(1227)
atgccagctttctaccaaaccgccgtccgacgactttctcagacagctagaattatgtcacaaatcaacgacgtcttcatcgtttccgccgcccgaacgcccatcggctcgttcaacggtgtgctcaaaaaggccaccgctcctgagctcggtgtggtggccgtaaaggcagccatccaacgtgccggtctcaagcccgaccagatcgaggaggtctacatgggcaatgtgctccaaggcaacgtcggtcaggctcccgcccgtcaggttgcgctcaaggctggctgccccgacaccaccgaggctaccaccattaacaaggtgtgcgcttccggtatgaaggccatctcgctcgccgcccagaacattgctctcggccagcgcagtatcatggtcgccggtggcatggagtctatgtctaacgccccctactatcttccccgaggcaacacctacggccatgtccaggcgaccgatgcgatcgtcaaggacggtctgcacgatgtctacaaccaggtggccatgggcaactgtgccgagaacactgccaagaagctctcaattacgcgtgagcagcaggacgcctttgcgattgaatcgtaccgtcgctccgccgaggcatggaaggccaatgcattcgctaacgagatcgctcctgtcaccatctcggacaagaagggcgatgtcgtgatcagcgaagacgaggagtacaagaacgtcaagctcgaaaagatcccatcgcttcgaccggtgttcgacaagaacggaaccatcactgctgccaatgcgtcgacgctcaacgacggtgcttcggccgttgtgctagcttccgaggccgaggtggccaagttgggcattaagcctttggccaagattgtagcgtttgccgatgcagcatgtgcaccgatcgacttccccattgcgcccgcttatgccattcccaaggcgctcgagcgagccggtttgacaaaggacgacattgctctgttcgaaatcaacgaggctttctcggctgtcgcgttggctaacaaccagatgctcggcctcgacgctagcaaggtcaacgttctcggtggtggtgtttcactcggtcaccctatcggttcttcaggtgctaggattgttgttacgctggcccacgcgctcaagcccggccaatacggctgcgctggtgtctgcaacggtggtggtggcgcttctgctatcattatcaagcgtgagaactaa

SEQ ID NO: 92837 - protein, 408 aa, Ustilago maydis 521
MPAFYQTAVRRLSQTARIMSQINDVFIVSAARTPIGSFNGVLKKATAPELGVVAVKAAIQRAGLKPDQIEEVYMGNVLQGNVGQAPARQVALKAGCPDTTEATTINKVCASGMKAISLAAQNIALGQRSIMVAGGMESMSNAPYYLPRGNTYGHVQATDAIVKDGLHDVYNQVAMGNCAENTAKKLSITREQQDAFAIESYRRSAEAWKANAFANEIAPVTISDKKGDVVISEDEEYKNVKLEKIPSLRPVFDKNGTITAANASTLNDGASAVVLASEAEVAKLGIKPLAKIVAFADAACAPIDFPIAPAYAIPKALERAGLTKDDIALFEINEAFSAVALANNQMLGLDASKVNVLGGGVSLGHPIGSSGARIVVTLAHALKPGQYGCAGVCNGGGGASAIIIKREN

SEQ ID NO: 92838 - DNA, 1110 bp, Strongylocentrotus purpuratus
  CDS (1)..(1110)
atggcccttactcgaggaatcttcattgtcggtgccaagcgcacgcccttcggtgcctttggcggtgtattgaaggataagaccggtaccgaccttgctgaggtggcggctaaggcggcgctcagagcaggcaacatcaaccctgcgatcatcgacaccaccatcattggaaatgtgtcacacacagcaccagatgccgcatacacagccaggcatgttgctctccggtgtggggtaacagtctctaagcctgccctaggtgtcaatagactgtgcgggtctggcttcacctcaattgtatctgcaacacaggagatactggcaggtgatgcggaggtagcactgacgggaggaacagagaatatgagcatggctccatacacactcagaggggctaggtttggtaccaggctcggtgccaagtatgagcttgaggataccctttgggcgaccctaaccgatgcacacattaagacccctatgggaatcacagcagagactctaggtgccaagtatgatgtcaccagggaagattgtgatgaatttgcattgcttgggcaacagcgatgggcagaagctaacaaggcaggtatctttgatgctgagatggcaccaatcgagctggcctccaagaagggaccaaagtctgttaccaccgatgaacaccctcgcgaggccactatggctcagcttgccaagttaccaccagtattcaagaagaatggcttagtatcagcagggaacgcatcgggtatctgtgacggtgcaggagcagtgatcctagccagcgaagaggcggttgctaagcacaacctcaggcccctcgctcggatcgtcgggtacaacgttgccgggtgtgaccccagcatcatgggcattggaccggtctacgccatcaggaatgccttggagagagcagggctcaagctcagcgacatggaccttgtggaggtcaatgaggcgttcgcagcacagttcatcgcagtggagcgcgagcttgggttggaccgtcagaagacaaacgtcaacgggggtgctattgccatgggtcatcctgtgggggcctctggggcgaggatcacagcacacctagtccatgagctcaggtag

SEQ ID NO: 92839 - protein, 369 aa, Strongylocentrotus purpuratus
MALTRGIFIVGAKRTPFGAFGGVLKDKTGTDLAEVAAKAALRAGNINPAIIDTTIIGNVSHTAPDAAYTARHVALRCGVTVSKPALGVNRLCGSGFTSIVSATQEILAGDAEVALTGGTENMSMAPYTLRGARFGTRLGAKYELEDTLWATLTDAHIKTPMGITAETLGAKYDVTREDCDEFALLGQQRWAEANKAGIFDAEMAPIELASKKGPKSVTTDEHPREATMAQLAKLPPVFKKNGLVSAGNASGICDGAGAVILASEEAVAKHNLRPLARIVGYNVAGCDPSIMGIGPVYAIRNALERAGLKLSDMDLVEVNEAFAAQFIAVERELGLDRQKTNVNGGAIAMGHPVGASGARITAHLVHELR

SEQ ID NO: 92840 - DNA, 1197 bp, Tribolium castaneum
  CDS (1)..(1197)
atgaccgctttagttaaaggtgtggtaattgtcgcagccaaacgtacccctttcggtacctatggtggcaaattcacaaaaacctcagccgtggaactccaaactgttgctgcgaaagcagccctggcttctggaaacgtaaaaccggaattaatcgataccgtagtcgtcggtaacgtattaaccagttcttcagcggatggtgctttcattccaaggcatacggccctgagatgcggcattcctcaagaacggcctgctttcctcgtcaatagactttgcggttccggctttcagtctatagtaaatggagttcaggatattttaacaggcgctgctgaaatttccctaaccggaggtacagacaacatgtcccaaactccacacactgccagaaacgtccggtttggggttcccctcggccaggatatcgtactggaggactcgctgtggctcggcttgactgattcctactgcaaaatgccgatggctcttacagccgaaaaattgggagcacaatttaatatcacacgcgacgaagtcgacgaattttctttgagatctcaacagttatggaaagctgcacaagacggcggccgatttaaagaagaaatcgcccctgttcccattaaagtgaaaaaggaaaccgtcaacttggaggttgatgagcatccgcgcccccaaactacgttagacggccttaagaaacttccaactttgtttaaacaaaatggtttggttaccgcaggctcggcatctggcatttgtgacggtgcaggtgccgttatcgtggccagtgaacaagcggcaagcaaacacaatctgacacccttggctcgaattgtggctttttctgccgttggtgttgaccccaccattatgggcattggcccagcaccagccatccgaaatgtgcttaaagccagtggcaaaactctcgatgatattgacctaattgagatcaacgaggcttttgcggcacaaacacttgcctgtgccaaagacttgaaactggatatcaataaactgaatgtggatggtggagcgattgctcttggacatcctttgggtgcttctggtgccagaataactgcacatttggtgcatgaattgaggagaaggaaggccaaatttggaattggatcagcatgtattggaggcggacaaggtatcgctatcatgattgaagctttgtaa

SEQ ID NO: 92841 - protein, 398 aa, Tribolium castaneum
MTALVKGVVIVAAKRTPFGTYGGKFTKTSAVELQTVAAKAALASGNVKPELIDTVVVGNVLTSSSADGAFIPRHTALRCGIPQERPAFLVNRLCGSGFQSIVNGVQDILTGAAEISLTGGTDNMSQTPHTARNVRFGVPLGQDIVLEDSLWLGLTDSYCKMPMALTAEKLGAQFNITRDEVDEFSLRSQQLWKAAQDGGRFKEEIAPVPIKVKKETVNLEVDEHPRPQTTLDGLKKLPTLFKQNGLVTAGSASGICDGAGAVIVASEQAASKHNLTPLARIVAFSAVGVDPTIMGIGPAPAIRNVLKASGKTLDDIDLIEINEAFAAQTLACAKDLKLDINKLNVDGGAIALGHPLGASGARITAHLVHELRRRKAKFGIGSACIGGGQGIAIMIEAL

SEQ ID NO: 92842 - DNA, 1170 bp, Tribolium castaneum
  CDS (1)..(1170)
atgtcgactcaagtatttattttgtcaggctgtaggaccgcaattgggagtttccagggccagtttgataaaatccccgcgagcgagttgggttcagttgtaataacagaggccttaaaacgtgcgacaataagcccccaagatgtggaccaagtgataatgggtcaaattttgactgcaggtcaaggtcagaacccagcacgccaggcttcggtcggggcccaagtaccgtacgctgttcccgcatacactattaatatgctatgcggctcaggcttgaaatccgtgtgccttgcgtatcaggcgattcgtaatcaggacaatgagattgtggtggccgggggccaggagaacatgtcacgggcccaacactgcgcgtacattcgcgggaataaactgggggctgtccaaatgaatgacaccctgctgtatgacggtctcaccgacgcctttaacagtattcatatgggaaaaaccgctgaacatttagcgaaagagtataaaattacgcgcgaggcgcaagataacttcgccctgacgtcacaaacaaagacgcaggaggcgatccaacaaggatattttaaaaaggaaatcatcggagttgtggagaagagaactgggaaagttttagataaagacgaattccccaaagctgggacgactctcgacggtttggcgaagctaaggccagcctttgaccccaatgggaccgtaactgccggaaacgcatccgggattaatgatggggcggctgcccttgttttatgtagcgaaaatcaggtgaaattgaagggtttaaagcctctggctagaattgtggcttgtgccgaggtcgggattgaccccctgtgcatggggcttgggcccattgaggctgtgaacaaagtcctgcttaagacgggttggtcaagacacgacgtcgatttgtacgaactgaacgaagcttttgccgttcagagcatcattgtgggcgaagcgctccaagtcaatgcgaaaaaagtcaacataacgggaggtgctatcgctttagggcacccgatcggggcttcgggggcccgcatcctcgtcactctcatccataatttggaacgtttgaatatgaaaaaaggagtggcagctttgtgtattggaggaggcatgggtatagccatcgcgattgaaatgtgttaa

SEQ ID NO: 92843 - protein, 389 aa, Tribolium castaneum
MSTQVFILSGCRTAIGSFQGQFDKIPASELGSVVITEALKRATISPQDVDQVIMGQILTAGQGQNPARQASVGAQVPYAVPAYTINMLCGSGLKSVCLAYQAIRNQDNEIVVAGGQENMSRAQHCAYIRGNKLGAVQMNDTLLYDGLTDAFNSIHMGKTAEHLAKEYKITREAQDNFALTSQTKTQEAIQQGYFKKEIIGVVEKRTGKVLDKDEFPKAGTTLDGLAKLRPAFDPNGTVTAGNASGINDGAAALVLCSENQVKLKGLKPLARIVACAEVGIDPLCMGLGPIEAVNKVLLKTGWSRHDVDLYELNEAFAVQSIIVGEALQVNAKKVNITGGAIALGHPIGASGARILVTLIHNLERLNMKKGVAALCIGGGMGIAIAIEMC

SEQ ID NO: 92844 - DNA, 1239 bp, Tribolium castaneum
  CDS (1)..(1239)
atgtctgcttttaaactatcccaggtcgtaactctcacgaacagatcatacagcaccaaaccgcaactaaacgaagtagtcataatttcggcggctcgcaccccaattgggtcattcctcggttccttatcctctgtccatgtctctaaattgggggcaacagcaatccaaggtgccgttgaacgcgccggtattccaaaagaagaaattaaagaagtctacatggggaatgtgtgccagggaggtgtgggccaggcgccggcacggcaggcaaccctctttgcggggttccccaagtcgacaatatgcaccacaattaacaaagtttgcgcttctggaatgaaatccgttatgctggcggcccaaagcctccaagctggccaccaggatgtggttttagccggcggaatggagtcaatgtccaacgtgccatactacttgaaaagggggcccacgccgtacggaggagtgaatttaatagacggaatagtctttgacggcctcaccgacgtttacaacaagtttcacatggggaattgtgccgaaaatacggccaaaaagctgggaatcacgcgtcaacagcaggacgatttcgcaatttcgagttacaaaagaagcgccgaggcttacgcaagcaaccaatttgcgtcagaattagtcagtgtgagcgtgccccaaaaaaaagggcaacccgatttggtgtttgccgccgatgaggagtacaaaagggtcgattttaacaaattttccaaacttgcgacggtcttccaaagggaaaatggcactgtcaccgccggaaacgcctcgactcttaacgatggggctgctgctcttgttctcacatctgcggacgctgccaaaagactcaacgcgaagcctttggcccgcgttgtgggcttcgaggacggcgcgtgtgaccccattgactttccgatagccccagcagtggccattccgcgtcttttgagcaacaccggtgtcaaaaaggaggacgtggccctttgggagattaatgaagctttcagcgttgtggttttggccaaccagcaactcctagacatagacccggccaaagtgaacgtgcatgggggcgctgtcagtttggggcacccgattggcatgtccggggcgcgacttattgtccacctggtccacgcgttgaaaccgggccaaaagggggttgcttcgatttgtaacggtggtggaggcgcttcttcggttatgattgagaagttgtaa

SEQ ID NO: 92845 - protein, 412 aa, Tribolium castaneum
MSAFKLSQVVTLTNRSYSTKPQLNEVVIISAARTPIGSFLGSLSSVHVSKLGATAIQGAVERAGIPKEEIKEVYMGNVCQGGVGQAPARQATLFAGFPKSTICTTINKVCASGMKSVMLAAQSLQAGHQDVVLAGGMESMSNVPYYLKRGPTPYGGVNLIDGIVFDGLTDVYNKFHMGNCAENTAKKLGITRQQQDDFAISSYKRSAEAYASNQFASELVSVSVPQKKGQPDLVFAADEEYKRVDFNKFSKLATVFQRENGTVTAGNASTLNDGAAALVLTSADAAKRLNAKPLARVVGFEDGACDPIDFPIAPAVAIPRLLSNTGVKKEDVALWEINEAFSVVVLANQQLLDIDPAKVNVHGGAVSLGHPIGMSGARLIVHLVHALKPGQKGVASICNGGGGASSVMIEKL

SEQ ID NO: 92846 - DNA, 1425 bp, Tribolium castaneum
  CDS (1)..(1425)
atggcttcgtacattgcaagaaacatagttaaaagccctgcagccctagggctaacccagcaacaatttggaaatttgagggccttttctgtcggaacgcaattaaacagcaagaaaactgttccagacagaactggaaagaatatcgttttggtggatggagtcagaaccccatttttaatgtctggaacagactattccaaactgatgccacatgacttagccaaacaagccttagctggcattttaaaaaagactggtgttccaaaggaaatgattgattatgtcatctatggaacggttattcaggaagtcaagacttcaaatattgcgagggaggctgcccttgcagctggttacagtgacaaaacccccgctcataccgtcacaatggcttgcatttcatcaaatgtggccatgactacagccattgggcttattgcaagcggtgtttacgagctcatcgtggcaggaggtgttgaattcatgtctgatattcccattaggcacaacagaaaaatgcgcagcttgatgctccaagccaacaaagccaagactttgcagcaaaaattggggcttctggcgagcatcagacctgattatttcgtcccagagttgccagctgttgccgagttttcttctggcgaaaccatgggtcactctgctgaccgtctcgcagctgcctttggggccactcgtagagaacaagacgaattcgctcttaggtcacacactttggcgcaacatgcatatgaaagtggccacttcaccgatcttatcccagtcaagatccctggaattgataaagttattgaaaaagataacggaatccgtgtttccaccccagaacaactggccaaacttaagcctgcatttattaaaccacacggtaccgtcacagcagccaatgcctcatttttgactgacggtgcttccgctgctattgttacaacggaagcgaaagctaaggctttgggcctgaaacccaaggcctatttgcgggactttatctacgtttcccaagaccctatcgaccaacttttgctaggaccagcctacggcactccaattgtattagaaaaagccgggcttacaatgaaagacattgctgtttgggagttccatgaagctttcgccggccaaattttggcaaatttcaaagccatggacagtgattggtttgcacaaacttatatgaagaggagcagcaagattggggctcctgacatcaacaaattcaacaactggggaggatcgctttctattggacatcccttcgctgccactggaatcaggctggctatgcacaccgctaataggcttgtgaaagaggatggacagtttggagtggttgctgcttgcgcagctggtggacagggtgtggccatgattttggaaagacatcctgaggccaccgcaaattaa

SEQ ID NO: 92847 - protein, 474 aa, Tribolium castaneum
MASYIARNIVKSPAALGLTQQQFGNLRAFSVGTQLNSKKTVPDRTGKNIVLVDGVRTPFLMSGTDYSKLMPHDLAKQALAGILKKTGVPKEMIDYVIYGTVIQEVKTSNIAREAALAAGYSDKTPAHTVTMACISSNVAMTTAIGLIASGVYELIVAGGVEFMSDIPIRHNRKMRSLMLQANKAKTLQQKLGLLASIRPDYFVPELPAVAEFSSGETMGHSADRLAAAFGATRREQDEFALRSHTLAQHAYESGHFTDLIPVKIPGIDKVIEKDNGIRVSTPEQLAKLKPAFIKPHGTVTAANASFLTDGASAAIVTTEAKAKALGLKPKAYLRDFIYVSQDPIDQLLLGPAYGTPIVLEKAGLTMKDIAVWEFHEAFAGQILANFKAMDSDWFAQTYMKRSSKIGAPDINKFNNWGGSLSIGHPFAATGIRLAMHTANRLVKEDGQFGVVAACAAGGQGVAMILERHPEATAN

SEQ ID NO: 92848 - DNA, 1182 bp, Leptospira interrogans serovar Copenhageni str. Fiocruz L1-130
  CDS (1)..(1182): transl_table=11
atggaagaagcagttatactggatgggattagaactccgttcggaaattttggaggaaccttaaaagacctgagtgcggtcgatctgggagttttggtttctaagacgattctggaaagaacgggagtttctcctgaagcgattggagaatcgatttttggaaatgtgattccgacaggaaaagaagcgatttatcttgcgcgtcatattggtctgaaaacgggtcttcctttaggagttccggctctgactctcaatcgtctttgtggttctggtatggaagcgattatccaagctgcaaaaaagatttatctaggggatgcggatgcggttcttgcaggtggagtggaatcgatgagtaatgctccttacgttgtgcgtaacgcgcgttggggagttcgttacggttccgccgaatttgaagatacgttagaacaaggtctcaccgaccaatacgtaggtttgatcatgggacagaccgctgaaaatcttgccgatcagtataaaatttccagacaagaacaggatgaatgggcggcgatttctcaaactcgtgccgaaaaagccactttagaaggacgtcttaaagaagaaatttttaccgttacgatcccaggtaaaaaaccggttatattagaaaaagatgaatttattaagggagcctctggtgttgataaacttggaagtttaaaggctgtttttagggaaggtggaaccgtgaccgctggaaatgcttccggcttaaacgacggagcggcggttacaattgtagcatcttcttcttatgctaagaagttaggtaaaaaacctttggcgattatccgaggttatggtcacgctggttgtgatcctgctaaaatgggaattggtccggcacttgcaattccagctgctttgaaaaaagcaggtcttaaactttcggatatgagtttagtggaagtaaatgaagcttttgcggctcaatatcttgcggttcaaaaagaattagggctcaatccggaaattaccaatgtgaatggcggtgcggtagcgattgggcatcctctgggagcttctggtgccagggttacgatcacactcgcgtacgaactcaaaagaagaaaggcgaaatacggaattgcttccctttgtattggaggtggtcagggaattgcactcgttctggaaaatccagaagtgtaa

SEQ ID NO: 92849 - protein, 393 aa, Leptospira interrogans serovar Copenhageni str. Fiocruz L1-130
MEEAVILDGIRTPFGNFGGTLKDLSAVDLGVLVSKTILERTGVSPEAIGESIFGNVIPTGKEAIYLARHIGLKTGLPLGVPALTLNRLCGSGMEAIIQAAKKIYLGDADAVLAGGVESMSNAPYVVRNARWGVRYGSAEFEDTLEQGLTDQYVGLIMGQTAENLADQYKISRQEQDEWAAISQTRAEKATLEGRLKEEIFTVTIPGKKPVILEKDEFIKGASGVDKLGSLKAVFREGGTVTAGNASGLNDGAAVTIVASSSYAKKLGKKPLAIIRGYGHAGCDPAKMGIGPALAIPAALKKAGLKLSDMSLVEVNEAFAAQYLAVQKELGLNPEITNVNGGAVAIGHPLGASGARVTITLAYELKRRKAKYGIASLCIGGGQGIALVLENPEV

SEQ ID NO: 92850 - DNA, 1179 bp, Clostridium difficile 630
  CDS (1)..(1179): transl_table=11
atgaaagatgtagtaatcgtatcagcagtcagaacacctataggaagttttggaggtgtatttaaaaatacttcagctgttcaacttggaactatcgctgttaaagaagcgatatcacgtgtaggacttaatttatctgaaatagatgaagtaataattggaaatgttcttcaaacagggcttggacagaatgttgctagacaaattgctataaatgcaggtataccaaattctgttccaagctacacagtaaataaattatgtggttcagggcttaaaagtgtccagctagctgcccaatcaatcacatctggtgaaaatgatgtggtaattgcaggtggtactgaaaatatgagtcaagctccttatatcgttccaactgctcgctttggtagtaaaatgggtaacataaccatggtagatagtatgctaacagatggccttattgatgctttcaatcagtatcatatgggaataactgcagaaaatattgcaactaaatttgaatttactagagaaatgcaagataaattggcattagaaagtcaaaataaggctgagaatgctataaaaaacaaccgctttaaagaagaaatcgttccagtagatgttttaatacgtcgaggaaaaatagaaactattgataaagatgaatatcctaaattaggtatgacatttgaaggtttatctaaacttaaacctgcattcaaaaaagatggtactgtaacagctggaaatgcctcaggtattaatgatggtgcggctatgttaatactaatgagccaacaaaaagcagacgaactaggtattagaccacttgctaaaataaaatcctatgcttcagctggtgttgaacctgaagtcatgggtactggtccaatccctgcaactagaaaagcactgaaaaaagctggacttagcatcaatgatatagacttaatagaagcaaatgaagcgtttgctgcccaagcattagctgttaaaaatgaacttcaaatagattcatcaaagttaaatgttaatggtggtgcaatagcattaggacatccaataggagcaagtggagctagaatacttgttaccttaatttatgaaatgcaaaaacgtaaagttgaaactggacttgcaacactttgtattggtggtggtcaaggaatatcaatggtggtttcacgatag

SEQ ID NO: 92851 - protein, 392 aa, Clostridium difficile 630
MKDVVIVSAVRTPIGSFGGVFKNTSAVQLGTIAVKEAISRVGLNLSEIDEVIIGNVLQTGLGQNVARQIAINAGIPNSVPSYTVNKLCGSGLKSVQLAAQSITSGENDVVIAGGTENMSQAPYIVPTARFGSKMGNITMVDSMLTDGLIDAFNQYHMGITAENIATKFEFTREMQDKLALESQNKAENAIKNNRFKEEIVPVDVLIRRGKIETIDKDEYPKLGMTFEGLSKLKPAFKKDGTVTAGNASGINDGAAMLILMSQQKADELGIRPLAKIKSYASAGVEPEVMGTGPIPATRKALKKAGLSINDIDLIEANEAFAAQALAVKNELQIDSSKLNVNGGAIALGHPIGASGARILVTLIYEMQKRKVETGLATLCIGGGQGISMVVSR

SEQ ID NO: 92852 - DNA, 1185 bp, Acinetobacter sp. ADP1
  CDS (1)..(1185): transl_table=11
ttggatatgtcaaaaattatgattgcagcagcagcccgaaccccgatgggaagttttcagggaagtcttgctggcttaactgcacctgatctgggtgccgtcgtcattcagcgcgtattagaacaaacacaaattccagcagcagatattgatgaagtcattatgggttgtgttttgccagcaggactcaaacaggctccagcacgtcaggccatgcgtcaagcaggcttgcccgaccatgtgggggcgacaaccatcaataaagtctgtggctctggtatgaaagcgactatgtttgcagccgatgcaattctagcaggcagtattcagattgcggtggttggcggtatggaatccatgaccaattcgccttatttgttgcctaaagctcgatctggctatcgtatgggtcacggacaagtactcgatcatatgtttttagatggtttggaagatgcttatacaggccgtgccatgggttcttttgcccaagacatggcaaatcaaaaaggttacacccgtgaacagatggatgcgtttgcgattcgctcgctgactcgcgcgcaacacgccattacagcaggccatttccaatctgaaattgcaccagtcaccgtagctacccgtaaaggcgacataaccgtatctgaggatgaaaatccaggcaatgcaaaaatagataaaattccgagcttgcgtccagcgtttgctaaagatggaacgattactgctgccaattccagctccatcagtgatggtgcatctgctttgctcattacttcagaacaacaagcagagcagcgtggcctcaaagtattagcagaaattaagggttacaccactcattcacagcttcccgccgaatttaccatcgcacctgtcggagcgattgaaaaattacttaaaaaaattggctggacagcagaagaggtcgatctgtgggaaatcaatgaagcttttgccatggtcaccatggccgcgattgatgctttcaagctcgacgcagagaaggtcaatatcaacggtggcgcatgtgcattaggtcatccgcttggctcatcgggctccagaatcattgtcacgcttattcatgcgctaaaacgtctgggcaaacgtaaagggattgcagcactatgtatcggcggcggtgaagccactgcccttgccatagaacttgtcgattaa

SEQ ID NO: 92853 - protein, 394 aa, Acinetobacter sp. ADP1
MDMSKIMIAAAARTPMGSFQGSLAGLTAPDLGAVVIQRVLEQTQIPAADIDEVIMGCVLPAGLKQAPARQAMRQAGLPDHVGATTINKVCGSGMKATMFAADAILAGSIQIAVVGGMESMTNSPYLLPKARSGYRMGHGQVLDHMFLDGLEDAYTGRAMGSFAQDMANQKGYTREQMDAFAIRSLTRAQHAITAGHFQSEIAPVTVATRKGDITVSEDENPGNAKIDKIPSLRPAFAKDGTITAANSSSISDGASALLITSEQQAEQRGLKVLAEIKGYTTHSQLPAEFTIAPVGAIEKLLKKIGWTAEEVDLWEINEAFAMVTMAAIDAFKLDAEKVNINGGACALGHPLGSSGSRIIVTLIHALKRLGKRKGIAALCIGGGEATALAIELVD

SEQ ID NO: 92854 - DNA, 1179 bp, Erwinia carotovora subsp. atroseptica SCRI1043
  CDS (1)..(1179): transl_table=11
atgaacgactccattgttattgttaatgccaagcgcaccgcgattggtaaattcgcaggcagtctggccaacacatcggctatcgacatggcatctgccaccatccgtgactgcctgtcgacgctgccggacacgctggcgattgatgaagtgattctcggcaacgtgctgcaagccggtctggggcaaaaccccgcgcatcaggccagcaaggctgctgggctgccttttgaaacaccctcgctcaccatcagtaaggtgtgtggttccggcctgaaggccgttgtgatgggcgcacagtctattctgtccggcgataatcaggtctgcgtgaccggcgggatggaaaacatgagcgccgcgccttacctgctggaaaaagcgcgccacggttaccgcatgggagacggcaagctcgttgacatcatgattaaggatggtctgtggtgtgcgtttaacgattaccacatgggtaccacggcggaaaatatcgccgagcgctaccagctcacgcgagaagaacaggatcaggtggcgctggcatcacagcagaaagccgtcgccgcgattgaggctggccgcttcaaagccgaaataaccccgctgtcactgcgtagcaaaaaagagacgcggattttcgatcgggatgaattccctcgcgccgacaccacgctggcatcgctggccgcgttacgtccggcgttttccgctaacggcaccgtcaccgcaggcaatgcgtccggcattaacgatgccgccgcgacgctggtgttaatgcgtgaatccgaagcgaaaaaacagggtattaccccgctggcgcggatccgcagttgggcgtctgctggagtaccgagtgaagtgatggggctggggccgattccggcgacgcagaaagcactgctcaaggctgggctgacgatcggtgatattgacctgattgaagcaaatgaagcttttgccgcacagtttctagcggtacagcgcgatcttcatctcgatccagagaaagtgaacgtcaacggcggtgcgattgcgttgggccaccctatcggcgcgagcggtgcgcgtattctcgtcacgctggtacatgcgctgcacagctataacaaaacgctgggattggcgacgctgtgcatcggcggtgggcaaggtatcgcgatgatcgtcgaacgcgtttaa

SEQ ID NO: 92855 - protein, 392 aa, Erwinia carotovora subsp. atroseptica SCRI1043
MNDSIVIVNAKRTAIGKFAGSLANTSAIDMASATIRDCLSTLPDTLAIDEVILGNVLQAGLGQNPAHQASKAAGLPFETPSLTISKVCGSGLKAVVMGAQSILSGDNQVCVTGGMENMSAAPYLLEKARHGYRMGDGKLVDIMIKDGLWCAFNDYHMGTTAENIAERYQLTREEQDQVALASQQKAVAAIEAGRFKAEITPLSLRSKKETRIFDRDEFPRADTTLASLAALRPAFSANGTVTAGNASGINDAAATLVLMRESEAKKQGITPLARIRSWASAGVPSEVMGLGPIPATQKALLKAGLTIGDIDLIEANEAFAAQFLAVQRDLHLDPEKVNVNGGAIALGHPIGASGARILVTLVHALHSYNKTLGLATLCIGGGQGIAMIVERV

SEQ ID NO: 92856 - DNA, 1185 bp, Streptococcus pyogenes MGAS10394
  CDS (1)..(1185): transl_table=11
atgactaaagaagtggtgatcacatctgcttatcgtaccccgataggaaattttggaggagtctttaaatctttatcagccgtagatttgggggtgacagttgttacaaaaattttagctgataccggtcttaaaagtgatgccattgatgaagtgatctttgggaatgtgttacatgcaggtctgggtcaaaatgttgctcggcaagtagcgctaaatgcggggctttcttatgatacccctgcttttacgattgatatggtctgtggttctggcttaaaagcagttgagttaggtgctcaaaagattcaaacgggcaacgctgatattgttttagtcggtggtaccgaaaacatgagtcaagcaccttacgttttacaaggccaacgttggggatctcgtatgggagatagtaaagtagtagataccatgcttaaagatgggttgagtgatgcttttgcaggttatcacatgggtataacggccgaaaatattgtgcaacagtatggactgaccagagaagaacaagatgcctttgcagctgatagccaacgtaaagcccaacttgccatagaaaaaggtcgtttcaaagaagagattgcacctgtcactattcctcagcgtaaaggtgaacctttgctcattgatcaagatgaataccctaaatttggaacgacagtggataagttagcaaagttacgccctgcttttatcaaagatgaggggacagtaactgctggtaatgcttcaggaatcaatgatggagcagcggcaattttattgatgagtaaagaaaaagctgaagaattagggctccctattttagctaaaatcactagttatgcaagtgcaggtgtagacccaagtattatgggctgcggaccaatacctgctacgaaaaaggctcttgcaaaggctcagctgacaattgatgacattgatttgattgaagcaaacgaagcttttgctgctcaggctttagcggtttcacgagaccttggttttgacaatgaaaaagttaatgtcaatggaggagctattgctttgggtcacccgattggagcatcaggtgctcgtattttagtcaccttattagcagaaatggctaagcgtgatgtgagacatggcttagcaacgctttgtattggtggtggccaaggtcaaagtatcatcgtaacaagatag

SEQ ID NO: 92857 - protein, 394 aa, Streptococcus pyogenes MGAS10394
MTKEVVITSAYRTPIGNFGGVFKSLSAVDLGVTVVTKILADTGLKSDAIDEVIFGNVLHAGLGQNVARQVALNAGLSYDTPAFTIDMVCGSGLKAVELGAQKIQTGNADIVLVGGTENMSQAPYVLQGQRWGSRMGDSKVVDTMLKDGLSDAFAGYHMGITAENIVQQYGLTREEQDAFAADSQRKAQLAIEKGRFKEEIAPVTIPQRKGEPLLIDQDEYPKFGTTVDKLAKLRPAFIKDEGTVTAGNASGINDGAAAILLMSKEKAEELGLPILAKITSYASAGVDPSIMGCGPIPATKKALAKAQLTIDDIDLIEANEAFAAQALAVSRDLGFDNEKVNVNGGAIALGHPIGASGARILVTLLAEMAKRDVRHGLATLCIGGGQGQSIIVTR

SEQ ID NO: 92858 - DNA, 1179 bp, Symbiobacterium thermophilum IAM 14863
  CDS (1)..(1179): transl_table=11
atgcgggaagcggtgatcgtgtcggcggtgcgcacccccatcggcagcctgggcggcgcgctgtcgaccgtgaagtcttacgagctgggcgcggccgccatcgccgaggcgctgcgccgggccgggatccgcggcgagcaggtggatgaggtgatcatcggccaggtgctggaggccggggaggggcaacaccctgcccggatcgcgagcctgaaggccgggatcccctacacggtgccggtgaccggcgtcaacaaggtctgcggctccggcctgaaggcggtggccctggccgcccaggcgatcatgctcggggatgccgacgtggtggtggccggcggccaggagtcgatgtccggggccccctacctggtgccccgggcccggttcggctaccggatgggccacggccagctggtggactcgatgatcgcggacgccctgacctgcggctgggagcacgtccacatggggctcaccgccgagaacatcgccgagcagttcggcatcagccgggaggaccaggacgccttcgccgccgcctcccagcagaaggcggaggcggcgatcaaggccggcaggttccgggaggagatcgtgccggtgaccgtgcccggccgcaagggcgacacggtggtggacgccgacgagcacccgcgcttcggcaccacggtggaggcgctggccaaactccgcccggccttcaaggagggcggcaccgtgacggccggcaacgcctccggcatcaacgacggcgccgcggcggtggtggtgatgtcggcggagaaggcggcgtccctgggggtcaggcccatggcggtgatccgcagctacgccgccgccggggtggagccccggatcatgggcaccggccccatcccggccacccggaaggccctggcccgggcgggactgaccatcgaccggctggacctgatcgaggccaacgaggccttcgccgcccaggccctcgcggtggtccgggggctggaactggaccccggcaaggtcaacgtcaacggcggcgccatcgccctgggccatcccgtaggggcctcgggcgcccgcatcctggtcacgctgctttacgagatgcagaggcggcggagccggtacggcctggcgaccctctgcatcggcggcggccagggcatcgccatggtggtcgagcgggcctga

SEQ ID NO: 92859 - protein, 392 aa, Symbiobacterium thermophilum IAM 14863
MREAVIVSAVRTPIGSLGGALSTVKSYELGAAAIAEALRRAGIRGEQVDEVIIGQVLEAGEGQHPARIASLKAGIPYTVPVTGVNKVCGSGLKAVALAAQAIMLGDADVVVAGGQESMSGAPYLVPRARFGYRMGHGQLVDSMIADALTCGWEHVHMGLTAENIAEQFGISREDQDAFAAASQQKAEAAIKAGRFREEIVPVTVPGRKGDTVVDADEHPRFGTTVEALAKLRPAFKEGGTVTAGNASGINDGAAAVVVMSAEKAASLGVRPMAVIRSYAAAGVEPRIMGTGPIPATRKALARAGLTIDRLDLIEANEAFAAQALAVVRGLELDPGKVNVNGGAIALGHPVGASGARILVTLLYEMQRRRSRYGLATLCIGGGQGIAMVVERA

SEQ ID NO: 92860 - DNA, 1185 bp, Legionella pneumophila subsp. pneumophila str. Philadelphia 1
  CDS (1)..(1185): transl_table=11
atggaacataatgatgtcgtgatagtcgcagcaaaaagaacaccaatgggagctatgctaggcaatttatctgcactttcctccccagagttaggggcagtagcgcatatggcagcgttgtctcaatcaggtattgctccggcagaaatcgatgaagtgatcagtggttgtgtattacaagctggtattggtcaagctcctgccagacaggcagcaataaaagcaggcatacctaattcgacaggagccacgaccattaataaaatgtgtggttcgggcatgaaggctgtgatgcttgcgcatgatttaattaaggcaggtacagctaatgtaattttggctagcggtatggaaagtatgagcaatgccccctatttattatccaaagcacgagcaggatatagactgggtcatggtgaactgaaagatcatatgttccttgatggattagaagatgcctatgataaaggacaattaatggggtgtttcgctgaaacaactgcaaaacactttaatttcagcagagaacaacaagacgaatatgccttacgctcaatgaccaaagcgctaaaagcaatagagaatggtgcctttcgagaagaaatcgctcctgtcaccttaactacccgcaaaggagatatcacggttgacgtcgatgaagggcctgagacagccaaacttgccaaaatacctcagttaaaaccagcctttcaagcagatggtacagtcacagcagccaattcaagttctatttcagatggcgcggccagtttaattttaatgagtgcctcaaacgcagaaaaacgtggcattaagcccttggcaaaaatcatagcacacgccagccattcccaagccccacaatggttcacaaccgctcctgttgatgcaatccgtaaggtaatgaacaaagcgtcatggaaacaagatgatgtggatctttttgagattaatgaagcgtttgcagtagtagcgatggcagcaattactcagcttgaattgaatccggaacaagtcaatatacatggcggggcatgcgctttagggcatcccattggtgcttcaggagctcgcattctggttactttaatgcatgcgctaaaacaccagggtaaaaaacgcggaatagcttctttatgtataggcggtggtgaagcaacagctatggcaattgagctaatttaa

SEQ ID NO: 92861 - protein, 394 aa, Legionella pneumophila subsp. pneumophila str. Philadelphia 1
MEHNDVVIVAAKRTPMGAMLGNLSALSSPELGAVAHMAALSQSGIAPAEIDEVISGCVLQAGIGQAPARQAAIKAGIPNSTGATTINKMCGSGMKAVMLAHDLIKAGTANVILASGMESMSNAPYLLSKARAGYRLGHGELKDHMFLDGLEDAYDKGQLMGCFAETTAKHFNFSREQQDEYALRSMTKALKAIENGAFREEIAPVTLTTRKGDITVDVDEGPETAKLAKIPQLKPAFQADGTVTAANSSSISDGAASLILMSASNAEKRGIKPLAKIIAHASHSQAPQWFTTAPVDAIRKVMNKASWKQDDVDLFEINEAFAVVAMAAITQLELNPEQVNIHGGACALGHPIGASGARILVTLMHALKHQGKKRGIASLCIGGGEATAMAIELI

SEQ ID NO: 92862 - DNA, 1191 bp, Azoarcus sp. EbN1
  CDS (1)..(1191): transl_table=11
atgaatgatcccgttgttatcgtttccgccgcccgcacgccgctgggcggcttccagggcgatttgtccgcgctgagcggcccgcaacttggcgcggtcgcgatccgggcggccgtcgagcgcgccggcgtcaacgccgaagcggtgcaggaagtgctgatgggctgcgtgttgccggcgggcgtcgggcaggccccggcgcgccaggccgcgctcggcgccggtctgccgctatcggccggctgcacgacggtcagcaaggtatgcggctccggcatgaagtcggtgatgctcgcgcacgacctgctggtcgccggcacgaacgacgtgatggtcgccggcggcatggagtcgatgtcgaacgccccgtacttgctgccgaaggcgcgcggcggctaccggctcggccacggccaagtgctcgaccacatgttcctcgatggcctcgaggacagctactcgaaagagaacaagggtcgcctgatgggcacttttgccgaggattgcgccgcgcatttcgacttcacgcgcgccgcacaggacgagttcgcggtcgcctcgacgacccgcgcgcaaaaggcgatccaggacggttcgttcgcgtgggaagtcgcacccgtgacggttaccggccgcaagggcgacgttgtcgtcgacaaggacgagcagccgccgaaagcgcagatcgacaagattgccggcctgaagccggcgttcaggaaggacggcagcgtgactgcggcgaactcgagctcgatctccgatggcgcggccgcgctcgtgctgatgcgccgctccaccgccgacaggctcggcctcaagccgctcgcgacgatcgtcggtcacgcgacgcacgcgcaggatccggcgtggttcacgaccgccccggtcggcgcgatgcagaaagtgctggcgaaggccggttggtcgaaggatgacgtcgacctgtgggaaatcaacgaagccttcgcagtcgtcacgatggcggcgatgaaggagctcgagctgccgcacgacaaggtcaacgtgcatggtggcgcctgcgcattgggccatccgatcggcgcttcgggcgcacgcatcatcgtcacgctgctcggcgcgctgaagcagtatgacaagaagcgcggcgtcgcgagcctgtgcatcggcggcggcgaggcgacggcggttgcggtggagctcgcgtaa

SEQ ID NO: 92863 - protein, 396 aa, Azoarcus sp. EbN1
MNDPVVIVSAARTPLGGFQGDLSALSGPQLGAVAIRAAVERAGVNAEAVQEVLMGCVLPAGVGQAPARQAALGAGLPLSAGCTTVSKVCGSGMKSVMLAHDLLVAGTNDVMVAGGMESMSNAPYLLPKARGGYRLGHGQVLDHMFLDGLEDSYSKENKGRLMGTFAEDCAAHFDFTRAAQDEFAVASTTRAQKAIQDGSFAWEVAPVTVTGRKGDVVVDKDEQPPKAQIDKIAGLKPAFRKDGSVTAANSSSISDGAAALVLMRRSTADRLGLKPLATIVGHATHAQDPAWFTTAPVGAMQKVLAKAGWSKDDVDLWEINEAFAVVTMAAMKELELPHDKVNVHGGACALGHPIGASGARIIVTLLGALKQYDKKRGVASLCIGGGEATAVAVELA
